United States Patent Application Publication US 2026/0265762 A1, published September 10, 2026 (application 19/165,509).

The application's sequence listing, which the Patent Office published only in electronic form, follows.

SEQUENCE LISTING (8373 sequences)

SEQ ID NO: 1 - protein, 2133 aa, synthetic construct
MPAAKRVKLDGGDKKYSIGLDIGTNSVGWAVITDEYKVPSKKFKVLGNTDRHSIKKNLIGALLFDSGETAEATRLKRTARRRYTRRKNRICYLQEIFSNEMAKVDDSFFHRLEESFLVEEDKKHERHPIFGNIVDEVAYHEKYPTIYHLRKKLVDSTDKADLRLIYLALAHMIKFRGHFLIEGDLNPDNSDVDKLFIQLVQTYNQLFEENPINASGVDAKAILSARLSKSRRLENLIAQLPGEKKNGLFGNLIALSLGLTPNFKSNFDLAEDAKLQLSKDTYDDDLDNLLAQIGDQYADLFLAAKNLSDAILLSDILRVNTEITKAPLSASMIKRYDEHHQDLTLLKALVRQQLPEKYKEIFFDQSKNGYAGYIDGGASQEEFYKFIKPILEKMDGTEELLVKLNREDLLRKQRTFDNGSIPHQIHLGELHAILRRQEDFYPFLKDNREKIEKILTFRIPYYVGPLARGNSRFAWMTRKSEETITPWNFEEVVDKGASAQSFIERMTNFDKNLPNEKVLPKHSLLYEYFTVYNELTKVKYVTEGMRKPAFLSGEQKKAIVDLLFKTNRKVTVKQLKEDYFKKIECFDSVEISGVEDRFNASLGTYHDLLKIIKDKDFLDNEENEDILEDIVLTLTLFEDREMIEERLKTYAHLFDDKVMKQLKRRRYTGWGRLSRKLINGIRDKQSGKTILDFLKSDGFANRNFMQLIHDDSLTFKEDIQKAQVSGQGDSLHEHIANLAGSPAIKKGILQTVKVVDELVKVMGRHKPENIVIEMARENQTTQKGQKNSRERMKRIEEGIKELGSQILKEHPVENTQLQNEKLYLYYLQNGRDMYVDQELDINRLSDYDVDHIVPQSFLKDDSIDNKVLTRSDKARGKSDNVPSEEVVKKMKNYWRQLLNAKLITQRKFDNLTKAERGGLSELDKAGFIKRQLVETRQITKHVAQILDSRMNTKYDENDKLIREVKVITLKSKLVSDFRKDFQFYKVREINNYHHAHDAYLNAVVGTALIKKYPKLESEFVYGDYKVYDVRKMIAKSEQEIGKATAKYFFYSNIMNFFKTEITLANGEIRKRPLIETNGETGEIVWDKGRDFATVRKVLSMPQVNIVKKTEVQTGGFSKESILPKRNSDKLIARKKDWDPKKYGGFDSPTVAYSVLVVAKVEKGKSKKLKSVKELLGITIMERSSFEKNPIDFLEAKGYKEVKKDLIIKLPKYSLFELENGRKRMLASAGELQKGNELALPSKYVNFLYLASHYEKLKGSPEDNEQKQLFVEQHKHYLDEIIEQISEFSKRVILADANLDKVLSAYNKHRDKPIREQAENIIHLFTLTNLGAPAAFKYFDTTIDRKRYTSTKEVLDATLIHQSITGLYETRIDLSQLGGDGGAEAAAKEAAAKEAAAKEAAAKALEAEAAAKEAAAKEAAAKEAAAKAGGTAPLEEEYRLFLEAPIQNVTLLEQWKREIPKVWAEINPPGLASTQAPIHVQLLSTALPVRVRQYPITLEAKRSLRETIRKFRAAGILRPVHSPWNTPLLPVRKSGTSEYRMVQDLREVNKRVETIHPTVPNPYTLLSLLPPDRIWYSVLDLKDAFFCIPLAPESQLIFAFEWADAEEGESGQLTWTRLPQGFKNSPTLFDEALNRDLQGFRLDHPSVSLLQYVDDLLIAADTQAACLSATRDLLMTLAELGYRVSGKKAQLCQEEVTYLGFKIHKGSRSLSNSRTQAILQIPVPKTKRQVREFLGTIGYCRLWIPGFAELAQPLYAATRGGNDPLVWGEKEEEAFQSLKLALTQPPALALPSLDKPFQLFVEETSGAAKGVLTQALGPWKRPVAYLSKRLDPVAAGWPRCLRAIAAAALLTREASKLTFGQDIEITSSHNLESLLRSPPDKWLTNARITQYQVLLLDPPRVRFKQTAALNPATLLPETDDTLPIHHCLDTLDSLTSTRPDLTDQPLAQAEATLFTDGSSYIRDGKRYAGAAVVTLDSVIWAEPLPIGTSAQKAELIALTKALEWSKDKSVNIYTDSRYAFATLHVHGMIYRERGLLTAGGKAIKNAPEILALLTAVWLPKRVAVMHCKGHQKDDAPTSTGNRRADEVAREVAIRPLSTQATISAGKRTADGSEFEKRTADGSEFESPKKKAKVE

SEQ ID NO: 2 - protein, 2112 aa, synthetic construct
MPAAKRVKLDGGDKKYSIGLDIGTNSVGWAVITDEYKVPSKKFKVLGNTDRHSIKKNLIGALLFDSGETAEATRLKRTARRRYTRRKNRICYLQEIFSNEMAKVDDSFFHRLEESFLVEEDKKHERHPIFGNIVDEVAYHEKYPTIYHLRKKLVDSTDKADLRLIYLALAHMIKFRGHFLIEGDLNPDNSDVDKLFIQLVQTYNQLFEENPINASGVDAKAILSARLSKSRRLENLIAQLPGEKKNGLFGNLIALSLGLTPNFKSNFDLAEDAKLQLSKDTYDDDLDNLLAQIGDQYADLFLAAKNLSDAILLSDILRVNTEITKAPLSASMIKRYDEHHQDLTLLKALVRQQLPEKYKEIFFDQSKNGYAGYIDGGASQEEFYKFIKPILEKMDGTEELLVKLNREDLLRKQRTFDNGSIPHQIHLGELHAILRRQEDFYPFLKDNREKIEKILTFRIPYYVGPLARGNSRFAWMTRKSEETITPWNFEEVVDKGASAQSFIERMTNFDKNLPNEKVLPKHSLLYEYFTVYNELTKVKYVTEGMRKPAFLSGEQKKAIVDLLFKTNRKVTVKQLKEDYFKKIECFDSVEISGVEDRFNASLGTYHDLLKIIKDKDFLDNEENEDILEDIVLTLTLFEDREMIEERLKTYAHLFDDKVMKQLKRRRYTGWGRLSRKLINGIRDKQSGKTILDFLKSDGFANRNFMQLIHDDSLTFKEDIQKAQVSGQGDSLHEHIANLAGSPAIKKGILQTVKVVDELVKVMGRHKPENIVIEMARENQTTQKGQKNSRERMKRIEEGIKELGSQILKEHPVENTQLQNEKLYLYYLQNGRDMYVDQELDINRLSDYDVDHIVPQSFLKDDSIDNKVLTRSDKARGKSDNVPSEEVVKKMKNYWRQLLNAKLITQRKFDNLTKAERGGLSELDKAGFIKRQLVETRQITKHVAQILDSRMNTKYDENDKLIREVKVITLKSKLVSDFRKDFQFYKVREINNYHHAHDAYLNAVVGTALIKKYPKLESEFVYGDYKVYDVRKMIAKSEQEIGKATAKYFFYSNIMNFFKTEITLANGEIRKRPLIETNGETGEIVWDKGRDFATVRKVLSMPQVNIVKKTEVQTGGFSKESILPKRNSDKLIARKKDWDPKKYGGFDSPTVAYSVLVVAKVEKGKSKKLKSVKELLGITIMERSSFEKNPIDFLEAKGYKEVKKDLIIKLPKYSLFELENGRKRMLASAGELQKGNELALPSKYVNFLYLASHYEKLKGSPEDNEQKQLFVEQHKHYLDEIIEQISEFSKRVILADANLDKVLSAYNKHRDKPIREQAENIIHLFTLTNLGAPAAFKYFDTTIDRKRYTSTKEVLDATLIHQSITGLYETRIDLSQLGGDGGGGGGSGGGGSGGGGSGGGGSGGGGSGGTAPLEEEYRLFLEAPIQNVTLLEQWKREIPKVWAEINPPGLASTQAPIHVQLLSTALPVRVRQYPITLEAKRSLRETIRKFRAAGILRPVHSPWNTPLLPVRKSGTSEYRMVQDLREVNKRVETIHPTVPNPYTLLSLLPPDRIWYSVLDLKDAFFCIPLAPESQLIFAFEWADAEEGESGQLTWTRLPQGFKNSPTLFDEALNRDLQGFRLDHPSVSLLQYVDDLLIAADTQAACLSATRDLLMTLAELGYRVSGKKAQLCQEEVTYLGFKIHKGSRSLSNSRTQAILQIPVPKTKRQVREFLGTIGYCRLWIPGFAELAQPLYAATRGGNDPLVWGEKEEEAFQSLKLALTQPPALALPSLDKPFQLFVEETSGAAKGVLTQALGPWKRPVAYLSKRLDPVAAGWPRCLRAIAAAALLTREASKLTFGQDIEITSSHNLESLLRSPPDKWLTNARITQYQVLLLDPPRVRFKQTAALNPATLLPETDDTLPIHHCLDTLDSLTSTRPDLTDQPLAQAEATLFTDGSSYIRDGKRYAGAAVVTLDSVIWAEPLPIGTSAQKAELIALTKALEWSKDKSVNIYTDSRYAFATLHVHGMIYRERGLLTAGGKAIKNAPEILALLTAVWLPKRVAVMHCKGHQKDDAPTSTGNRRADEVAREVAIRPLSTQATISAGKRTADGSEFEKRTADGSEFESPKKKAKVE

SEQ ID NO: 3 - protein, 2098 aa, synthetic construct
MPAAKRVKLDGGDKKYSIGLDIGTNSVGWAVITDEYKVPSKKFKVLGNTDRHSIKKNLIGALLFDSGETAEATRLKRTARRRYTRRKNRICYLQEIFSNEMAKVDDSFFHRLEESFLVEEDKKHERHPIFGNIVDEVAYHEKYPTIYHLRKKLVDSTDKADLRLIYLALAHMIKFRGHFLIEGDLNPDNSDVDKLFIQLVQTYNQLFEENPINASGVDAKAILSARLSKSRRLENLIAQLPGEKKNGLFGNLIALSLGLTPNFKSNFDLAEDAKLQLSKDTYDDDLDNLLAQIGDQYADLFLAAKNLSDAILLSDILRVNTEITKAPLSASMIKRYDEHHQDLTLLKALVRQQLPEKYKEIFFDQSKNGYAGYIDGGASQEEFYKFIKPILEKMDGTEELLVKLNREDLLRKQRTFDNGSIPHQIHLGELHAILRRQEDFYPFLKDNREKIEKILTFRIPYYVGPLARGNSRFAWMTRKSEETITPWNFEEVVDKGASAQSFIERMTNFDKNLPNEKVLPKHSLLYEYFTVYNELTKVKYVTEGMRKPAFLSGEQKKAIVDLLFKTNRKVTVKQLKEDYFKKIECFDSVEISGVEDRFNASLGTYHDLLKIIKDKDFLDNEENEDILEDIVLTLTLFEDREMIEERLKTYAHLFDDKVMKQLKRRRYTGWGRLSRKLINGIRDKQSGKTILDFLKSDGFANRNFMQLIHDDSLTFKEDIQKAQVSGQGDSLHEHIANLAGSPAIKKGILQTVKVVDELVKVMGRHKPENIVIEMARENQTTQKGQKNSRERMKRIEEGIKELGSQILKEHPVENTQLQNEKLYLYYLQNGRDMYVDQELDINRLSDYDVDHIVPQSFLKDDSIDNKVLTRSDKARGKSDNVPSEEVVKKMKNYWRQLLNAKLITQRKFDNLTKAERGGLSELDKAGFIKRQLVETRQITKHVAQILDSRMNTKYDENDKLIREVKVITLKSKLVSDFRKDFQFYKVREINNYHHAHDAYLNAVVGTALIKKYPKLESEFVYGDYKVYDVRKMIAKSEQEIGKATAKYFFYSNIMNFFKTEITLANGEIRKRPLIETNGETGEIVWDKGRDFATVRKVLSMPQVNIVKKTEVQTGGFSKESILPKRNSDKLIARKKDWDPKKYGGFDSPTVAYSVLVVAKVEKGKSKKLKSVKELLGITIMERSSFEKNPIDFLEAKGYKEVKKDLIIKLPKYSLFELENGRKRMLASAGELQKGNELALPSKYVNFLYLASHYEKLKGSPEDNEQKQLFVEQHKHYLDEIIEQISEFSKRVILADANLDKVLSAYNKHRDKPIREQAENIIHLFTLTNLGAPAAFKYFDTTIDRKRYTSTKEVLDATLIHQSITGLYETRIDLSQLGGDGGPAPEAAAKGGGGGTAPLEEEYRLFLEAPIQNVTLLEQWKREIPKVWAEINPPGLASTQAPIHVQLLSTALPVRVRQYPITLEAKRSLRETIRKFRAAGILRPVHSPWNTPLLPVRKSGTSEYRMVQDLREVNKRVETIHPTVPNPYTLLSLLPPDRIWYSVLDLKDAFFCIPLAPESQLIFAFEWADAEEGESGQLTWTRLPQGFKNSPTLFDEALNRDLQGFRLDHPSVSLLQYVDDLLIAADTQAACLSATRDLLMTLAELGYRVSGKKAQLCQEEVTYLGFKIHKGSRSLSNSRTQAILQIPVPKTKRQVREFLGTIGYCRLWIPGFAELAQPLYAATRGGNDPLVWGEKEEEAFQSLKLALTQPPALALPSLDKPFQLFVEETSGAAKGVLTQALGPWKRPVAYLSKRLDPVAAGWPRCLRAIAAAALLTREASKLTFGQDIEITSSHNLESLLRSPPDKWLTNARITQYQVLLLDPPRVRFKQTAALNPATLLPETDDTLPIHHCLDTLDSLTSTRPDLTDQPLAQAEATLFTDGSSYIRDGKRYAGAAVVTLDSVIWAEPLPIGTSAQKAELIALTKALEWSKDKSVNIYTDSRYAFATLHVHGMIYRERGLLTAGGKAIKNAPEILALLTAVWLPKRVAVMHCKGHQKDDAPTSTGNRRADEVAREVAIRPLSTQATISAGKRTADGSEFEKRTADGSEFESPKKKAKVE

SEQ ID NO: 4 - protein, 2090 aa, synthetic construct
MPAAKRVKLDGGDKKYSIGLDIGTNSVGWAVITDEYKVPSKKFKVLGNTDRHSIKKNLIGALLFDSGETAEATRLKRTARRRYTRRKNRICYLQEIFSNEMAKVDDSFFHRLEESFLVEEDKKHERHPIFGNIVDEVAYHEKYPTIYHLRKKLVDSTDKADLRLIYLALAHMIKFRGHFLIEGDLNPDNSDVDKLFIQLVQTYNQLFEENPINASGVDAKAILSARLSKSRRLENLIAQLPGEKKNGLFGNLIALSLGLTPNFKSNFDLAEDAKLQLSKDTYDDDLDNLLAQIGDQYADLFLAAKNLSDAILLSDILRVNTEITKAPLSASMIKRYDEHHQDLTLLKALVRQQLPEKYKEIFFDQSKNGYAGYIDGGASQEEFYKFIKPILEKMDGTEELLVKLNREDLLRKQRTFDNGSIPHQIHLGELHAILRRQEDFYPFLKDNREKIEKILTFRIPYYVGPLARGNSRFAWMTRKSEETITPWNFEEVVDKGASAQSFIERMTNFDKNLPNEKVLPKHSLLYEYFTVYNELTKVKYVTEGMRKPAFLSGEQKKAIVDLLFKTNRKVTVKQLKEDYFKKIECFDSVEISGVEDRFNASLGTYHDLLKIIKDKDFLDNEENEDILEDIVLTLTLFEDREMIEERLKTYAHLFDDKVMKQLKRRRYTGWGRLSRKLINGIRDKQSGKTILDFLKSDGFANRNFMQLIHDDSLTFKEDIQKAQVSGQGDSLHEHIANLAGSPAIKKGILQTVKVVDELVKVMGRHKPENIVIEMARENQTTQKGQKNSRERMKRIEEGIKELGSQILKEHPVENTQLQNEKLYLYYLQNGRDMYVDQELDINRLSDYDVDHIVPQSFLKDDSIDNKVLTRSDKARGKSDNVPSEEVVKKMKNYWRQLLNAKLITQRKFDNLTKAERGGLSELDKAGFIKRQLVETRQITKHVAQILDSRMNTKYDENDKLIREVKVITLKSKLVSDFRKDFQFYKVREINNYHHAHDAYLNAVVGTALIKKYPKLESEFVYGDYKVYDVRKMIAKSEQEIGKATAKYFFYSNIMNFFKTEITLANGEIRKRPLIETNGETGEIVWDKGRDFATVRKVLSMPQVNIVKKTEVQTGGFSKESILPKRNSDKLIARKKDWDPKKYGGFDSPTVAYSVLVVAKVEKGKSKKLKSVKELLGITIMERSSFEKNPIDFLEAKGYKEVKKDLIIKLPKYSLFELENGRKRMLASAGELQKGNELALPSKYVNFLYLASHYEKLKGSPEDNEQKQLFVEQHKHYLDEIIEQISEFSKRVILADANLDKVLSAYNKHRDKPIREQAENIIHLFTLTNLGAPAAFKYFDTTIDRKRYTSTKEVLDATLIHQSITGLYETRIDLSQLGGDGGGGGGGTAPLEEEYRLFLEAPIQNVTLLEQWKREIPKVWAEINPPGLASTQAPIHVQLLSTALPVRVRQYPITLEAKRSLRETIRKFRAAGILRPVHSPWNTPLLPVRKSGTSEYRMVQDLREVNKRVETIHPTVPNPYTLLSLLPPDRIWYSVLDLKDAFFCIPLAPESQLIFAFEWADAEEGESGQLTWTRLPQGFKNSPTLFDEALNRDLQGFRLDHPSVSLLQYVDDLLIAADTQAACLSATRDLLMTLAELGYRVSGKKAQLCQEEVTYLGFKIHKGSRSLSNSRTQAILQIPVPKTKRQVREFLGTIGYCRLWIPGFAELAQPLYAATRGGNDPLVWGEKEEEAFQSLKLALTQPPALALPSLDKPFQLFVEETSGAAKGVLTQALGPWKRPVAYLSKRLDPVAAGWPRCLRAIAAAALLTREASKLTFGQDIEITSSHNLESLLRSPPDKWLTNARITQYQVLLLDPPRVRFKQTAALNPATLLPETDDTLPIHHCLDTLDSLTSTRPDLTDQPLAQAEATLFTDGSSYIRDGKRYAGAAVVTLDSVIWAEPLPIGTSAQKAELIALTKALEWSKDKSVNIYTDSRYAFATLHVHGMIYRERGLLTAGGKAIKNAPEILALLTAVWLPKRVAVMHCKGHQKDDAPTSTGNRRADEVAREVAIRPLSTQATISAGKRTADGSEFEKRTADGSEFESPKKKAKVE

SEQ ID NO: 5 - protein, 2098 aa, synthetic construct
MPAAKRVKLDGGDKKYSIGLDIGTNSVGWAVITDEYKVPSKKFKVLGNTDRHSIKKNLIGALLFDSGETAEATRLKRTARRRYTRRKNRICYLQEIFSNEMAKVDDSFFHRLEESFLVEEDKKHERHPIFGNIVDEVAYHEKYPTIYHLRKKLVDSTDKADLRLIYLALAHMIKFRGHFLIEGDLNPDNSDVDKLFIQLVQTYNQLFEENPINASGVDAKAILSARLSKSRRLENLIAQLPGEKKNGLFGNLIALSLGLTPNFKSNFDLAEDAKLQLSKDTYDDDLDNLLAQIGDQYADLFLAAKNLSDAILLSDILRVNTEITKAPLSASMIKRYDEHHQDLTLLKALVRQQLPEKYKEIFFDQSKNGYAGYIDGGASQEEFYKFIKPILEKMDGTEELLVKLNREDLLRKQRTFDNGSIPHQIHLGELHAILRRQEDFYPFLKDNREKIEKILTFRIPYYVGPLARGNSRFAWMTRKSEETITPWNFEEVVDKGASAQSFIERMTNFDKNLPNEKVLPKHSLLYEYFTVYNELTKVKYVTEGMRKPAFLSGEQKKAIVDLLFKTNRKVTVKQLKEDYFKKIECFDSVEISGVEDRFNASLGTYHDLLKIIKDKDFLDNEENEDILEDIVLTLTLFEDREMIEERLKTYAHLFDDKVMKQLKRRRYTGWGRLSRKLINGIRDKQSGKTILDFLKSDGFANRNFMQLIHDDSLTFKEDIQKAQVSGQGDSLHEHIANLAGSPAIKKGILQTVKVVDELVKVMGRHKPENIVIEMARENQTTQKGQKNSRERMKRIEEGIKELGSQILKEHPVENTQLQNEKLYLYYLQNGRDMYVDQELDINRLSDYDVDHIVPQSFLKDDSIDNKVLTRSDKARGKSDNVPSEEVVKKMKNYWRQLLNAKLITQRKFDNLTKAERGGLSELDKAGFIKRQLVETRQITKHVAQILDSRMNTKYDENDKLIREVKVITLKSKLVSDFRKDFQFYKVREINNYHHAHDAYLNAVVGTALIKKYPKLESEFVYGDYKVYDVRKMIAKSEQEIGKATAKYFFYSNIMNFFKTEITLANGEIRKRPLIETNGETGEIVWDKGRDFATVRKVLSMPQVNIVKKTEVQTGGFSKESILPKRNSDKLIARKKDWDPKKYGGFDSPTVAYSVLVVAKVEKGKSKKLKSVKELLGITIMERSSFEKNPIDFLEAKGYKEVKKDLIIKLPKYSLFELENGRKRMLASAGELQKGNELALPSKYVNFLYLASHYEKLKGSPEDNEQKQLFVEQHKHYLDEIIEQISEFSKRVILADANLDKVLSAYNKHRDKPIREQAENIIHLFTLTNLGAPAAFKYFDTTIDRKRYTSTKEVLDATLIHQSITGLYETRIDLSQLGGDGGGGGGSSEAAAKGGTAPLEEEYRLFLEAPIQNVTLLEQWKREIPKVWAEINPPGLASTQAPIHVQLLSTALPVRVRQYPITLEAKRSLRETIRKFRAAGILRPVHSPWNTPLLPVRKSGTSEYRMVQDLREVNKRVETIHPTVPNPYTLLSLLPPDRIWYSVLDLKDAFFCIPLAPESQLIFAFEWADAEEGESGQLTWTRLPQGFKNSPTLFDEALNRDLQGFRLDHPSVSLLQYVDDLLIAADTQAACLSATRDLLMTLAELGYRVSGKKAQLCQEEVTYLGFKIHKGSRSLSNSRTQAILQIPVPKTKRQVREFLGTIGYCRLWIPGFAELAQPLYAATRGGNDPLVWGEKEEEAFQSLKLALTQPPALALPSLDKPFQLFVEETSGAAKGVLTQALGPWKRPVAYLSKRLDPVAAGWPRCLRAIAAAALLTREASKLTFGQDIEITSSHNLESLLRSPPDKWLTNARITQYQVLLLDPPRVRFKQTAALNPATLLPETDDTLPIHHCLDTLDSLTSTRPDLTDQPLAQAEATLFTDGSSYIRDGKRYAGAAVVTLDSVIWAEPLPIGTSAQKAELIALTKALEWSKDKSVNIYTDSRYAFATLHVHGMIYRERGLLTAGGKAIKNAPEILALLTAVWLPKRVAVMHCKGHQKDDAPTSTGNRRADEVAREVAIRPLSTQATISAGKRTADGSEFEKRTADGSEFESPKKKAKVE

SEQ ID NO: 6 - protein, 2098 aa, synthetic construct
MPAAKRVKLDGGDKKYSIGLDIGTNSVGWAVITDEYKVPSKKFKVLGNTDRHSIKKNLIGALLFDSGETAEATRLKRTARRRYTRRKNRICYLQEIFSNEMAKVDDSFFHRLEESFLVEEDKKHERHPIFGNIVDEVAYHEKYPTIYHLRKKLVDSTDKADLRLIYLALAHMIKFRGHFLIEGDLNPDNSDVDKLFIQLVQTYNQLFEENPINASGVDAKAILSARLSKSRRLENLIAQLPGEKKNGLFGNLIALSLGLTPNFKSNFDLAEDAKLQLSKDTYDDDLDNLLAQIGDQYADLFLAAKNLSDAILLSDILRVNTEITKAPLSASMIKRYDEHHQDLTLLKALVRQQLPEKYKEIFFDQSKNGYAGYIDGGASQEEFYKFIKPILEKMDGTEELLVKLNREDLLRKQRTFDNGSIPHQIHLGELHAILRRQEDFYPFLKDNREKIEKILTFRIPYYVGPLARGNSRFAWMTRKSEETITPWNFEEVVDKGASAQSFIERMTNFDKNLPNEKVLPKHSLLYEYFTVYNELTKVKYVTEGMRKPAFLSGEQKKAIVDLLFKTNRKVTVKQLKEDYFKKIECFDSVEISGVEDRFNASLGTYHDLLKIIKDKDFLDNEENEDILEDIVLTLTLFEDREMIEERLKTYAHLFDDKVMKQLKRRRYTGWGRLSRKLINGIRDKQSGKTILDFLKSDGFANRNFMQLIHDDSLTFKEDIQKAQVSGQGDSLHEHIANLAGSPAIKKGILQTVKVVDELVKVMGRHKPENIVIEMARENQTTQKGQKNSRERMKRIEEGIKELGSQILKEHPVENTQLQNEKLYLYYLQNGRDMYVDQELDINRLSDYDVDHIVPQSFLKDDSIDNKVLTRSDKARGKSDNVPSEEVVKKMKNYWRQLLNAKLITQRKFDNLTKAERGGLSELDKAGFIKRQLVETRQITKHVAQILDSRMNTKYDENDKLIREVKVITLKSKLVSDFRKDFQFYKVREINNYHHAHDAYLNAVVGTALIKKYPKLESEFVYGDYKVYDVRKMIAKSEQEIGKATAKYFFYSNIMNFFKTEITLANGEIRKRPLIETNGETGEIVWDKGRDFATVRKVLSMPQVNIVKKTEVQTGGFSKESILPKRNSDKLIARKKDWDPKKYGGFDSPTVAYSVLVVAKVEKGKSKKLKSVKELLGITIMERSSFEKNPIDFLEAKGYKEVKKDLIIKLPKYSLFELENGRKRMLASAGELQKGNELALPSKYVNFLYLASHYEKLKGSPEDNEQKQLFVEQHKHYLDEIIEQISEFSKRVILADANLDKVLSAYNKHRDKPIREQAENIIHLFTLTNLGAPAAFKYFDTTIDRKRYTSTKEVLDATLIHQSITGLYETRIDLSQLGGDGGGGSEAAAKGGGGGTAPLEEEYRLFLEAPIQNVTLLEQWKREIPKVWAEINPPGLASTQAPIHVQLLSTALPVRVRQYPITLEAKRSLRETIRKFRAAGILRPVHSPWNTPLLPVRKSGTSEYRMVQDLREVNKRVETIHPTVPNPYTLLSLLPPDRIWYSVLDLKDAFFCIPLAPESQLIFAFEWADAEEGESGQLTWTRLPQGFKNSPTLFDEALNRDLQGFRLDHPSVSLLQYVDDLLIAADTQAACLSATRDLLMTLAELGYRVSGKKAQLCQEEVTYLGFKIHKGSRSLSNSRTQAILQIPVPKTKRQVREFLGTIGYCRLWIPGFAELAQPLYAATRGGNDPLVWGEKEEEAFQSLKLALTQPPALALPSLDKPFQLFVEETSGAAKGVLTQALGPWKRPVAYLSKRLDPVAAGWPRCLRAIAAAALLTREASKLTFGQDIEITSSHNLESLLRSPPDKWLTNARITQYQVLLLDPPRVRFKQTAALNPATLLPETDDTLPIHHCLDTLDSLTSTRPDLTDQPLAQAEATLFTDGSSYIRDGKRYAGAAVVTLDSVIWAEPLPIGTSAQKAELIALTKALEWSKDKSVNIYTDSRYAFATLHVHGMIYRERGLLTAGGKAIKNAPEILALLTAVWLPKRVAVMHCKGHQKDDAPTSTGNRRADEVAREVAIRPLSTQATISAGKRTADGSEFEKRTADGSEFESPKKKAKVE

SEQ ID NO: 7 - protein, 2093 aa, synthetic construct
MPAAKRVKLDGGDKKYSIGLDIGTNSVGWAVITDEYKVPSKKFKVLGNTDRHSIKKNLIGALLFDSGETAEATRLKRTARRRYTRRKNRICYLQEIFSNEMAKVDDSFFHRLEESFLVEEDKKHERHPIFGNIVDEVAYHEKYPTIYHLRKKLVDSTDKADLRLIYLALAHMIKFRGHFLIEGDLNPDNSDVDKLFIQLVQTYNQLFEENPINASGVDAKAILSARLSKSRRLENLIAQLPGEKKNGLFGNLIALSLGLTPNFKSNFDLAEDAKLQLSKDTYDDDLDNLLAQIGDQYADLFLAAKNLSDAILLSDILRVNTEITKAPLSASMIKRYDEHHQDLTLLKALVRQQLPEKYKEIFFDQSKNGYAGYIDGGASQEEFYKFIKPILEKMDGTEELLVKLNREDLLRKQRTFDNGSIPHQIHLGELHAILRRQEDFYPFLKDNREKIEKILTFRIPYYVGPLARGNSRFAWMTRKSEETITPWNFEEVVDKGASAQSFIERMTNFDKNLPNEKVLPKHSLLYEYFTVYNELTKVKYVTEGMRKPAFLSGEQKKAIVDLLFKTNRKVTVKQLKEDYFKKIECFDSVEISGVEDRFNASLGTYHDLLKIIKDKDFLDNEENEDILEDIVLTLTLFEDREMIEERLKTYAHLFDDKVMKQLKRRRYTGWGRLSRKLINGIRDKQSGKTILDFLKSDGFANRNFMQLIHDDSLTFKEDIQKAQVSGQGDSLHEHIANLAGSPAIKKGILQTVKVVDELVKVMGRHKPENIVIEMARENQTTQKGQKNSRERMKRIEEGIKELGSQILKEHPVENTQLQNEKLYLYYLQNGRDMYVDQELDINRLSDYDVDHIVPQSFLKDDSIDNKVLTRSDKARGKSDNVPSEEVVKKMKNYWRQLLNAKLITQRKFDNLTKAERGGLSELDKAGFIKRQLVETRQITKHVAQILDSRMNTKYDENDKLIREVKVITLKSKLVSDFRKDFQFYKVREINNYHHAHDAYLNAVVGTALIKKYPKLESEFVYGDYKVYDVRKMIAKSEQEIGKATAKYFFYSNIMNFFKTEITLANGEIRKRPLIETNGETGEIVWDKGRDFATVRKVLSMPQVNIVKKTEVQTGGFSKESILPKRNSDKLIARKKDWDPKKYGGFDSPTVAYSVLVVAKVEKGKSKKLKSVKELLGITIMERSSFEKNPIDFLEAKGYKEVKKDLIIKLPKYSLFELENGRKRMLASAGELQKGNELALPSKYVNFLYLASHYEKLKGSPEDNEQKQLFVEQHKHYLDEIIEQISEFSKRVILADANLDKVLSAYNKHRDKPIREQAENIIHLFTLTNLGAPAAFKYFDTTIDRKRYTSTKEVLDATLIHQSITGLYETRIDLSQLGGDGGGGSGSSGGTAPLEEEYRLFLEAPIQNVTLLEQWKREIPKVWAEINPPGLASTQAPIHVQLLSTALPVRVRQYPITLEAKRSLRETIRKFRAAGILRPVHSPWNTPLLPVRKSGTSEYRMVQDLREVNKRVETIHPTVPNPYTLLSLLPPDRIWYSVLDLKDAFFCIPLAPESQLIFAFEWADAEEGESGQLTWTRLPQGFKNSPTLFDEALNRDLQGFRLDHPSVSLLQYVDDLLIAADTQAACLSATRDLLMTLAELGYRVSGKKAQLCQEEVTYLGFKIHKGSRSLSNSRTQAILQIPVPKTKRQVREFLGTIGYCRLWIPGFAELAQPLYAATRGGNDPLVWGEKEEEAFQSLKLALTQPPALALPSLDKPFQLFVEETSGAAKGVLTQALGPWKRPVAYLSKRLDPVAAGWPRCLRAIAAAALLTREASKLTFGQDIEITSSHNLESLLRSPPDKWLTNARITQYQVLLLDPPRVRFKQTAALNPATLLPETDDTLPIHHCLDTLDSLTSTRPDLTDQPLAQAEATLFTDGSSYIRDGKRYAGAAVVTLDSVIWAEPLPIGTSAQKAELIALTKALEWSKDKSVNIYTDSRYAFATLHVHGMIYRERGLLTAGGKAIKNAPEILALLTAVWLPKRVAVMHCKGHQKDDAPTSTGNRRADEVAREVAIRPLSTQATISAGKRTADGSEFEKRTADGSEFESPKKKAKVE

SEQ ID NO: 8 - protein, 2093 aa, synthetic construct
MPAAKRVKLDGGDKKYSIGLDIGTNSVGWAVITDEYKVPSKKFKVLGNTDRHSIKKNLIGALLFDSGETAEATRLKRTARRRYTRRKNRICYLQEIFSNEMAKVDDSFFHRLEESFLVEEDKKHERHPIFGNIVDEVAYHEKYPTIYHLRKKLVDSTDKADLRLIYLALAHMIKFRGHFLIEGDLNPDNSDVDKLFIQLVQTYNQLFEENPINASGVDAKAILSARLSKSRRLENLIAQLPGEKKNGLFGNLIALSLGLTPNFKSNFDLAEDAKLQLSKDTYDDDLDNLLAQIGDQYADLFLAAKNLSDAILLSDILRVNTEITKAPLSASMIKRYDEHHQDLTLLKALVRQQLPEKYKEIFFDQSKNGYAGYIDGGASQEEFYKFIKPILEKMDGTEELLVKLNREDLLRKQRTFDNGSIPHQIHLGELHAILRRQEDFYPFLKDNREKIEKILTFRIPYYVGPLARGNSRFAWMTRKSEETITPWNFEEVVDKGASAQSFIERMTNFDKNLPNEKVLPKHSLLYEYFTVYNELTKVKYVTEGMRKPAFLSGEQKKAIVDLLFKTNRKVTVKQLKEDYFKKIECFDSVEISGVEDRFNASLGTYHDLLKIIKDKDFLDNEENEDILEDIVLTLTLFEDREMIEERLKTYAHLFDDKVMKQLKRRRYTGWGRLSRKLINGIRDKQSGKTILDFLKSDGFANRNFMQLIHDDSLTFKEDIQKAQVSGQGDSLHEHIANLAGSPAIKKGILQTVKVVDELVKVMGRHKPENIVIEMARENQTTQKGQKNSRERMKRIEEGIKELGSQILKEHPVENTQLQNEKLYLYYLQNGRDMYVDQELDINRLSDYDVDHIVPQSFLKDDSIDNKVLTRSDKARGKSDNVPSEEVVKKMKNYWRQLLNAKLITQRKFDNLTKAERGGLSELDKAGFIKRQLVETRQITKHVAQILDSRMNTKYDENDKLIREVKVITLKSKLVSDFRKDFQFYKVREINNYHHAHDAYLNAVVGTALIKKYPKLESEFVYGDYKVYDVRKMIAKSEQEIGKATAKYFFYSNIMNFFKTEITLANGEIRKRPLIETNGETGEIVWDKGRDFATVRKVLSMPQVNIVKKTEVQTGGFSKESILPKRNSDKLIARKKDWDPKKYGGFDSPTVAYSVLVVAKVEKGKSKKLKSVKELLGITIMERSSFEKNPIDFLEAKGYKEVKKDLIIKLPKYSLFELENGRKRMLASAGELQKGNELALPSKYVNFLYLASHYEKLKGSPEDNEQKQLFVEQHKHYLDEIIEQISEFSKRVILADANLDKVLSAYNKHRDKPIREQAENIIHLFTLTNLGAPAAFKYFDTTIDRKRYTSTKEVLDATLIHQSITGLYETRIDLSQLGGDGGGGSPAPGGTAPLEEEYRLFLEAPIQNVTLLEQWKREIPKVWAEINPPGLASTQAPIHVQLLSTALPVRVRQYPITLEAKRSLRETIRKFRAAGILRPVHSPWNTPLLPVRKSGTSEYRMVQDLREVNKRVETIHPTVPNPYTLLSLLPPDRIWYSVLDLKDAFFCIPLAPESQLIFAFEWADAEEGESGQLTWTRLPQGFKNSPTLFDEALNRDLQGFRLDHPSVSLLQYVDDLLIAADTQAACLSATRDLLMTLAELGYRVSGKKAQLCQEEVTYLGFKIHKGSRSLSNSRTQAILQIPVPKTKRQVREFLGTIGYCRLWIPGFAELAQPLYAATRGGNDPLVWGEKEEEAFQSLKLALTQPPALALPSLDKPFQLFVEETSGAAKGVLTQALGPWKRPVAYLSKRLDPVAAGWPRCLRAIAAAALLTREASKLTFGQDIEITSSHNLESLLRSPPDKWLTNARITQYQVLLLDPPRVRFKQTAALNPATLLPETDDTLPIHHCLDTLDSLTSTRPDLTDQPLAQAEATLFTDGSSYIRDGKRYAGAAVVTLDSVIWAEPLPIGTSAQKAELIALTKALEWSKDKSVNIYTDSRYAFATLHVHGMIYRERGLLTAGGKAIKNAPEILALLTAVWLPKRVAVMHCKGHQKDDAPTSTGNRRADEVAREVAIRPLSTQATISAGKRTADGSEFEKRTADGSEFESPKKKAKVE

SEQ ID NO: 9 - protein, 2097 aa, synthetic construct
MPAAKRVKLDGGDKKYSIGLDIGTNSVGWAVITDEYKVPSKKFKVLGNTDRHSIKKNLIGALLFDSGETAEATRLKRTARRRYTRRKNRICYLQEIFSNEMAKVDDSFFHRLEESFLVEEDKKHERHPIFGNIVDEVAYHEKYPTIYHLRKKLVDSTDKADLRLIYLALAHMIKFRGHFLIEGDLNPDNSDVDKLFIQLVQTYNQLFEENPINASGVDAKAILSARLSKSRRLENLIAQLPGEKKNGLFGNLIALSLGLTPNFKSNFDLAEDAKLQLSKDTYDDDLDNLLAQIGDQYADLFLAAKNLSDAILLSDILRVNTEITKAPLSASMIKRYDEHHQDLTLLKALVRQQLPEKYKEIFFDQSKNGYAGYIDGGASQEEFYKFIKPILEKMDGTEELLVKLNREDLLRKQRTFDNGSIPHQIHLGELHAILRRQEDFYPFLKDNREKIEKILTFRIPYYVGPLARGNSRFAWMTRKSEETITPWNFEEVVDKGASAQSFIERMTNFDKNLPNEKVLPKHSLLYEYFTVYNELTKVKYVTEGMRKPAFLSGEQKKAIVDLLFKTNRKVTVKQLKEDYFKKIECFDSVEISGVEDRFNASLGTYHDLLKIIKDKDFLDNEENEDILEDIVLTLTLFEDREMIEERLKTYAHLFDDKVMKQLKRRRYTGWGRLSRKLINGIRDKQSGKTILDFLKSDGFANRNFMQLIHDDSLTFKEDIQKAQVSGQGDSLHEHIANLAGSPAIKKGILQTVKVVDELVKVMGRHKPENIVIEMARENQTTQKGQKNSRERMKRIEEGIKELGSQILKEHPVENTQLQNEKLYLYYLQNGRDMYVDQELDINRLSDYDVDHIVPQSFLKDDSIDNKVLTRSDKARGKSDNVPSEEVVKKMKNYWRQLLNAKLITQRKFDNLTKAERGGLSELDKAGFIKRQLVETRQITKHVAQILDSRMNTKYDENDKLIREVKVITLKSKLVSDFRKDFQFYKVREINNYHHAHDAYLNAVVGTALIKKYPKLESEFVYGDYKVYDVRKMIAKSEQEIGKATAKYFFYSNIMNFFKTEITLANGEIRKRPLIETNGETGEIVWDKGRDFATVRKVLSMPQVNIVKKTEVQTGGFSKESILPKRNSDKLIARKKDWDPKKYGGFDSPTVAYSVLVVAKVEKGKSKKLKSVKELLGITIMERSSFEKNPIDFLEAKGYKEVKKDLIIKLPKYSLFELENGRKRMLASAGELQKGNELALPSKYVNFLYLASHYEKLKGSPEDNEQKQLFVEQHKHYLDEIIEQISEFSKRVILADANLDKVLSAYNKHRDKPIREQAENIIHLFTLTNLGAPAAFKYFDTTIDRKRYTSTKEVLDATLIHQSITGLYETRIDLSQLGGDGGGGGGSGGGGSGGTAPLEEEYRLFLEAPIQNVTLLEQWKREIPKVWAEINPPGLASTQAPIHVQLLSTALPVRVRQYPITLEAKRSLRETIRKFRAAGILRPVHSPWNTPLLPVRKSGTSEYRMVQDLREVNKRVETIHPTVPNPYTLLSLLPPDRIWYSVLDLKDAFFCIPLAPESQLIFAFEWADAEEGESGQLTWTRLPQGFKNSPTLFDEALNRDLQGFRLDHPSVSLLQYVDDLLIAADTQAACLSATRDLLMTLAELGYRVSGKKAQLCQEEVTYLGFKIHKGSRSLSNSRTQAILQIPVPKTKRQVREFLGTIGYCRLWIPGFAELAQPLYAATRGGNDPLVWGEKEEEAFQSLKLALTQPPALALPSLDKPFQLFVEETSGAAKGVLTQALGPWKRPVAYLSKRLDPVAAGWPRCLRAIAAAALLTREASKLTFGQDIEITSSHNLESLLRSPPDKWLTNARITQYQVLLLDPPRVRFKQTAALNPATLLPETDDTLPIHHCLDTLDSLTSTRPDLTDQPLAQAEATLFTDGSSYIRDGKRYAGAAVVTLDSVIWAEPLPIGTSAQKAELIALTKALEWSKDKSVNIYTDSRYAFATLHVHGMIYRERGLLTAGGKAIKNAPEILALLTAVWLPKRVAVMHCKGHQKDDAPTSTGNRRADEVAREVAIRPLSTQATISAGKRTADGSEFEKRTADGSEFESPKKKAKVE

SEQ ID NO: 10 - protein, 2097 aa, synthetic construct
MPAAKRVKLDGGDKKYSIGLDIGTNSVGWAVITDEYKVPSKKFKVLGNTDRHSIKKNLIGALLFDSGETAEATRLKRTARRRYTRRKNRICYLQEIFSNEMAKVDDSFFHRLEESFLVEEDKKHERHPIFGNIVDEVAYHEKYPTIYHLRKKLVDSTDKADLRLIYLALAHMIKFRGHFLIEGDLNPDNSDVDKLFIQLVQTYNQLFEENPINASGVDAKAILSARLSKSRRLENLIAQLPGEKKNGLFGNLIALSLGLTPNFKSNFDLAEDAKLQLSKDTYDDDLDNLLAQIGDQYADLFLAAKNLSDAILLSDILRVNTEITKAPLSASMIKRYDEHHQDLTLLKALVRQQLPEKYKEIFFDQSKNGYAGYIDGGASQEEFYKFIKPILEKMDGTEELLVKLNREDLLRKQRTFDNGSIPHQIHLGELHAILRRQEDFYPFLKDNREKIEKILTFRIPYYVGPLARGNSRFAWMTRKSEETITPWNFEEVVDKGASAQSFIERMTNFDKNLPNEKVLPKHSLLYEYFTVYNELTKVKYVTEGMRKPAFLSGEQKKAIVDLLFKTNRKVTVKQLKEDYFKKIECFDSVEISGVEDRFNASLGTYHDLLKIIKDKDFLDNEENEDILEDIVLTLTLFEDREMIEERLKTYAHLFDDKVMKQLKRRRYTGWGRLSRKLINGIRDKQSGKTILDFLKSDGFANRNFMQLIHDDSLTFKEDIQKAQVSGQGDSLHEHIANLAGSPAIKKGILQTVKVVDELVKVMGRHKPENIVIEMARENQTTQKGQKNSRERMKRIEEGIKELGSQILKEHPVENTQLQNEKLYLYYLQNGRDMYVDQELDINRLSDYDVDHIVPQSFLKDDSIDNKVLTRSDKARGKSDNVPSEEVVKKMKNYWRQLLNAKLITQRKFDNLTKAERGGLSELDKAGFIKRQLVETRQITKHVAQILDSRMNTKYDENDKLIREVKVITLKSKLVSDFRKDFQFYKVREINNYHHAHDAYLNAVVGTALIKKYPKLESEFVYGDYKVYDVRKMIAKSEQEIGKATAKYFFYSNIMNFFKTEITLANGEIRKRPLIETNGETGEIVWDKGRDFATVRKVLSMPQVNIVKKTEVQTGGFSKESILPKRNSDKLIARKKDWDPKKYGGFDSPTVAYSVLVVAKVEKGKSKKLKSVKELLGITIMERSSFEKNPIDFLEAKGYKEVKKDLIIKLPKYSLFELENGRKRMLASAGELQKGNELALPSKYVNFLYLASHYEKLKGSPEDNEQKQLFVEQHKHYLDEIIEQISEFSKRVILADANLDKVLSAYNKHRDKPIREQAENIIHLFTLTNLGAPAAFKYFDTTIDRKRYTSTKEVLDATLIHQSITGLYETRIDLSQLGGDGGEAAAKEAAAKGGTAPLEEEYRLFLEAPIQNVTLLEQWKREIPKVWAEINPPGLASTQAPIHVQLLSTALPVRVRQYPITLEAKRSLRETIRKFRAAGILRPVHSPWNTPLLPVRKSGTSEYRMVQDLREVNKRVETIHPTVPNPYTLLSLLPPDRIWYSVLDLKDAFFCIPLAPESQLIFAFEWADAEEGESGQLTWTRLPQGFKNSPTLFDEALNRDLQGFRLDHPSVSLLQYVDDLLIAADTQAACLSATRDLLMTLAELGYRVSGKKAQLCQEEVTYLGFKIHKGSRSLSNSRTQAILQIPVPKTKRQVREFLGTIGYCRLWIPGFAELAQPLYAATRGGNDPLVWGEKEEEAFQSLKLALTQPPALALPSLDKPFQLFVEETSGAAKGVLTQALGPWKRPVAYLSKRLDPVAAGWPRCLRAIAAAALLTREASKLTFGQDIEITSSHNLESLLRSPPDKWLTNARITQYQVLLLDPPRVRFKQTAALNPATLLPETDDTLPIHHCLDTLDSLTSTRPDLTDQPLAQAEATLFTDGSSYIRDGKRYAGAAVVTLDSVIWAEPLPIGTSAQKAELIALTKALEWSKDKSVNIYTDSRYAFATLHVHGMIYRERGLLTAGGKAIKNAPEILALLTAVWLPKRVAVMHCKGHQKDDAPTSTGNRRADEVAREVAIRPLSTQATISAGKRTADGSEFEKRTADGSEFESPKKKAKVE

SEQ ID NO: 11 - protein, 2098 aa, synthetic construct
MPAAKRVKLDGGDKKYSIGLDIGTNSVGWAVITDEYKVPSKKFKVLGNTDRHSIKKNLIGALLFDSGETAEATRLKRTARRRYTRRKNRICYLQEIFSNEMAKVDDSFFHRLEESFLVEEDKKHERHPIFGNIVDEVAYHEKYPTIYHLRKKLVDSTDKADLRLIYLALAHMIKFRGHFLIEGDLNPDNSDVDKLFIQLVQTYNQLFEENPINASGVDAKAILSARLSKSRRLENLIAQLPGEKKNGLFGNLIALSLGLTPNFKSNFDLAEDAKLQLSKDTYDDDLDNLLAQIGDQYADLFLAAKNLSDAILLSDILRVNTEITKAPLSASMIKRYDEHHQDLTLLKALVRQQLPEKYKEIFFDQSKNGYAGYIDGGASQEEFYKFIKPILEKMDGTEELLVKLNREDLLRKQRTFDNGSIPHQIHLGELHAILRRQEDFYPFLKDNREKIEKILTFRIPYYVGPLARGNSRFAWMTRKSEETITPWNFEEVVDKGASAQSFIERMTNFDKNLPNEKVLPKHSLLYEYFTVYNELTKVKYVTEGMRKPAFLSGEQKKAIVDLLFKTNRKVTVKQLKEDYFKKIECFDSVEISGVEDRFNASLGTYHDLLKIIKDKDFLDNEENEDILEDIVLTLTLFEDREMIEERLKTYAHLFDDKVMKQLKRRRYTGWGRLSRKLINGIRDKQSGKTILDFLKSDGFANRNFMQLIHDDSLTFKEDIQKAQVSGQGDSLHEHIANLAGSPAIKKGILQTVKVVDELVKVMGRHKPENIVIEMARENQTTQKGQKNSRERMKRIEEGIKELGSQILKEHPVENTQLQNEKLYLYYLQNGRDMYVDQELDINRLSDYDVDHIVPQSFLKDDSIDNKVLTRSDKARGKSDNVPSEEVVKKMKNYWRQLLNAKLITQRKFDNLTKAERGGLSELDKAGFIKRQLVETRQITKHVAQILDSRMNTKYDENDKLIREVKVITLKSKLVSDFRKDFQFYKVREINNYHHAHDAYLNAVVGTALIKKYPKLESEFVYGDYKVYDVRKMIAKSEQEIGKATAKYFFYSNIMNFFKTEITLANGEIRKRPLIETNGETGEIVWDKGRDFATVRKVLSMPQVNIVKKTEVQTGGFSKESILPKRNSDKLIARKKDWDPKKYGGFDSPTVAYSVLVVAKVEKGKSKKLKSVKELLGITIMERSSFEKNPIDFLEAKGYKEVKKDLIIKLPKYSLFELENGRKRMLASAGELQKGNELALPSKYVNFLYLASHYEKLKGSPEDNEQKQLFVEQHKHYLDEIIEQISEFSKRVILADANLDKVLSAYNKHRDKPIREQAENIIHLFTLTNLGAPAAFKYFDTTIDRKRYTSTKEVLDATLIHQSITGLYETRIDLSQLGGDGGGGSEAAAKPAPGGTAPLEEEYRLFLEAPIQNVTLLEQWKREIPKVWAEINPPGLASTQAPIHVQLLSTALPVRVRQYPITLEAKRSLRETIRKFRAAGILRPVHSPWNTPLLPVRKSGTSEYRMVQDLREVNKRVETIHPTVPNPYTLLSLLPPDRIWYSVLDLKDAFFCIPLAPESQLIFAFEWADAEEGESGQLTWTRLPQGFKNSPTLFDEALNRDLQGFRLDHPSVSLLQYVDDLLIAADTQAACLSATRDLLMTLAELGYRVSGKKAQLCQEEVTYLGFKIHKGSRSLSNSRTQAILQIPVPKTKRQVREFLGTIGYCRLWIPGFAELAQPLYAATRGGNDPLVWGEKEEEAFQSLKLALTQPPALALPSLDKPFQLFVEETSGAAKGVLTQALGPWKRPVAYLSKRLDPVAAGWPRCLRAIAAAALLTREASKLTFGQDIEITSSHNLESLLRSPPDKWLTNARITQYQVLLLDPPRVRFKQTAALNPATLLPETDDTLPIHHCLDTLDSLTSTRPDLTDQPLAQAEATLFTDGSSYIRDGKRYAGAAVVTLDSVIWAEPLPIGTSAQKAELIALTKALEWSKDKSVNIYTDSRYAFATLHVHGMIYRERGLLTAGGKAIKNAPEILALLTAVWLPKRVAVMHCKGHQKDDAPTSTGNRRADEVAREVAIRPLSTQATISAGKRTADGSEFEKRTADGSEFESPKKKAKVE

SEQ ID NO: 12 - protein, 2093 aa, synthetic construct
MPAAKRVKLDGGDKKYSIGLDIGTNSVGWAVITDEYKVPSKKFKVLGNTDRHSIKKNLIGALLFDSGETAEATRLKRTARRRYTRRKNRICYLQEIFSNEMAKVDDSFFHRLEESFLVEEDKKHERHPIFGNIVDEVAYHEKYPTIYHLRKKLVDSTDKADLRLIYLALAHMIKFRGHFLIEGDLNPDNSDVDKLFIQLVQTYNQLFEENPINASGVDAKAILSARLSKSRRLENLIAQLPGEKKNGLFGNLIALSLGLTPNFKSNFDLAEDAKLQLSKDTYDDDLDNLLAQIGDQYADLFLAAKNLSDAILLSDILRVNTEITKAPLSASMIKRYDEHHQDLTLLKALVRQQLPEKYKEIFFDQSKNGYAGYIDGGASQEEFYKFIKPILEKMDGTEELLVKLNREDLLRKQRTFDNGSIPHQIHLGELHAILRRQEDFYPFLKDNREKIEKILTFRIPYYVGPLARGNSRFAWMTRKSEETITPWNFEEVVDKGASAQSFIERMTNFDKNLPNEKVLPKHSLLYEYFTVYNELTKVKYVTEGMRKPAFLSGEQKKAIVDLLFKTNRKVTVKQLKEDYFKKIECFDSVEISGVEDRFNASLGTYHDLLKIIKDKDFLDNEENEDILEDIVLTLTLFEDREMIEERLKTYAHLFDDKVMKQLKRRRYTGWGRLSRKLINGIRDKQSGKTILDFLKSDGFANRNFMQLIHDDSLTFKEDIQKAQVSGQGDSLHEHIANLAGSPAIKKGILQTVKVVDELVKVMGRHKPENIVIEMARENQTTQKGQKNSRERMKRIEEGIKELGSQILKEHPVENTQLQNEKLYLYYLQNGRDMYVDQELDINRLSDYDVDHIVPQSFLKDDSIDNKVLTRSDKARGKSDNVPSEEVVKKMKNYWRQLLNAKLITQRKFDNLTKAERGGLSELDKAGFIKRQLVETRQITKHVAQILDSRMNTKYDENDKLIREVKVITLKSKLVSDFRKDFQFYKVREINNYHHAHDAYLNAVVGTALIKKYPKLESEFVYGDYKVYDVRKMIAKSEQEIGKATAKYFFYSNIMNFFKTEITLANGEIRKRPLIETNGETGEIVWDKGRDFATVRKVLSMPQVNIVKKTEVQTGGFSKESILPKRNSDKLIARKKDWDPKKYGGFDSPTVAYSVLVVAKVEKGKSKKLKSVKELLGITIMERSSFEKNPIDFLEAKGYKEVKKDLIIKLPKYSLFELENGRKRMLASAGELQKGNELALPSKYVNFLYLASHYEKLKGSPEDNEQKQLFVEQHKHYLDEIIEQISEFSKRVILADANLDKVLSAYNKHRDKPIREQAENIIHLFTLTNLGAPAAFKYFDTTIDRKRYTSTKEVLDATLIHQSITGLYETRIDLSQLGGDGGGGSGGGGGTAPLEEEYRLFLEAPIQNVTLLEQWKREIPKVWAEINPPGLASTQAPIHVQLLSTALPVRVRQYPITLEAKRSLRETIRKFRAAGILRPVHSPWNTPLLPVRKSGTSEYRMVQDLREVNKRVETIHPTVPNPYTLLSLLPPDRIWYSVLDLKDAFFCIPLAPESQLIFAFEWADAEEGESGQLTWTRLPQGFKNSPTLFDEALNRDLQGFRLDHPSVSLLQYVDDLLIAADTQAACLSATRDLLMTLAELGYRVSGKKAQLCQEEVTYLGFKIHKGSRSLSNSRTQAILQIPVPKTKRQVREFLGTIGYCRLWIPGFAELAQPLYAATRGGNDPLVWGEKEEEAFQSLKLALTQPPALALPSLDKPFQLFVEETSGAAKGVLTQALGPWKRPVAYLSKRLDPVAAGWPRCLRAIAAAALLTREASKLTFGQDIEITSSHNLESLLRSPPDKWLTNARITQYQVLLLDPPRVRFKQTAALNPATLLPETDDTLPIHHCLDTLDSLTSTRPDLTDQPLAQAEATLFTDGSSYIRDGKRYAGAAVVTLDSVIWAEPLPIGTSAQKAELIALTKALEWSKDKSVNIYTDSRYAFATLHVHGMIYRERGLLTAGGKAIKNAPEILALLTAVWLPKRVAVMHCKGHQKDDAPTSTGNRRADEVAREVAIRPLSTQATISAGKRTADGSEFEKRTADGSEFESPKKKAKVE

SEQ ID NO: 13 - protein, 2103 aa, synthetic construct
MPAAKRVKLDGGDKKYSIGLDIGTNSVGWAVITDEYKVPSKKFKVLGNTDRHSIKKNLIGALLFDSGETAEATRLKRTARRRYTRRKNRICYLQEIFSNEMAKVDDSFFHRLEESFLVEEDKKHERHPIFGNIVDEVAYHEKYPTIYHLRKKLVDSTDKADLRLIYLALAHMIKFRGHFLIEGDLNPDNSDVDKLFIQLVQTYNQLFEENPINASGVDAKAILSARLSKSRRLENLIAQLPGEKKNGLFGNLIALSLGLTPNFKSNFDLAEDAKLQLSKDTYDDDLDNLLAQIGDQYADLFLAAKNLSDAILLSDILRVNTEITKAPLSASMIKRYDEHHQDLTLLKALVRQQLPEKYKEIFFDQSKNGYAGYIDGGASQEEFYKFIKPILEKMDGTEELLVKLNREDLLRKQRTFDNGSIPHQIHLGELHAILRRQEDFYPFLKDNREKIEKILTFRIPYYVGPLARGNSRFAWMTRKSEETITPWNFEEVVDKGASAQSFIERMTNFDKNLPNEKVLPKHSLLYEYFTVYNELTKVKYVTEGMRKPAFLSGEQKKAIVDLLFKTNRKVTVKQLKEDYFKKIECFDSVEISGVEDRFNASLGTYHDLLKIIKDKDFLDNEENEDILEDIVLTLTLFEDREMIEERLKTYAHLFDDKVMKQLKRRRYTGWGRLSRKLINGIRDKQSGKTILDFLKSDGFANRNFMQLIHDDSLTFKEDIQKAQVSGQGDSLHEHIANLAGSPAIKKGILQTVKVVDELVKVMGRHKPENIVIEMARENQTTQKGQKNSRERMKRIEEGIKELGSQILKEHPVENTQLQNEKLYLYYLQNGRDMYVDQELDINRLSDYDVDHIVPQSFLKDDSIDNKVLTRSDKARGKSDNVPSEEVVKKMKNYWRQLLNAKLITQRKFDNLTKAERGGLSELDKAGFIKRQLVETRQITKHVAQILDSRMNTKYDENDKLIREVKVITLKSKLVSDFRKDFQFYKVREINNYHHAHDAYLNAVVGTALIKKYPKLESEFVYGDYKVYDVRKMIAKSEQEIGKATAKYFFYSNIMNFFKTEITLANGEIRKRPLIETNGETGEIVWDKGRDFATVRKVLSMPQVNIVKKTEVQTGGFSKESILPKRNSDKLIARKKDWDPKKYGGFDSPTVAYSVLVVAKVEKGKSKKLKSVKELLGITIMERSSFEKNPIDFLEAKGYKEVKKDLIIKLPKYSLFELENGRKRMLASAGELQKGNELALPSKYVNFLYLASHYEKLKGSPEDNEQKQLFVEQHKHYLDEIIEQISEFSKRVILADANLDKVLSAYNKHRDKPIREQAENIIHLFTLTNLGAPAAFKYFDTTIDRKRYTSTKEVLDATLIHQSITGLYETRIDLSQLGGDGGSGSETPGTSESATPESGGTAPLEEEYRLFLEAPIQNVTLLEQWKREIPKVWAEINPPGLASTQAPIHVQLLSTALPVRVRQYPITLEAKRSLRETIRKFRAAGILRPVHSPWNTPLLPVRKSGTSEYRMVQDLREVNKRVETIHPTVPNPYTLLSLLPPDRIWYSVLDLKDAFFCIPLAPESQLIFAFEWADAEEGESGQLTWTRLPQGFKNSPTLFDEALNRDLQGFRLDHPSVSLLQYVDDLLIAADTQAACLSATRDLLMTLAELGYRVSGKKAQLCQEEVTYLGFKIHKGSRSLSNSRTQAILQIPVPKTKRQVREFLGTIGYCRLWIPGFAELAQPLYAATRGGNDPLVWGEKEEEAFQSLKLALTQPPALALPSLDKPFQLFVEETSGAAKGVLTQALGPWKRPVAYLSKRLDPVAAGWPRCLRAIAAAALLTREASKLTFGQDIEITSSHNLESLLRSPPDKWLTNARITQYQVLLLDPPRVRFKQTAALNPATLLPETDDTLPIHHCLDTLDSLTSTRPDLTDQPLAQAEATLFTDGSSYIRDGKRYAGAAVVTLDSVIWAEPLPIGTSAQKAELIALTKALEWSKDKSVNIYTDSRYAFATLHVHGMIYRERGLLTAGGKAIKNAPEILALLTAVWLPKRVAVMHCKGHQKDDAPTSTGNRRADEVAREVAIRPLSTQATISAGKRTADGSEFEKRTADGSEFESPKKKAKVE

SEQ ID NO: 14 - protein, 2099 aa, synthetic construct
MPAAKRVKLDGGDKKYSIGLDIGTNSVGWAVITDEYKVPSKKFKVLGNTDRHSIKKNLIGALLFDSGETAEATRLKRTARRRYTRRKNRICYLQEIFSNEMAKVDDSFFHRLEESFLVEEDKKHERHPIFGNIVDEVAYHEKYPTIYHLRKKLVDSTDKADLRLIYLALAHMIKFRGHFLIEGDLNPDNSDVDKLFIQLVQTYNQLFEENPINASGVDAKAILSARLSKSRRLENLIAQLPGEKKNGLFGNLIALSLGLTPNFKSNFDLAEDAKLQLSKDTYDDDLDNLLAQIGDQYADLFLAAKNLSDAILLSDILRVNTEITKAPLSASMIKRYDEHHQDLTLLKALVRQQLPEKYKEIFFDQSKNGYAGYIDGGASQEEFYKFIKPILEKMDGTEELLVKLNREDLLRKQRTFDNGSIPHQIHLGELHAILRRQEDFYPFLKDNREKIEKILTFRIPYYVGPLARGNSRFAWMTRKSEETITPWNFEEVVDKGASAQSFIERMTNFDKNLPNEKVLPKHSLLYEYFTVYNELTKVKYVTEGMRKPAFLSGEQKKAIVDLLFKTNRKVTVKQLKEDYFKKIECFDSVEISGVEDRFNASLGTYHDLLKIIKDKDFLDNEENEDILEDIVLTLTLFEDREMIEERLKTYAHLFDDKVMKQLKRRRYTGWGRLSRKLINGIRDKQSGKTILDFLKSDGFANRNFMQLIHDDSLTFKEDIQKAQVSGQGDSLHEHIANLAGSPAIKKGILQTVKVVDELVKVMGRHKPENIVIEMARENQTTQKGQKNSRERMKRIEEGIKELGSQILKEHPVENTQLQNEKLYLYYLQNGRDMYVDQELDINRLSDYDVDHIVPQSFLKDDSIDNKVLTRSDKARGKSDNVPSEEVVKKMKNYWRQLLNAKLITQRKFDNLTKAERGGLSELDKAGFIKRQLVETRQITKHVAQILDSRMNTKYDENDKLIREVKVITLKSKLVSDFRKDFQFYKVREINNYHHAHDAYLNAVVGTALIKKYPKLESEFVYGDYKVYDVRKMIAKSEQEIGKATAKYFFYSNIMNFFKTEITLANGEIRKRPLIETNGETGEIVWDKGRDFATVRKVLSMPQVNIVKKTEVQTGGFSKESILPKRNSDKLIARKKDWDPKKYGGFDSPTVAYSVLVVAKVEKGKSKKLKSVKELLGITIMERSSFEKNPIDFLEAKGYKEVKKDLIIKLPKYSLFELENGRKRMLASAGELQKGNELALPSKYVNFLYLASHYEKLKGSPEDNEQKQLFVEQHKHYLDEIIEQISEFSKRVILADANLDKVLSAYNKHRDKPIREQAENIIHLFTLTNLGAPAAFKYFDTTIDRKRYTSTKEVLDATLIHQSITGLYETRIDLSQLGGDGGGSAGSAAGSGEFGGTAPLEEEYRLFLEAPIQNVTLLEQWKREIPKVWAEINPPGLASTQAPIHVQLLSTALPVRVRQYPITLEAKRSLRETIRKFRAAGILRPVHSPWNTPLLPVRKSGTSEYRMVQDLREVNKRVETIHPTVPNPYTLLSLLPPDRIWYSVLDLKDAFFCIPLAPESQLIFAFEWADAEEGESGQLTWTRLPQGFKNSPTLFDEALNRDLQGFRLDHPSVSLLQYVDDLLIAADTQAACLSATRDLLMTLAELGYRVSGKKAQLCQEEVTYLGFKIHKGSRSLSNSRTQAILQIPVPKTKRQVREFLGTIGYCRLWIPGFAELAQPLYAATRGGNDPLVWGEKEEEAFQSLKLALTQPPALALPSLDKPFQLFVEETSGAAKGVLTQALGPWKRPVAYLSKRLDPVAAGWPRCLRAIAAAALLTREASKLTFGQDIEITSSHNLESLLRSPPDKWLTNARITQYQVLLLDPPRVRFKQTAALNPATLLPETDDTLPIHHCLDTLDSLTSTRPDLTDQPLAQAEATLFTDGSSYIRDGKRYAGAAVVTLDSVIWAEPLPIGTSAQKAELIALTKALEWSKDKSVNIYTDSRYAFATLHVHGMIYRERGLLTAGGKAIKNAPEILALLTAVWLPKRVAVMHCKGHQKDDAPTSTGNRRADEVAREVAIRPLSTQATISAGKRTADGSEFEKRTADGSEFESPKKKAKVE

SEQ ID NO: 15 - protein, 2096 aa, synthetic construct
MPAAKRVKLDGGDKKYSIGLDIGTNSVGWAVITDEYKVPSKKFKVLGNTDRHSIKKNLIGALLFDSGETAEATRLKRTARRRYTRRKNRICYLQEIFSNEMAKVDDSFFHRLEESFLVEEDKKHERHPIFGNIVDEVAYHEKYPTIYHLRKKLVDSTDKADLRLIYLALAHMIKFRGHFLIEGDLNPDNSDVDKLFIQLVQTYNQLFEENPINASGVDAKAILSARLSKSRRLENLIAQLPGEKKNGLFGNLIALSLGLTPNFKSNFDLAEDAKLQLSKDTYDDDLDNLLAQIGDQYADLFLAAKNLSDAILLSDILRVNTEITKAPLSASMIKRYDEHHQDLTLLKALVRQQLPEKYKEIFFDQSKNGYAGYIDGGASQEEFYKFIKPILEKMDGTEELLVKLNREDLLRKQRTFDNGSIPHQIHLGELHAILRRQEDFYPFLKDNREKIEKILTFRIPYYVGPLARGNSRFAWMTRKSEETITPWNFEEVVDKGASAQSFIERMTNFDKNLPNEKVLPKHSLLYEYFTVYNELTKVKYVTEGMRKPAFLSGEQKKAIVDLLFKTNRKVTVKQLKEDYFKKIECFDSVEISGVEDRFNASLGTYHDLLKIIKDKDFLDNEENEDILEDIVLTLTLFEDREMIEERLKTYAHLFDDKVMKQLKRRRYTGWGRLSRKLINGIRDKQSGKTILDFLKSDGFANRNFMQLIHDDSLTFKEDIQKAQVSGQGDSLHEHIANLAGSPAIKKGILQTVKVVDELVKVMGRHKPENIVIEMARENQTTQKGQKNSRERMKRIEEGIKELGSQILKEHPVENTQLQNEKLYLYYLQNGRDMYVDQELDINRLSDYDVDHIVPQSFLKDDSIDNKVLTRSDKARGKSDNVPSEEVVKKMKNYWRQLLNAKLITQRKFDNLTKAERGGLSELDKAGFIKRQLVETRQITKHVAQILDSRMNTKYDENDKLIREVKVITLKSKLVSDFRKDFQFYKVREINNYHHAHDAYLNAVVGTALIKKYPKLESEFVYGDYKVYDVRKMIAKSEQEIGKATAKYFFYSNIMNFFKTEITLANGEIRKRPLIETNGETGEIVWDKGRDFATVRKVLSMPQVNIVKKTEVQTGGFSKESILPKRNSDKLIARKKDWDPKKYGGFDSPTVAYSVLVVAKVEKGKSKKLKSVKELLGITIMERSSFEKNPIDFLEAKGYKEVKKDLIIKLPKYSLFELENGRKRMLASAGELQKGNELALPSKYVNFLYLASHYEKLKGSPEDNEQKQLFVEQHKHYLDEIIEQISEFSKRVILADANLDKVLSAYNKHRDKPIREQAENIIHLFTLTNLGAPAAFKYFDTTIDRKRYTSTKEVLDATLIHQSITGLYETRIDLSQLGGDGGGGGPAPGGSGGTAPLEEEYRLFLEAPIQNVTLLEQWKREIPKVWAEINPPGLASTQAPIHVQLLSTALPVRVRQYPITLEAKRSLRETIRKFRAAGILRPVHSPWNTPLLPVRKSGTSEYRMVQDLREVNKRVETIHPTVPNPYTLLSLLPPDRIWYSVLDLKDAFFCIPLAPESQLIFAFEWADAEEGESGQLTWTRLPQGFKNSPTLFDEALNRDLQGFRLDHPSVSLLQYVDDLLIAADTQAACLSATRDLLMTLAELGYRVSGKKAQLCQEEVTYLGFKIHKGSRSLSNSRTQAILQIPVPKTKRQVREFLGTIGYCRLWIPGFAELAQPLYAATRGGNDPLVWGEKEEEAFQSLKLALTQPPALALPSLDKPFQLFVEETSGAAKGVLTQALGPWKRPVAYLSKRLDPVAAGWPRCLRAIAAAALLTREASKLTFGQDIEITSSHNLESLLRSPPDKWLTNARITQYQVLLLDPPRVRFKQTAALNPATLLPETDDTLPIHHCLDTLDSLTSTRPDLTDQPLAQAEATLFTDGSSYIRDGKRYAGAAVVTLDSVIWAEPLPIGTSAQKAELIALTKALEWSKDKSVNIYTDSRYAFATLHVHGMIYRERGLLTAGGKAIKNAPEILALLTAVWLPKRVAVMHCKGHQKDDAPTSTGNRRADEVAREVAIRPLSTQATISAGKRTADGSEFEKRTADGSEFESPKKKAKVE

SEQ ID NO: 16 - protein, 2098 aa, synthetic construct
MPAAKRVKLDGGDKKYSIGLDIGTNSVGWAVITDEYKVPSKKFKVLGNTDRHSIKKNLIGALLFDSGETAEATRLKRTARRRYTRRKNRICYLQEIFSNEMAKVDDSFFHRLEESFLVEEDKKHERHPIFGNIVDEVAYHEKYPTIYHLRKKLVDSTDKADLRLIYLALAHMIKFRGHFLIEGDLNPDNSDVDKLFIQLVQTYNQLFEENPINASGVDAKAILSARLSKSRRLENLIAQLPGEKKNGLFGNLIALSLGLTPNFKSNFDLAEDAKLQLSKDTYDDDLDNLLAQIGDQYADLFLAAKNLSDAILLSDILRVNTEITKAPLSASMIKRYDEHHQDLTLLKALVRQQLPEKYKEIFFDQSKNGYAGYIDGGASQEEFYKFIKPILEKMDGTEELLVKLNREDLLRKQRTFDNGSIPHQIHLGELHAILRRQEDFYPFLKDNREKIEKILTFRIPYYVGPLARGNSRFAWMTRKSEETITPWNFEEVVDKGASAQSFIERMTNFDKNLPNEKVLPKHSLLYEYFTVYNELTKVKYVTEGMRKPAFLSGEQKKAIVDLLFKTNRKVTVKQLKEDYFKKIECFDSVEISGVEDRFNASLGTYHDLLKIIKDKDFLDNEENEDILEDIVLTLTLFEDREMIEERLKTYAHLFDDKVMKQLKRRRYTGWGRLSRKLINGIRDKQSGKTILDFLKSDGFANRNFMQLIHDDSLTFKEDIQKAQVSGQGDSLHEHIANLAGSPAIKKGILQTVKVVDELVKVMGRHKPENIVIEMARENQTTQKGQKNSRERMKRIEEGIKELGSQILKEHPVENTQLQNEKLYLYYLQNGRDMYVDQELDINRLSDYDVDHIVPQSFLKDDSIDNKVLTRSDKARGKSDNVPSEEVVKKMKNYWRQLLNAKLITQRKFDNLTKAERGGLSELDKAGFIKRQLVETRQITKHVAQILDSRMNTKYDENDKLIREVKVITLKSKLVSDFRKDFQFYKVREINNYHHAHDAYLNAVVGTALIKKYPKLESEFVYGDYKVYDVRKMIAKSEQEIGKATAKYFFYSNIMNFFKTEITLANGEIRKRPLIETNGETGEIVWDKGRDFATVRKVLSMPQVNIVKKTEVQTGGFSKESILPKRNSDKLIARKKDWDPKKYGGFDSPTVAYSVLVVAKVEKGKSKKLKSVKELLGITIMERSSFEKNPIDFLEAKGYKEVKKDLIIKLPKYSLFELENGRKRMLASAGELQKGNELALPSKYVNFLYLASHYEKLKGSPEDNEQKQLFVEQHKHYLDEIIEQISEFSKRVILADANLDKVLSAYNKHRDKPIREQAENIIHLFTLTNLGAPAAFKYFDTTIDRKRYTSTKEVLDATLIHQSITGLYETRIDLSQLGGDGGGSSGGGEAAAKGGTAPLEEEYRLFLEAPIQNVTLLEQWKREIPKVWAEINPPGLASTQAPIHVQLLSTALPVRVRQYPITLEAKRSLRETIRKFRAAGILRPVHSPWNTPLLPVRKSGTSEYRMVQDLREVNKRVETIHPTVPNPYTLLSLLPPDRIWYSVLDLKDAFFCIPLAPESQLIFAFEWADAEEGESGQLTWTRLPQGFKNSPTLFDEALNRDLQGFRLDHPSVSLLQYVDDLLIAADTQAACLSATRDLLMTLAELGYRVSGKKAQLCQEEVTYLGFKIHKGSRSLSNSRTQAILQIPVPKTKRQVREFLGTIGYCRLWIPGFAELAQPLYAATRGGNDPLVWGEKEEEAFQSLKLALTQPPALALPSLDKPFQLFVEETSGAAKGVLTQALGPWKRPVAYLSKRLDPVAAGWPRCLRAIAAAALLTREASKLTFGQDIEITSSHNLESLLRSPPDKWLTNARITQYQVLLLDPPRVRFKQTAALNPATLLPETDDTLPIHHCLDTLDSLTSTRPDLTDQPLAQAEATLFTDGSSYIRDGKRYAGAAVVTLDSVIWAEPLPIGTSAQKAELIALTKALEWSKDKSVNIYTDSRYAFATLHVHGMIYRERGLLTAGGKAIKNAPEILALLTAVWLPKRVAVMHCKGHQKDDAPTSTGNRRADEVAREVAIRPLSTQATISAGKRTADGSEFEKRTADGSEFESPKKKAKVE

SEQ ID NO: 17 - protein, 1998 aa, synthetic construct
MPAAKRVKLDGGDKKYSIGLDIGTNSVGWAVITDEYKVPSKKFKVLGNTDRHSIKKNLIGALLFDSGETAEATRLKRTARRRYTRRKNRICYLQEIFSNEMAKVDDSFFHRLEESFLVEEDKKHERHPIFGNIVDEVAYHEKYPTIYHLRKKLVDSTDKADLRLIYLALAHMIKFRGHFLIEGDLNPDNSDVDKLFIQLVQTYNQLFEENPINASGVDAKAILSARLSKSRRLENLIAQLPGEKKNGLFGNLIALSLGLTPNFKSNFDLAEDAKLQLSKDTYDDDLDNLLAQIGDQYADLFLAAKNLSDAILLSDILRVNTEITKAPLSASMIKRYDEHHQDLTLLKALVRQQLPEKYKEIFFDQSKNGYAGYIDGGASQEEFYKFIKPILEKMDGTEELLVKLNREDLLRKQRTFDNGSIPHQIHLGELHAILRRQEDFYPFLKDNREKIEKILTFRIPYYVGPLARGNSRFAWMTRKSEETITPWNFEEVVDKGASAQSFIERMTNFDKNLPNEKVLPKHSLLYEYFTVYNELTKVKYVTEGMRKPAFLSGEQKKAIVDLLFKTNRKVTVKQLKEDYFKKIECFDSVEISGVEDRFNASLGTYHDLLKIIKDKDFLDNEENEDILEDIVLTLTLFEDREMIEERLKTYAHLFDDKVMKQLKRRRYTGWGRLSRKLINGIRDKQSGKTILDFLKSDGFANRNFMQLIHDDSLTFKEDIQKAQVSGQGDSLHEHIANLAGSPAIKKGILQTVKVVDELVKVMGRHKPENIVIEMARENQTTQKGQKNSRERMKRIEEGIKELGSQILKEHPVENTQLQNEKLYLYYLQNGRDMYVDQELDINRLSDYDVDHIVPQSFLKDDSIDNKVLTRSDKARGKSDNVPSEEVVKKMKNYWRQLLNAKLITQRKFDNLTKAERGGLSELDKAGFIKRQLVETRQITKHVAQILDSRMNTKYDENDKLIREVKVITLKSKLVSDFRKDFQFYKVREINNYHHAHDAYLNAVVGTALIKKYPKLESEFVYGDYKVYDVRKMIAKSEQEIGKATAKYFFYSNIMNFFKTEITLANGEIRKRPLIETNGETGEIVWDKGRDFATVRKVLSMPQVNIVKKTEVQTGGFSKESILPKRNSDKLIARKKDWDPKKYGGFDSPTVAYSVLVVAKVEKGKSKKLKSVKELLGITIMERSSFEKNPIDFLEAKGYKEVKKDLIIKLPKYSLFELENGRKRMLASAGELQKGNELALPSKYVNFLYLASHYEKLKGSPEDNEQKQLFVEQHKHYLDEIIEQISEFSKRVILADANLDKVLSAYNKHRDKPIREQAENIIHLFTLTNLGAPAAFKYFDTTIDRKRYTSTKEVLDATLIHQSITGLYETRIDLSQLGGDGGPAPEAAAKGGGVLDTPPSHIGLEHLPPPPEVPQFPLNLERLQALQDLVHRSLEAGYISPWDGPGNNPVFPVRKPNGAWRFVHDLRATNALTKPIPALSPGPPDLTAIPTHPPHIICLDLKDAFFQIPVEDRFRFYLSFTLPSPGGLQPHRRFAWRVLPQGFINSPALFERALQEPLRQVSAAFSQSLLVSYMDDILYASPTEEQRSQCYQALAARLRDLGFQVASEKTSQTPSPVPFLGQMVHEQIVTYQSLPTLQISSPISLHQLQAVLGDLQWVSRGTPTTRRPLQLLYSSLKRHHDPRAIIQLSPEQLQGIAELRQALSHNARSRYNEQEPLLAYVHLTRAGSTLVLFQKGAQFPLAYFQTPLTDNQASPWGLLLLLGCQYLQTQALSSYAKPILKYYHNLPKTSLDNWIQSSEDPRVQELLQLWPQISSQGIQPPGPWKTLITRAEVFLTPQFSPDPIPAALCLFSDGATGRGAYCLWKDHLLDFQAVPAPESAQKGELAGLLAGLAAAPPEPVNIWVDSKYLYSLLRTLVLGAWLQPDPVPSYALLYKSLLRHPAIVVGHVRSHSSASHPIASLNNYVDQLAGKRTADGSEFEKRTADGSEFESPKKKAKVE

SEQ ID NO: 18 - protein, 2116 aa, synthetic construct
MPAAKRVKLDGGDKKYSIGLDIGTNSVGWAVITDEYKVPSKKFKVLGNTDRHSIKKNLIGALLFDSGETAEATRLKRTARRRYTRRKNRICYLQEIFSNEMAKVDDSFFHRLEESFLVEEDKKHERHPIFGNIVDEVAYHEKYPTIYHLRKKLVDSTDKADLRLIYLALAHMIKFRGHFLIEGDLNPDNSDVDKLFIQLVQTYNQLFEENPINASGVDAKAILSARLSKSRRLENLIAQLPGEKKNGLFGNLIALSLGLTPNFKSNFDLAEDAKLQLSKDTYDDDLDNLLAQIGDQYADLFLAAKNLSDAILLSDILRVNTEITKAPLSASMIKRYDEHHQDLTLLKALVRQQLPEKYKEIFFDQSKNGYAGYIDGGASQEEFYKFIKPILEKMDGTEELLVKLNREDLLRKQRTFDNGSIPHQIHLGELHAILRRQEDFYPFLKDNREKIEKILTFRIPYYVGPLARGNSRFAWMTRKSEETITPWNFEEVVDKGASAQSFIERMTNFDKNLPNEKVLPKHSLLYEYFTVYNELTKVKYVTEGMRKPAFLSGEQKKAIVDLLFKTNRKVTVKQLKEDYFKKIECFDSVEISGVEDRFNASLGTYHDLLKIIKDKDFLDNEENEDILEDIVLTLTLFEDREMIEERLKTYAHLFDDKVMKQLKRRRYTGWGRLSRKLINGIRDKQSGKTILDFLKSDGFANRNFMQLIHDDSLTFKEDIQKAQVSGQGDSLHEHIANLAGSPAIKKGILQTVKVVDELVKVMGRHKPENIVIEMARENQTTQKGQKNSRERMKRIEEGIKELGSQILKEHPVENTQLQNEKLYLYYLQNGRDMYVDQELDINRLSDYDVDHIVPQSFLKDDSIDNKVLTRSDKARGKSDNVPSEEVVKKMKNYWRQLLNAKLITQRKFDNLTKAERGGLSELDKAGFIKRQLVETRQITKHVAQILDSRMNTKYDENDKLIREVKVITLKSKLVSDFRKDFQFYKVREINNYHHAHDAYLNAVVGTALIKKYPKLESEFVYGDYKVYDVRKMIAKSEQEIGKATAKYFFYSNIMNFFKTEITLANGEIRKRPLIETNGETGEIVWDKGRDFATVRKVLSMPQVNIVKKTEVQTGGFSKESILPKRNSDKLIARKKDWDPKKYGGFDSPTVAYSVLVVAKVEKGKSKKLKSVKELLGITIMERSSFEKNPIDFLEAKGYKEVKKDLIIKLPKYSLFELENGRKRMLASAGELQKGNELALPSKYVNFLYLASHYEKLKGSPEDNEQKQLFVEQHKHYLDEIIEQISEFSKRVILADANLDKVLSAYNKHRDKPIREQAENIIHLFTLTNLGAPAAFKYFDTTIDRKRYTSTKEVLDATLIHQSITGLYETRIDLSQLGGDGGEAAAKPAPGGGGGWVQEISDSRPMLHIYLNGRRFLGLLNTGADKTCIAGRDWPANWPIHQTESSLQGLGMACGVARSSQPLRWQHEDKSGIIHPFVIPTLPFTLWGRDIMKDIKVRLMTDSPDDSQDLMIGAIESNLFADQISWKSDQPVWLNQWPLKQEKLQALQQLVTEQLQLGHLEESNSPWNTPVFVIKKKSGKWRLLQDLRAVNATMHDMGALQPGLPSPVAPPKGWEIIIIDLQDCFFNIKLHPEDCKRFAFSVPSPNFKRPYQRFQWKVLPQGMKNSPTLCQKFVDKAILTVRDKYQDSYIVHYMDDILLAHPSRSIVDEILTSMIQALNKHGLVVSTEKIQKYDNLKYLGTHIQGDSVSYQKLQIRTDKLRTLNDFQKLLGNINWIRPFLKLTTGELKPLFEILNPDSNPISTRKLTPEACKALQLMNERLSTARVKRLDLSQPWSLCILKTEYTPTACLWQDGVVEWIHLPHISPKVITPYDIFCTQLIIKGRHRSKELFSKDPDYIVVPYTKVQFDLLLQEKEDWPISLLGFLGEVHFHLPKDPLLTFTLQTAIIFPHMTSTTPLEKGIVIFTDGSANGRSVTYIQGREPIIKENTQNTAQQAEIVAVITAFEEVSQPFNLYTDSKYVTGLFPEIETATLSPRTKIYTELKHLQRLIHKRQEKFYIGHIRGHTGLPGPLAQGNAYADSLTRILTAGKRTADGSEFEKRTADGSEFESPKKKAKVE

SEQ ID NO: 19 - protein, 2114 aa, synthetic construct
MPAAKRVKLDGGDKKYSIGLDIGTNSVGWAVITDEYKVPSKKFKVLGNTDRHSIKKNLIGALLFDSGETAEATRLKRTARRRYTRRKNRICYLQEIFSNEMAKVDDSFFHRLEESFLVEEDKKHERHPIFGNIVDEVAYHEKYPTIYHLRKKLVDSTDKADLRLIYLALAHMIKFRGHFLIEGDLNPDNSDVDKLFIQLVQTYNQLFEENPINASGVDAKAILSARLSKSRRLENLIAQLPGEKKNGLFGNLIALSLGLTPNFKSNFDLAEDAKLQLSKDTYDDDLDNLLAQIGDQYADLFLAAKNLSDAILLSDILRVNTEITKAPLSASMIKRYDEHHQDLTLLKALVRQQLPEKYKEIFFDQSKNGYAGYIDGGASQEEFYKFIKPILEKMDGTEELLVKLNREDLLRKQRTFDNGSIPHQIHLGELHAILRRQEDFYPFLKDNREKIEKILTFRIPYYVGPLARGNSRFAWMTRKSEETITPWNFEEVVDKGASAQSFIERMTNFDKNLPNEKVLPKHSLLYEYFTVYNELTKVKYVTEGMRKPAFLSGEQKKAIVDLLFKTNRKVTVKQLKEDYFKKIECFDSVEISGVEDRFNASLGTYHDLLKIIKDKDFLDNEENEDILEDIVLTLTLFEDREMIEERLKTYAHLFDDKVMKQLKRRRYTGWGRLSRKLINGIRDKQSGKTILDFLKSDGFANRNFMQLIHDDSLTFKEDIQKAQVSGQGDSLHEHIANLAGSPAIKKGILQTVKVVDELVKVMGRHKPENIVIEMARENQTTQKGQKNSRERMKRIEEGIKELGSQILKEHPVENTQLQNEKLYLYYLQNGRDMYVDQELDINRLSDYDVDHIVPQSFLKDDSIDNKVLTRSDKARGKSDNVPSEEVVKKMKNYWRQLLNAKLITQRKFDNLTKAERGGLSELDKAGFIKRQLVETRQITKHVAQILDSRMNTKYDENDKLIREVKVITLKSKLVSDFRKDFQFYKVREINNYHHAHDAYLNAVVGTALIKKYPKLESEFVYGDYKVYDVRKMIAKSEQEIGKATAKYFFYSNIMNFFKTEITLANGEIRKRPLIETNGETGEIVWDKGRDFATVRKVLSMPQVNIVKKTEVQTGGFSKESILPKRNSDKLIARKKDWDPKKYGGFDSPTVAYSVLVVAKVEKGKSKKLKSVKELLGITIMERSSFEKNPIDFLEAKGYKEVKKDLIIKLPKYSLFELENGRKRMLASAGELQKGNELALPSKYVNFLYLASHYEKLKGSPEDNEQKQLFVEQHKHYLDEIIEQISEFSKRVILADANLDKVLSAYNKHRDKPIREQAENIIHLFTLTNLGAPAAFKYFDTTIDRKRYTSTKEVLDATLIHQSITGLYETRIDLSQLGGDGGPAPGGGGGSGGWVQEISDSRPMLHIYLNGRRFLGLLNTGADKTCIAGRDWPANWPIHQTESSLQGLGMACGVARSSQPLRWQHEDKSGIIHPFVIPTLPFTLWGRDIMKDIKVRLMTDSPDDSQDLMIGAIESNLFADQISWKSDQPVWLNQWPLKQEKLQALQQLVTEQLQLGHLEESNSPWNTPVFVIKKKSGKWRLLQDLRAVNATMHDMGALQPGLPSPVAPPKGWEIIIIDLQDCFFNIKLHPEDCKRFAFSVPSPNFKRPYQRFQWKVLPQGMKNSPTLCQKFVDKAILTVRDKYQDSYIVHYMDDILLAHPSRSIVDEILTSMIQALNKHGLVVSTEKIQKYDNLKYLGTHIQGDSVSYQKLQIRTDKLRTLNDFQKLLGNINWIRPFLKLTTGELKPLFEILNPDSNPISTRKLTPEACKALQLMNERLSTARVKRLDLSQPWSLCILKTEYTPTACLWQDGVVEWIHLPHISPKVITPYDIFCTQLIIKGRHRSKELFSKDPDYIVVPYTKVQFDLLLQEKEDWPISLLGFLGEVHFHLPKDPLLTFTLQTAIIFPHMTSTTPLEKGIVIFTDGSANGRSVTYIQGREPIIKENTQNTAQQAEIVAVITAFEEVSQPFNLYTDSKYVTGLFPEIETATLSPRTKIYTELKHLQRLIHKRQEKFYIGHIRGHTGLPGPLAQGNAYADSLTRILTAGKRTADGSEFEKRTADGSEFESPKKKAKVE

SEQ ID NO: 20 - protein, 2114 aa, synthetic construct
MPAAKRVKLDGGDKKYSIGLDIGTNSVGWAVITDEYKVPSKKFKVLGNTDRHSIKKNLIGALLFDSGETAEATRLKRTARRRYTRRKNRICYLQEIFSNEMAKVDDSFFHRLEESFLVEEDKKHERHPIFGNIVDEVAYHEKYPTIYHLRKKLVDSTDKADLRLIYLALAHMIKFRGHFLIEGDLNPDNSDVDKLFIQLVQTYNQLFEENPINASGVDAKAILSARLSKSRRLENLIAQLPGEKKNGLFGNLIALSLGLTPNFKSNFDLAEDAKLQLSKDTYDDDLDNLLAQIGDQYADLFLAAKNLSDAILLSDILRVNTEITKAPLSASMIKRYDEHHQDLTLLKALVRQQLPEKYKEIFFDQSKNGYAGYIDGGASQEEFYKFIKPILEKMDGTEELLVKLNREDLLRKQRTFDNGSIPHQIHLGELHAILRRQEDFYPFLKDNREKIEKILTFRIPYYVGPLARGNSRFAWMTRKSEETITPWNFEEVVDKGASAQSFIERMTNFDKNLPNEKVLPKHSLLYEYFTVYNELTKVKYVTEGMRKPAFLSGEQKKAIVDLLFKTNRKVTVKQLKEDYFKKIECFDSVEISGVEDRFNASLGTYHDLLKIIKDKDFLDNEENEDILEDIVLTLTLFEDREMIEERLKTYAHLFDDKVMKQLKRRRYTGWGRLSRKLINGIRDKQSGKTILDFLKSDGFANRNFMQLIHDDSLTFKEDIQKAQVSGQGDSLHEHIANLAGSPAIKKGILQTVKVVDELVKVMGRHKPENIVIEMARENQTTQKGQKNSRERMKRIEEGIKELGSQILKEHPVENTQLQNEKLYLYYLQNGRDMYVDQELDINRLSDYDVDHIVPQSFLKDDSIDNKVLTRSDKARGKSDNVPSEEVVKKMKNYWRQLLNAKLITQRKFDNLTKAERGGLSELDKAGFIKRQLVETRQITKHVAQILDSRMNTKYDENDKLIREVKVITLKSKLVSDFRKDFQFYKVREINNYHHAHDAYLNAVVGTALIKKYPKLESEFVYGDYKVYDVRKMIAKSEQEIGKATAKYFFYSNIMNFFKTEITLANGEIRKRPLIETNGETGEIVWDKGRDFATVRKVLSMPQVNIVKKTEVQTGGFSKESILPKRNSDKLIARKKDWDPKKYGGFDSPTVAYSVLVVAKVEKGKSKKLKSVKELLGITIMERSSFEKNPIDFLEAKGYKEVKKDLIIKLPKYSLFELENGRKRMLASAGELQKGNELALPSKYVNFLYLASHYEKLKGSPEDNEQKQLFVEQHKHYLDEIIEQISEFSKRVILADANLDKVLSAYNKHRDKPIREQAENIIHLFTLTNLGAPAAFKYFDTTIDRKRYTSTKEVLDATLIHQSITGLYETRIDLSQLGGDGGGGSGSSGGGGGWVQEISDSRPMLHIYLNGRRFLGLLNTGADKTCIAGRDWPANWPIHQTESSLQGLGMACGVARSSQPLRWQHEDKSGIIHPFVIPTLPFTLWGRDIMKDIKVRLMTDSPDDSQDLMIGAIESNLFADQISWKSDQPVWLNQWPLKQEKLQALQQLVTEQLQLGHLEESNSPWNTPVFVIKKKSGKWRLLQDLRAVNATMHDMGALQPGLPSPVAPPKGWEIIIIDLQDCFFNIKLHPEDCKRFAFSVPSPNFKRPYQRFQWKVLPQGMKNSPTLCQKFVDKAILTVRDKYQDSYIVHYMDDILLAHPSRSIVDEILTSMIQALNKHGLVVSTEKIQKYDNLKYLGTHIQGDSVSYQKLQIRTDKLRTLNDFQKLLGNINWIRPFLKLTTGELKPLFEILNPDSNPISTRKLTPEACKALQLMNERLSTARVKRLDLSQPWSLCILKTEYTPTACLWQDGVVEWIHLPHISPKVITPYDIFCTQLIIKGRHRSKELFSKDPDYIVVPYTKVQFDLLLQEKEDWPISLLGFLGEVHFHLPKDPLLTFTLQTAIIFPHMTSTTPLEKGIVIFTDGSANGRSVTYIQGREPIIKENTQNTAQQAEIVAVITAFEEVSQPFNLYTDSKYVTGLFPEIETATLSPRTKIYTELKHLQRLIHKRQEKFYIGHIRGHTGLPGPLAQGNAYADSLTRILTAGKRTADGSEFEKRTADGSEFESPKKKAKVE

SEQ ID NO: 21 - protein, 2116 aa, synthetic construct
MPAAKRVKLDGGDKKYSIGLDIGTNSVGWAVITDEYKVPSKKFKVLGNTDRHSIKKNLIGALLFDSGETAEATRLKRTARRRYTRRKNRICYLQEIFSNEMAKVDDSFFHRLEESFLVEEDKKHERHPIFGNIVDEVAYHEKYPTIYHLRKKLVDSTDKADLRLIYLALAHMIKFRGHFLIEGDLNPDNSDVDKLFIQLVQTYNQLFEENPINASGVDAKAILSARLSKSRRLENLIAQLPGEKKNGLFGNLIALSLGLTPNFKSNFDLAEDAKLQLSKDTYDDDLDNLLAQIGDQYADLFLAAKNLSDAILLSDILRVNTEITKAPLSASMIKRYDEHHQDLTLLKALVRQQLPEKYKEIFFDQSKNGYAGYIDGGASQEEFYKFIKPILEKMDGTEELLVKLNREDLLRKQRTFDNGSIPHQIHLGELHAILRRQEDFYPFLKDNREKIEKILTFRIPYYVGPLARGNSRFAWMTRKSEETITPWNFEEVVDKGASAQSFIERMTNFDKNLPNEKVLPKHSLLYEYFTVYNELTKVKYVTEGMRKPAFLSGEQKKAIVDLLFKTNRKVTVKQLKEDYFKKIECFDSVEISGVEDRFNASLGTYHDLLKIIKDKDFLDNEENEDILEDIVLTLTLFEDREMIEERLKTYAHLFDDKVMKQLKRRRYTGWGRLSRKLINGIRDKQSGKTILDFLKSDGFANRNFMQLIHDDSLTFKEDIQKAQVSGQGDSLHEHIANLAGSPAIKKGILQTVKVVDELVKVMGRHKPENIVIEMARENQTTQKGQKNSRERMKRIEEGIKELGSQILKEHPVENTQLQNEKLYLYYLQNGRDMYVDQELDINRLSDYDVDHIVPQSFLKDDSIDNKVLTRSDKARGKSDNVPSEEVVKKMKNYWRQLLNAKLITQRKFDNLTKAERGGLSELDKAGFIKRQLVETRQITKHVAQILDSRMNTKYDENDKLIREVKVITLKSKLVSDFRKDFQFYKVREINNYHHAHDAYLNAVVGTALIKKYPKLESEFVYGDYKVYDVRKMIAKSEQEIGKATAKYFFYSNIMNFFKTEITLANGEIRKRPLIETNGETGEIVWDKGRDFATVRKVLSMPQVNIVKKTEVQTGGFSKESILPKRNSDKLIARKKDWDPKKYGGFDSPTVAYSVLVVAKVEKGKSKKLKSVKELLGITIMERSSFEKNPIDFLEAKGYKEVKKDLIIKLPKYSLFELENGRKRMLASAGELQKGNELALPSKYVNFLYLASHYEKLKGSPEDNEQKQLFVEQHKHYLDEIIEQISEFSKRVILADANLDKVLSAYNKHRDKPIREQAENIIHLFTLTNLGAPAAFKYFDTTIDRKRYTSTKEVLDATLIHQSITGLYETRIDLSQLGGDGGPAPGGSEAAAKGGVQEISDSRPMLHIYLNGRRFLGLLDTGADKTCIAGRDWPANWPIHQTESSLQGLGMACGVARSSQPLRWQHEDKSGIIHPFVIPTLPFTLWGRDIMKDIKVRLMTDSPDDSQDLMIGAIESNLFADQISWKSDQPVWLNQWPLKQEKLQALQQLVTEQLQLGHLEESNSPWNTPVFVIKKKSGKWRLLQDLRAVNATMHDMGALQPGLPSPPAVPKGWEIIIIDLQDCFFNIKLHPEDCKRFAFSVPSPNFKRPYQRFQWKVLPQGMKNSPTLCQKFVDKAILTVRDKYQDSYIVHYMDDILLAHPSRSIVDEILTSMIQALNKHGLVVSTEKIQKYDNLKYLGTHIQGDSVSYQKLQIRTDKLRTLNDFQKLLGNINWIRPFLKLTTGELKPLFEILNPDSNPISTRKLTPEACKALQLMNERLSTARVKRLDLSQPWSLCILKTEYTPTACLWQDGVVEWIHLPHISPKVITPYDIFCTQLIIKGRHRSKELFSKDPDYIVVPYTKVQFDLLLQEKEDWPISLLGFLGEVHFHLPKDPLLTFTLQTAIIFPHMTSTTPLEKGIVIFTDGSANGRSVTYIQGREPIIKENTQNTAQQAEIVAVITAFEEVSQPFNLYTDSKYVTGLFPEIETATLSPRTKIYTELKHLQRLIHKRQEKFYIGHIRGHTGLPGPLAQGNAYADSLTRILTAAGKRTADGSEFEKRTADGSEFESPKKKAKVE

SEQ ID NO: 22 - protein, 2116 aa, synthetic construct
MPAAKRVKLDGGDKKYSIGLDIGTNSVGWAVITDEYKVPSKKFKVLGNTDRHSIKKNLIGALLFDSGETAEATRLKRTARRRYTRRKNRICYLQEIFSNEMAKVDDSFFHRLEESFLVEEDKKHERHPIFGNIVDEVAYHEKYPTIYHLRKKLVDSTDKADLRLIYLALAHMIKFRGHFLIEGDLNPDNSDVDKLFIQLVQTYNQLFEENPINASGVDAKAILSARLSKSRRLENLIAQLPGEKKNGLFGNLIALSLGLTPNFKSNFDLAEDAKLQLSKDTYDDDLDNLLAQIGDQYADLFLAAKNLSDAILLSDILRVNTEITKAPLSASMIKRYDEHHQDLTLLKALVRQQLPEKYKEIFFDQSKNGYAGYIDGGASQEEFYKFIKPILEKMDGTEELLVKLNREDLLRKQRTFDNGSIPHQIHLGELHAILRRQEDFYPFLKDNREKIEKILTFRIPYYVGPLARGNSRFAWMTRKSEETITPWNFEEVVDKGASAQSFIERMTNFDKNLPNEKVLPKHSLLYEYFTVYNELTKVKYVTEGMRKPAFLSGEQKKAIVDLLFKTNRKVTVKQLKEDYFKKIECFDSVEISGVEDRFNASLGTYHDLLKIIKDKDFLDNEENEDILEDIVLTLTLFEDREMIEERLKTYAHLFDDKVMKQLKRRRYTGWGRLSRKLINGIRDKQSGKTILDFLKSDGFANRNFMQLIHDDSLTFKEDIQKAQVSGQGDSLHEHIANLAGSPAIKKGILQTVKVVDELVKVMGRHKPENIVIEMARENQTTQKGQKNSRERMKRIEEGIKELGSQILKEHPVENTQLQNEKLYLYYLQNGRDMYVDQELDINRLSDYDVDHIVPQSFLKDDSIDNKVLTRSDKARGKSDNVPSEEVVKKMKNYWRQLLNAKLITQRKFDNLTKAERGGLSELDKAGFIKRQLVETRQITKHVAQILDSRMNTKYDENDKLIREVKVITLKSKLVSDFRKDFQFYKVREINNYHHAHDAYLNAVVGTALIKKYPKLESEFVYGDYKVYDVRKMIAKSEQEIGKATAKYFFYSNIMNFFKTEITLANGEIRKRPLIETNGETGEIVWDKGRDFATVRKVLSMPQVNIVKKTEVQTGGFSKESILPKRNSDKLIARKKDWDPKKYGGFDSPTVAYSVLVVAKVEKGKSKKLKSVKELLGITIMERSSFEKNPIDFLEAKGYKEVKKDLIIKLPKYSLFELENGRKRMLASAGELQKGNELALPSKYVNFLYLASHYEKLKGSPEDNEQKQLFVEQHKHYLDEIIEQISEFSKRVILADANLDKVLSAYNKHRDKPIREQAENIIHLFTLTNLGAPAAFKYFDTTIDRKRYTSTKEVLDATLIHQSITGLYETRIDLSQLGGDGGGGSEAAAKGGGGGVQEISDSRPMLHIYLNGRRFLGLLDTGADKTCIAGRDWPANWPIHQTESSLQGLGMACGVARSSQPLRWQHEDKSGIIHPFVIPTLPFTLWGRDIMKDIKVRLMTDSPDDSQDLMIGAIESNLFADQISWKSDQPVWLNQWPLKQEKLQALQQLVTEQLQLGHLEESNSPWNTPVFVIKKKSGKWRLLQDLRAVNATMHDMGALQPGLPSPPAVPKGWEIIIIDLQDCFFNIKLHPEDCKRFAFSVPSPNFKRPYQRFQWKVLPQGMKNSPTLCQKFVDKAILTVRDKYQDSYIVHYMDDILLAHPSRSIVDEILTSMIQALNKHGLVVSTEKIQKYDNLKYLGTHIQGDSVSYQKLQIRTDKLRTLNDFQKLLGNINWIRPFLKLTTGELKPLFEILNPDSNPISTRKLTPEACKALQLMNERLSTARVKRLDLSQPWSLCILKTEYTPTACLWQDGVVEWIHLPHISPKVITPYDIFCTQLIIKGRHRSKELFSKDPDYIVVPYTKVQFDLLLQEKEDWPISLLGFLGEVHFHLPKDPLLTFTLQTAIIFPHMTSTTPLEKGIVIFTDGSANGRSVTYIQGREPIIKENTQNTAQQAEIVAVITAFEEVSQPFNLYTDSKYVTGLFPEIETATLSPRTKIYTELKHLQRLIHKRQEKFYIGHIRGHTGLPGPLAQGNAYADSLTRILTAAGKRTADGSEFEKRTADGSEFESPKKKAKVE

SEQ ID NO: 23 - protein, 2116 aa, synthetic construct
MPAAKRVKLDGGDKKYSIGLDIGTNSVGWAVITDEYKVPSKKFKVLGNTDRHSIKKNLIGALLFDSGETAEATRLKRTARRRYTRRKNRICYLQEIFSNEMAKVDDSFFHRLEESFLVEEDKKHERHPIFGNIVDEVAYHEKYPTIYHLRKKLVDSTDKADLRLIYLALAHMIKFRGHFLIEGDLNPDNSDVDKLFIQLVQTYNQLFEENPINASGVDAKAILSARLSKSRRLENLIAQLPGEKKNGLFGNLIALSLGLTPNFKSNFDLAEDAKLQLSKDTYDDDLDNLLAQIGDQYADLFLAAKNLSDAILLSDILRVNTEITKAPLSASMIKRYDEHHQDLTLLKALVRQQLPEKYKEIFFDQSKNGYAGYIDGGASQEEFYKFIKPILEKMDGTEELLVKLNREDLLRKQRTFDNGSIPHQIHLGELHAILRRQEDFYPFLKDNREKIEKILTFRIPYYVGPLARGNSRFAWMTRKSEETITPWNFEEVVDKGASAQSFIERMTNFDKNLPNEKVLPKHSLLYEYFTVYNELTKVKYVTEGMRKPAFLSGEQKKAIVDLLFKTNRKVTVKQLKEDYFKKIECFDSVEISGVEDRFNASLGTYHDLLKIIKDKDFLDNEENEDILEDIVLTLTLFEDREMIEERLKTYAHLFDDKVMKQLKRRRYTGWGRLSRKLINGIRDKQSGKTILDFLKSDGFANRNFMQLIHDDSLTFKEDIQKAQVSGQGDSLHEHIANLAGSPAIKKGILQTVKVVDELVKVMGRHKPENIVIEMARENQTTQKGQKNSRERMKRIEEGIKELGSQILKEHPVENTQLQNEKLYLYYLQNGRDMYVDQELDINRLSDYDVDHIVPQSFLKDDSIDNKVLTRSDKARGKSDNVPSEEVVKKMKNYWRQLLNAKLITQRKFDNLTKAERGGLSELDKAGFIKRQLVETRQITKHVAQILDSRMNTKYDENDKLIREVKVITLKSKLVSDFRKDFQFYKVREINNYHHAHDAYLNAVVGTALIKKYPKLESEFVYGDYKVYDVRKMIAKSEQEIGKATAKYFFYSNIMNFFKTEITLANGEIRKRPLIETNGETGEIVWDKGRDFATVRKVLSMPQVNIVKKTEVQTGGFSKESILPKRNSDKLIARKKDWDPKKYGGFDSPTVAYSVLVVAKVEKGKSKKLKSVKELLGITIMERSSFEKNPIDFLEAKGYKEVKKDLIIKLPKYSLFELENGRKRMLASAGELQKGNELALPSKYVNFLYLASHYEKLKGSPEDNEQKQLFVEQHKHYLDEIIEQISEFSKRVILADANLDKVLSAYNKHRDKPIREQAENIIHLFTLTNLGAPAAFKYFDTTIDRKRYTSTKEVLDATLIHQSITGLYETRIDLSQLGGDGGGGGGGSEAAAKGGVQEISDSRPMLHIYLNGRRFLGLLDTGADKTCIAGRDWPANWPIHQTESSLQGLGMACGVARSSQPLRWQHEDKSGIIHPFVIPTLPFTLWGRDIMKDIKVRLMTDSPDDSQDLMIGAIESNLFADQISWKSDQPVWLNQWPLKQEKLQALQQLVTEQLQLGHLEESNSPWNTPVFVIKKKSGKWRLLQDLRAVNATMHDMGALQPGLPSPPAVPKGWEIIIIDLQDCFFNIKLHPEDCKRFAFSVPSPNFKRPYQRFQWKVLPQGMKNSPTLCQKFVDKAILTVRDKYQDSYIVHYMDDILLAHPSRSIVDEILTSMIQALNKHGLVVSTEKIQKYDNLKYLGTHIQGDSVSYQKLQIRTDKLRTLNDFQKLLGNINWIRPFLKLTTGELKPLFEILNPDSNPISTRKLTPEACKALQLMNERLSTARVKRLDLSQPWSLCILKTEYTPTACLWQDGVVEWIHLPHISPKVITPYDIFCTQLIIKGRHRSKELFSKDPDYIVVPYTKVQFDLLLQEKEDWPISLLGFLGEVHFHLPKDPLLTFTLQTAIIFPHMTSTTPLEKGIVIFTDGSANGRSVTYIQGREPIIKENTQNTAQQAEIVAVITAFEEVSQPFNLYTDSKYVTGLFPEIETATLSPRTKIYTELKHLQRLIHKRQEKFYIGHIRGHTGLPGPLAQGNAYADSLTRILTAAGKRTADGSEFEKRTADGSEFESPKKKAKVE

SEQ ID NO: 24 - protein, 2116 aa, synthetic construct
MPAAKRVKLDGGDKKYSIGLDIGTNSVGWAVITDEYKVPSKKFKVLGNTDRHSIKKNLIGALLFDSGETAEATRLKRTARRRYTRRKNRICYLQEIFSNEMAKVDDSFFHRLEESFLVEEDKKHERHPIFGNIVDEVAYHEKYPTIYHLRKKLVDSTDKADLRLIYLALAHMIKFRGHFLIEGDLNPDNSDVDKLFIQLVQTYNQLFEENPINASGVDAKAILSARLSKSRRLENLIAQLPGEKKNGLFGNLIALSLGLTPNFKSNFDLAEDAKLQLSKDTYDDDLDNLLAQIGDQYADLFLAAKNLSDAILLSDILRVNTEITKAPLSASMIKRYDEHHQDLTLLKALVRQQLPEKYKEIFFDQSKNGYAGYIDGGASQEEFYKFIKPILEKMDGTEELLVKLNREDLLRKQRTFDNGSIPHQIHLGELHAILRRQEDFYPFLKDNREKIEKILTFRIPYYVGPLARGNSRFAWMTRKSEETITPWNFEEVVDKGASAQSFIERMTNFDKNLPNEKVLPKHSLLYEYFTVYNELTKVKYVTEGMRKPAFLSGEQKKAIVDLLFKTNRKVTVKQLKEDYFKKIECFDSVEISGVEDRFNASLGTYHDLLKIIKDKDFLDNEENEDILEDIVLTLTLFEDREMIEERLKTYAHLFDDKVMKQLKRRRYTGWGRLSRKLINGIRDKQSGKTILDFLKSDGFANRNFMQLIHDDSLTFKEDIQKAQVSGQGDSLHEHIANLAGSPAIKKGILQTVKVVDELVKVMGRHKPENIVIEMARENQTTQKGQKNSRERMKRIEEGIKELGSQILKEHPVENTQLQNEKLYLYYLQNGRDMYVDQELDINRLSDYDVDHIVPQSFLKDDSIDNKVLTRSDKARGKSDNVPSEEVVKKMKNYWRQLLNAKLITQRKFDNLTKAERGGLSELDKAGFIKRQLVETRQITKHVAQILDSRMNTKYDENDKLIREVKVITLKSKLVSDFRKDFQFYKVREINNYHHAHDAYLNAVVGTALIKKYPKLESEFVYGDYKVYDVRKMIAKSEQEIGKATAKYFFYSNIMNFFKTEITLANGEIRKRPLIETNGETGEIVWDKGRDFATVRKVLSMPQVNIVKKTEVQTGGFSKESILPKRNSDKLIARKKDWDPKKYGGFDSPTVAYSVLVVAKVEKGKSKKLKSVKELLGITIMERSSFEKNPIDFLEAKGYKEVKKDLIIKLPKYSLFELENGRKRMLASAGELQKGNELALPSKYVNFLYLASHYEKLKGSPEDNEQKQLFVEQHKHYLDEIIEQISEFSKRVILADANLDKVLSAYNKHRDKPIREQAENIIHLFTLTNLGAPAAFKYFDTTIDRKRYTSTKEVLDATLIHQSITGLYETRIDLSQLGGDGGPAPEAAAKGSSGGVQEISDSRPMLHIYLNGRRFLGLLDTGADKTCIAGRDWPANWPIHQTESSLQGLGMACGVARSSQPLRWQHEDKSGIIHPFVIPTLPFTLWGRDIMKDIKVRLMTDSPDDSQDLMIGAIESNLFADQISWKSDQPVWLNQWPLKQEKLQALQQLVTEQLQLGHLEESNSPWNTPVFVIKKKSGKWRLLQDLRAVNATMHDMGALQPGLPSPPAVPKGWEIIIIDLQDCFFNIKLHPEDCKRFAFSVPSPNFKRPYQRFQWKVLPQGMKNSPTLCQKFVDKAILTVRDKYQDSYIVHYMDDILLAHPSRSIVDEILTSMIQALNKHGLVVSTEKIQKYDNLKYLGTHIQGDSVSYQKLQIRTDKLRTLNDFQKLLGNINWIRPFLKLTTGELKPLFEILNPDSNPISTRKLTPEACKALQLMNERLSTARVKRLDLSQPWSLCILKTEYTPTACLWQDGVVEWIHLPHISPKVITPYDIFCTQLIIKGRHRSKELFSKDPDYIVVPYTKVQFDLLLQEKEDWPISLLGFLGEVHFHLPKDPLLTFTLQTAIIFPHMTSTTPLEKGIVIFTDGSANGRSVTYIQGREPIIKENTQNTAQQAEIVAVITAFEEVSQPFNLYTDSKYVTGLFPEIETATLSPRTKIYTELKHLQRLIHKRQEKFYIGHIRGHTGLPGPLAQGNAYADSLTRILTAAGKRTADGSEFEKRTADGSEFESPKKKAKVE

SEQ ID NO: 25 - protein, 2116 aa, synthetic construct
MPAAKRVKLDGGDKKYSIGLDIGTNSVGWAVITDEYKVPSKKFKVLGNTDRHSIKKNLIGALLFDSGETAEATRLKRTARRRYTRRKNRICYLQEIFSNEMAKVDDSFFHRLEESFLVEEDKKHERHPIFGNIVDEVAYHEKYPTIYHLRKKLVDSTDKADLRLIYLALAHMIKFRGHFLIEGDLNPDNSDVDKLFIQLVQTYNQLFEENPINASGVDAKAILSARLSKSRRLENLIAQLPGEKKNGLFGNLIALSLGLTPNFKSNFDLAEDAKLQLSKDTYDDDLDNLLAQIGDQYADLFLAAKNLSDAILLSDILRVNTEITKAPLSASMIKRYDEHHQDLTLLKALVRQQLPEKYKEIFFDQSKNGYAGYIDGGASQEEFYKFIKPILEKMDGTEELLVKLNREDLLRKQRTFDNGSIPHQIHLGELHAILRRQEDFYPFLKDNREKIEKILTFRIPYYVGPLARGNSRFAWMTRKSEETITPWNFEEVVDKGASAQSFIERMTNFDKNLPNEKVLPKHSLLYEYFTVYNELTKVKYVTEGMRKPAFLSGEQKKAIVDLLFKTNRKVTVKQLKEDYFKKIECFDSVEISGVEDRFNASLGTYHDLLKIIKDKDFLDNEENEDILEDIVLTLTLFEDREMIEERLKTYAHLFDDKVMKQLKRRRYTGWGRLSRKLINGIRDKQSGKTILDFLKSDGFANRNFMQLIHDDSLTFKEDIQKAQVSGQGDSLHEHIANLAGSPAIKKGILQTVKVVDELVKVMGRHKPENIVIEMARENQTTQKGQKNSRERMKRIEEGIKELGSQILKEHPVENTQLQNEKLYLYYLQNGRDMYVDQELDINRLSDYDVDHIVPQSFLKDDSIDNKVLTRSDKARGKSDNVPSEEVVKKMKNYWRQLLNAKLITQRKFDNLTKAERGGLSELDKAGFIKRQLVETRQITKHVAQILDSRMNTKYDENDKLIREVKVITLKSKLVSDFRKDFQFYKVREINNYHHAHDAYLNAVVGTALIKKYPKLESEFVYGDYKVYDVRKMIAKSEQEIGKATAKYFFYSNIMNFFKTEITLANGEIRKRPLIETNGETGEIVWDKGRDFATVRKVLSMPQVNIVKKTEVQTGGFSKESILPKRNSDKLIARKKDWDPKKYGGFDSPTVAYSVLVVAKVEKGKSKKLKSVKELLGITIMERSSFEKNPIDFLEAKGYKEVKKDLIIKLPKYSLFELENGRKRMLASAGELQKGNELALPSKYVNFLYLASHYEKLKGSPEDNEQKQLFVEQHKHYLDEIIEQISEFSKRVILADANLDKVLSAYNKHRDKPIREQAENIIHLFTLTNLGAPAAFKYFDTTIDRKRYTSTKEVLDATLIHQSITGLYETRIDLSQLGGDGGGGSGSSEAAAKGGVQEISDSRPMLHIYLNGRRFLGLLDTGADKTCIAGRDWPANWPIHQTESSLQGLGMACGVARSSQPLRWQHEDKSGIIHPFVIPTLPFTLWGRDIMKDIKVRLMTDSPDDSQDLMIGAIESNLFADQISWKSDQPVWLNQWPLKQEKLQALQQLVTEQLQLGHLEESNSPWNTPVFVIKKKSGKWRLLQDLRAVNATMHDMGALQPGLPSPPAVPKGWEIIIIDLQDCFFNIKLHPEDCKRFAFSVPSPNFKRPYQRFQWKVLPQGMKNSPTLCQKFVDKAILTVRDKYQDSYIVHYMDDILLAHPSRSIVDEILTSMIQALNKHGLVVSTEKIQKYDNLKYLGTHIQGDSVSYQKLQIRTDKLRTLNDFQKLLGNINWIRPFLKLTTGELKPLFEILNPDSNPISTRKLTPEACKALQLMNERLSTARVKRLDLSQPWSLCILKTEYTPTACLWQDGVVEWIHLPHISPKVITPYDIFCTQLIIKGRHRSKELFSKDPDYIVVPYTKVQFDLLLQEKEDWPISLLGFLGEVHFHLPKDPLLTFTLQTAIIFPHMTSTTPLEKGIVIFTDGSANGRSVTYIQGREPIIKENTQNTAQQAEIVAVITAFEEVSQPFNLYTDSKYVTGLFPEIETATLSPRTKIYTELKHLQRLIHKRQEKFYIGHIRGHTGLPGPLAQGNAYADSLTRILTAAGKRTADGSEFEKRTADGSEFESPKKKAKVE

SEQ ID NO: 26 - protein, 2116 aa, synthetic construct
MPAAKRVKLDGGDKKYSIGLDIGTNSVGWAVITDEYKVPSKKFKVLGNTDRHSIKKNLIGALLFDSGETAEATRLKRTARRRYTRRKNRICYLQEIFSNEMAKVDDSFFHRLEESFLVEEDKKHERHPIFGNIVDEVAYHEKYPTIYHLRKKLVDSTDKADLRLIYLALAHMIKFRGHFLIEGDLNPDNSDVDKLFIQLVQTYNQLFEENPINASGVDAKAILSARLSKSRRLENLIAQLPGEKKNGLFGNLIALSLGLTPNFKSNFDLAEDAKLQLSKDTYDDDLDNLLAQIGDQYADLFLAAKNLSDAILLSDILRVNTEITKAPLSASMIKRYDEHHQDLTLLKALVRQQLPEKYKEIFFDQSKNGYAGYIDGGASQEEFYKFIKPILEKMDGTEELLVKLNREDLLRKQRTFDNGSIPHQIHLGELHAILRRQEDFYPFLKDNREKIEKILTFRIPYYVGPLARGNSRFAWMTRKSEETITPWNFEEVVDKGASAQSFIERMTNFDKNLPNEKVLPKHSLLYEYFTVYNELTKVKYVTEGMRKPAFLSGEQKKAIVDLLFKTNRKVTVKQLKEDYFKKIECFDSVEISGVEDRFNASLGTYHDLLKIIKDKDFLDNEENEDILEDIVLTLTLFEDREMIEERLKTYAHLFDDKVMKQLKRRRYTGWGRLSRKLINGIRDKQSGKTILDFLKSDGFANRNFMQLIHDDSLTFKEDIQKAQVSGQGDSLHEHIANLAGSPAIKKGILQTVKVVDELVKVMGRHKPENIVIEMARENQTTQKGQKNSRERMKRIEEGIKELGSQILKEHPVENTQLQNEKLYLYYLQNGRDMYVDQELDINRLSDYDVDHIVPQSFLKDDSIDNKVLTRSDKARGKSDNVPSEEVVKKMKNYWRQLLNAKLITQRKFDNLTKAERGGLSELDKAGFIKRQLVETRQITKHVAQILDSRMNTKYDENDKLIREVKVITLKSKLVSDFRKDFQFYKVREINNYHHAHDAYLNAVVGTALIKKYPKLESEFVYGDYKVYDVRKMIAKSEQEIGKATAKYFFYSNIMNFFKTEITLANGEIRKRPLIETNGETGEIVWDKGRDFATVRKVLSMPQVNIVKKTEVQTGGFSKESILPKRNSDKLIARKKDWDPKKYGGFDSPTVAYSVLVVAKVEKGKSKKLKSVKELLGITIMERSSFEKNPIDFLEAKGYKEVKKDLIIKLPKYSLFELENGRKRMLASAGELQKGNELALPSKYVNFLYLASHYEKLKGSPEDNEQKQLFVEQHKHYLDEIIEQISEFSKRVILADANLDKVLSAYNKHRDKPIREQAENIIHLFTLTNLGAPAAFKYFDTTIDRKRYTSTKEVLDATLIHQSITGLYETRIDLSQLGGDGGEAAAKGGSGSSGGVQEISDSRPMLHIYLNGRRFLGLLDTGADKTCIAGRDWPANWPIHQTESSLQGLGMACGVARSSQPLRWQHEDKSGIIHPFVIPTLPFTLWGRDIMKDIKVRLMTDSPDDSQDLMIGAIESNLFADQISWKSDQPVWLNQWPLKQEKLQALQQLVTEQLQLGHLEESNSPWNTPVFVIKKKSGKWRLLQDLRAVNATMHDMGALQPGLPSPVAVPKGWEIIIIDLQDCFFNIKLHPEDCKRFAFSVPSPNFKRPYQRFQWKVLPQGMKNSPTLCQKFVDKAILTVRDKYQDSYIVHYMDDILLAHPSRSIVDEILTSMIQALNKHGLVVSTEKIQKYDNLKYLGTHIQGDSVSYQKLQIRTDKLRTLNDFQKLLGNINWIRPFLKLTTGELKPLFEILNPDSNPISTRKLTPEACKALQLMNERLSTARVKRLDLSQPWSLCILKTEYTPTACLWQDGVVEWIHLPHISPKVITPYDIFCTQLIIKGRHRSKELFSKDPDYIVVPYTKVQFDLLLQEKEDWPISLLGFLGEVHFHLPKDPLLTFTLQTAIIFPHMTSTTPLEKGIVIFTDGSANGRSVTYIQGREPIIKENTQNTAQQAEIVAVITAFEEVSQPFNLYTDSKYVTGLFPEIETATLSPRTKIYTELKHLQRLIHKRQEKFYIGHIRGHTGLPGPLAQGNAYADSLTRILTAAGKRTADGSEFEKRTADGSEFESPKKKAKVE

SEQ ID NO: 27 - protein, 2116 aa, synthetic construct
MPAAKRVKLDGGDKKYSIGLDIGTNSVGWAVITDEYKVPSKKFKVLGNTDRHSIKKNLIGALLFDSGETAEATRLKRTARRRYTRRKNRICYLQEIFSNEMAKVDDSFFHRLEESFLVEEDKKHERHPIFGNIVDEVAYHEKYPTIYHLRKKLVDSTDKADLRLIYLALAHMIKFRGHFLIEGDLNPDNSDVDKLFIQLVQTYNQLFEENPINASGVDAKAILSARLSKSRRLENLIAQLPGEKKNGLFGNLIALSLGLTPNFKSNFDLAEDAKLQLSKDTYDDDLDNLLAQIGDQYADLFLAAKNLSDAILLSDILRVNTEITKAPLSASMIKRYDEHHQDLTLLKALVRQQLPEKYKEIFFDQSKNGYAGYIDGGASQEEFYKFIKPILEKMDGTEELLVKLNREDLLRKQRTFDNGSIPHQIHLGELHAILRRQEDFYPFLKDNREKIEKILTFRIPYYVGPLARGNSRFAWMTRKSEETITPWNFEEVVDKGASAQSFIERMTNFDKNLPNEKVLPKHSLLYEYFTVYNELTKVKYVTEGMRKPAFLSGEQKKAIVDLLFKTNRKVTVKQLKEDYFKKIECFDSVEISGVEDRFNASLGTYHDLLKIIKDKDFLDNEENEDILEDIVLTLTLFEDREMIEERLKTYAHLFDDKVMKQLKRRRYTGWGRLSRKLINGIRDKQSGKTILDFLKSDGFANRNFMQLIHDDSLTFKEDIQKAQVSGQGDSLHEHIANLAGSPAIKKGILQTVKVVDELVKVMGRHKPENIVIEMARENQTTQKGQKNSRERMKRIEEGIKELGSQILKEHPVENTQLQNEKLYLYYLQNGRDMYVDQELDINRLSDYDVDHIVPQSFLKDDSIDNKVLTRSDKARGKSDNVPSEEVVKKMKNYWRQLLNAKLITQRKFDNLTKAERGGLSELDKAGFIKRQLVETRQITKHVAQILDSRMNTKYDENDKLIREVKVITLKSKLVSDFRKDFQFYKVREINNYHHAHDAYLNAVVGTALIKKYPKLESEFVYGDYKVYDVRKMIAKSEQEIGKATAKYFFYSNIMNFFKTEITLANGEIRKRPLIETNGETGEIVWDKGRDFATVRKVLSMPQVNIVKKTEVQTGGFSKESILPKRNSDKLIARKKDWDPKKYGGFDSPTVAYSVLVVAKVEKGKSKKLKSVKELLGITIMERSSFEKNPIDFLEAKGYKEVKKDLIIKLPKYSLFELENGRKRMLASAGELQKGNELALPSKYVNFLYLASHYEKLKGSPEDNEQKQLFVEQHKHYLDEIIEQISEFSKRVILADANLDKVLSAYNKHRDKPIREQAENIIHLFTLTNLGAPAAFKYFDTTIDRKRYTSTKEVLDATLIHQSITGLYETRIDLSQLGGDGGEAAAKGGGGGSGGVQEISDSRPMLHIYLNGRRFLGLLDTGADKTCIAGRDWPANWPIHQTESSLQGLGMACGVARSSQPLRWQHEDKSGIIHPFVIPTLPFTLWGRDIMKDIKVRLMTDSPDDSQDLMIGAIESNLFADQISWKSDQPVWLNQWPLKQEKLQALQQLVTEQLQLGHLEESNSPWNTPVFVIKKKSGKWRLLQDLRAVNATMHDMGALQPGLPSPVAVPKGWEIIIIDLQDCFFNIKLHPEDCKRFAFSVPSPNFKRPYQRFQWKVLPQGMKNSPTLCQKFVDKAILTVRDKYQDSYIVHYMDDILLAHPSRSIVDEILTSMIQALNKHGLVVSTEKIQKYDNLKYLGTHIQGDSVSYQKLQIRTDKLRTLNDFQKLLGNINWIRPFLKLTTGELKPLFEILNPDSNPISTRKLTPEACKALQLMNERLSTARVKRLDLSQPWSLCILKTEYTPTACLWQDGVVEWIHLPHISPKVITPYDIFCTQLIIKGRHRSKELFSKDPDYIVVPYTKVQFDLLLQEKEDWPISLLGFLGEVHFHLPKDPLLTFTLQTAIIFPHMTSTTPLEKGIVIFTDGSANGRSVTYIQGREPIIKENTQNTAQQAEIVAVITAFEEVSQPFNLYTDSKYVTGLFPEIETATLSPRTKIYTELKHLQRLIHKRQEKFYIGHIRGHTGLPGPLAQGNAYADSLTRILTAAGKRTADGSEFEKRTADGSEFESPKKKAKVE

SEQ ID NO: 28 - protein, 2116 aa, synthetic construct
MPAAKRVKLDGGDKKYSIGLDIGTNSVGWAVITDEYKVPSKKFKVLGNTDRHSIKKNLIGALLFDSGETAEATRLKRTARRRYTRRKNRICYLQEIFSNEMAKVDDSFFHRLEESFLVEEDKKHERHPIFGNIVDEVAYHEKYPTIYHLRKKLVDSTDKADLRLIYLALAHMIKFRGHFLIEGDLNPDNSDVDKLFIQLVQTYNQLFEENPINASGVDAKAILSARLSKSRRLENLIAQLPGEKKNGLFGNLIALSLGLTPNFKSNFDLAEDAKLQLSKDTYDDDLDNLLAQIGDQYADLFLAAKNLSDAILLSDILRVNTEITKAPLSASMIKRYDEHHQDLTLLKALVRQQLPEKYKEIFFDQSKNGYAGYIDGGASQEEFYKFIKPILEKMDGTEELLVKLNREDLLRKQRTFDNGSIPHQIHLGELHAILRRQEDFYPFLKDNREKIEKILTFRIPYYVGPLARGNSRFAWMTRKSEETITPWNFEEVVDKGASAQSFIERMTNFDKNLPNEKVLPKHSLLYEYFTVYNELTKVKYVTEGMRKPAFLSGEQKKAIVDLLFKTNRKVTVKQLKEDYFKKIECFDSVEISGVEDRFNASLGTYHDLLKIIKDKDFLDNEENEDILEDIVLTLTLFEDREMIEERLKTYAHLFDDKVMKQLKRRRYTGWGRLSRKLINGIRDKQSGKTILDFLKSDGFANRNFMQLIHDDSLTFKEDIQKAQVSGQGDSLHEHIANLAGSPAIKKGILQTVKVVDELVKVMGRHKPENIVIEMARENQTTQKGQKNSRERMKRIEEGIKELGSQILKEHPVENTQLQNEKLYLYYLQNGRDMYVDQELDINRLSDYDVDHIVPQSFLKDDSIDNKVLTRSDKARGKSDNVPSEEVVKKMKNYWRQLLNAKLITQRKFDNLTKAERGGLSELDKAGFIKRQLVETRQITKHVAQILDSRMNTKYDENDKLIREVKVITLKSKLVSDFRKDFQFYKVREINNYHHAHDAYLNAVVGTALIKKYPKLESEFVYGDYKVYDVRKMIAKSEQEIGKATAKYFFYSNIMNFFKTEITLANGEIRKRPLIETNGETGEIVWDKGRDFATVRKVLSMPQVNIVKKTEVQTGGFSKESILPKRNSDKLIARKKDWDPKKYGGFDSPTVAYSVLVVAKVEKGKSKKLKSVKELLGITIMERSSFEKNPIDFLEAKGYKEVKKDLIIKLPKYSLFELENGRKRMLASAGELQKGNELALPSKYVNFLYLASHYEKLKGSPEDNEQKQLFVEQHKHYLDEIIEQISEFSKRVILADANLDKVLSAYNKHRDKPIREQAENIIHLFTLTNLGAPAAFKYFDTTIDRKRYTSTKEVLDATLIHQSITGLYETRIDLSQLGGDGGEAAAKPAPGGSGGVQEISDSRPMLHIYLNGRRFLGLLDTGADKTCIAGRDWPANWPIHQTESSLQGLGMACGVARSSQPLRWQHEDKSGIIHPFVIPTLPFTLWGRDIMKDIKVRLMTDSPDDSQDLMIGAIESNLFADQISWKSDQPVWLNQWPLKQEKLQALQQLVTEQLQLGHLEESNSPWNTPVFVIKKKSGKWRLLQDLRAVNATMHDMGALQPGLPSPVAVPKGWEIIIIDLQDCFFNIKLHPEDCKRFAFSVPSPNFKRPYQRFQWKVLPQGMKNSPTLCQKFVDKAILTVRDKYQDSYIVHYMDDILLAHPSRSIVDEILTSMIQALNKHGLVVSTEKIQKYDNLKYLGTHIQGDSVSYQKLQIRTDKLRTLNDFQKLLGNINWIRPFLKLTTGELKPLFEILNPDSNPISTRKLTPEACKALQLMNERLSTARVKRLDLSQPWSLCILKTEYTPTACLWQDGVVEWIHLPHISPKVITPYDIFCTQLIIKGRHRSKELFSKDPDYIVVPYTKVQFDLLLQEKEDWPISLLGFLGEVHFHLPKDPLLTFTLQTAIIFPHMTSTTPLEKGIVIFTDGSANGRSVTYIQGREPIIKENTQNTAQQAEIVAVITAFEEVSQPFNLYTDSKYVTGLFPEIETATLSPRTKIYTELKHLQRLIHKRQEKFYIGHIRGHTGLPGPLAQGNAYADSLTRILTAAGKRTADGSEFEKRTADGSEFESPKKKAKVE

SEQ ID NO: 29 - protein, 2113 aa, synthetic construct
MPAAKRVKLDGGDKKYSIGLDIGTNSVGWAVITDEYKVPSKKFKVLGNTDRHSIKKNLIGALLFDSGETAEATRLKRTARRRYTRRKNRICYLQEIFSNEMAKVDDSFFHRLEESFLVEEDKKHERHPIFGNIVDEVAYHEKYPTIYHLRKKLVDSTDKADLRLIYLALAHMIKFRGHFLIEGDLNPDNSDVDKLFIQLVQTYNQLFEENPINASGVDAKAILSARLSKSRRLENLIAQLPGEKKNGLFGNLIALSLGLTPNFKSNFDLAEDAKLQLSKDTYDDDLDNLLAQIGDQYADLFLAAKNLSDAILLSDILRVNTEITKAPLSASMIKRYDEHHQDLTLLKALVRQQLPEKYKEIFFDQSKNGYAGYIDGGASQEEFYKFIKPILEKMDGTEELLVKLNREDLLRKQRTFDNGSIPHQIHLGELHAILRRQEDFYPFLKDNREKIEKILTFRIPYYVGPLARGNSRFAWMTRKSEETITPWNFEEVVDKGASAQSFIERMTNFDKNLPNEKVLPKHSLLYEYFTVYNELTKVKYVTEGMRKPAFLSGEQKKAIVDLLFKTNRKVTVKQLKEDYFKKIECFDSVEISGVEDRFNASLGTYHDLLKIIKDKDFLDNEENEDILEDIVLTLTLFEDREMIEERLKTYAHLFDDKVMKQLKRRRYTGWGRLSRKLINGIRDKQSGKTILDFLKSDGFANRNFMQLIHDDSLTFKEDIQKAQVSGQGDSLHEHIANLAGSPAIKKGILQTVKVVDELVKVMGRHKPENIVIEMARENQTTQKGQKNSRERMKRIEEGIKELGSQILKEHPVENTQLQNEKLYLYYLQNGRDMYVDQELDINRLSDYDVDHIVPQSFLKDDSIDNKVLTRSDKARGKSDNVPSEEVVKKMKNYWRQLLNAKLITQRKFDNLTKAERGGLSELDKAGFIKRQLVETRQITKHVAQILDSRMNTKYDENDKLIREVKVITLKSKLVSDFRKDFQFYKVREINNYHHAHDAYLNAVVGTALIKKYPKLESEFVYGDYKVYDVRKMIAKSEQEIGKATAKYFFYSNIMNFFKTEITLANGEIRKRPLIETNGETGEIVWDKGRDFATVRKVLSMPQVNIVKKTEVQTGGFSKESILPKRNSDKLIARKKDWDPKKYGGFDSPTVAYSVLVVAKVEKGKSKKLKSVKELLGITIMERSSFEKNPIDFLEAKGYKEVKKDLIIKLPKYSLFELENGRKRMLASAGELQKGNELALPSKYVNFLYLASHYEKLKGSPEDNEQKQLFVEQHKHYLDEIIEQISEFSKRVILADANLDKVLSAYNKHRDKPIREQAENIIHLFTLTNLGAPAAFKYFDTTIDRKRYTSTKEVLDATLIHQSITGLYETRIDLSQLGGDGGGGSEAAAKGGVQEISDSRPMLHIYLNGRRFLGLLDTGADKTCIAGRDWPANWPIHQTESSLQGLGMACGVARSSQPLRWQHEDKSGIIHPFVIPTLPFTLWGRDIMKDIKVRLMTDSPDDSQDLMIGAIESNLFADQISWKSDQPVWLNQWPLKQEKLQALQQLVTEQLQLGHLEESNSPWNTPVFVIKKKSGKWRLLQDLRAVNATMHDMGALQPGLPSPVAVPKGWEIIIIDLQDCFFNIKLHPEDCKRFAFSVPSPNFKRPYQRFQWKVLPQGMKNSPTLCQKFVDKAILTVRDKYQDSYIVHYMDDILLAHPSRSIVDEILTSMIQALNKHGLVVSTEKIQKYDNLKYLGTHIQGDSVSYQKLQIRTDKLRTLNDFQKLLGNINWIRPFLKLTTGELKPLFEILNPDSNPISTRKLTPEACKALQLMNERLSTARVKRLDLSQPWSLCILKTEYTPTACLWQDGVVEWIHLPHISPKVITPYDIFCTQLIIKGRHRSKELFSKDPDYIVVPYTKVQFDLLLQEKEDWPISLLGFLGEVHFHLPKDPLLTFTLQTAIIFPHMTSTTPLEKGIVIFTDGSANGRSVTYIQGREPIIKENTQNTAQQAEIVAVITAFEEVSQPFNLYTDSKYVTGLFPEIETATLSPRTKIYTELKHLQRLIHKRQEKFYIGHIRGHTGLPGPLAQGNAYADSLTRILTAAGKRTADGSEFEKRTADGSEFESPKKKAKVE

SEQ ID NO: 30 - protein, 2111 aa, synthetic construct
MPAAKRVKLDGGDKKYSIGLDIGTNSVGWAVITDEYKVPSKKFKVLGNTDRHSIKKNLIGALLFDSGETAEATRLKRTARRRYTRRKNRICYLQEIFSNEMAKVDDSFFHRLEESFLVEEDKKHERHPIFGNIVDEVAYHEKYPTIYHLRKKLVDSTDKADLRLIYLALAHMIKFRGHFLIEGDLNPDNSDVDKLFIQLVQTYNQLFEENPINASGVDAKAILSARLSKSRRLENLIAQLPGEKKNGLFGNLIALSLGLTPNFKSNFDLAEDAKLQLSKDTYDDDLDNLLAQIGDQYADLFLAAKNLSDAILLSDILRVNTEITKAPLSASMIKRYDEHHQDLTLLKALVRQQLPEKYKEIFFDQSKNGYAGYIDGGASQEEFYKFIKPILEKMDGTEELLVKLNREDLLRKQRTFDNGSIPHQIHLGELHAILRRQEDFYPFLKDNREKIEKILTFRIPYYVGPLARGNSRFAWMTRKSEETITPWNFEEVVDKGASAQSFIERMTNFDKNLPNEKVLPKHSLLYEYFTVYNELTKVKYVTEGMRKPAFLSGEQKKAIVDLLFKTNRKVTVKQLKEDYFKKIECFDSVEISGVEDRFNASLGTYHDLLKIIKDKDFLDNEENEDILEDIVLTLTLFEDREMIEERLKTYAHLFDDKVMKQLKRRRYTGWGRLSRKLINGIRDKQSGKTILDFLKSDGFANRNFMQLIHDDSLTFKEDIQKAQVSGQGDSLHEHIANLAGSPAIKKGILQTVKVVDELVKVMGRHKPENIVIEMARENQTTQKGQKNSRERMKRIEEGIKELGSQILKEHPVENTQLQNEKLYLYYLQNGRDMYVDQELDINRLSDYDVDHIVPQSFLKDDSIDNKVLTRSDKARGKSDNVPSEEVVKKMKNYWRQLLNAKLITQRKFDNLTKAERGGLSELDKAGFIKRQLVETRQITKHVAQILDSRMNTKYDENDKLIREVKVITLKSKLVSDFRKDFQFYKVREINNYHHAHDAYLNAVVGTALIKKYPKLESEFVYGDYKVYDVRKMIAKSEQEIGKATAKYFFYSNIMNFFKTEITLANGEIRKRPLIETNGETGEIVWDKGRDFATVRKVLSMPQVNIVKKTEVQTGGFSKESILPKRNSDKLIARKKDWDPKKYGGFDSPTVAYSVLVVAKVEKGKSKKLKSVKELLGITIMERSSFEKNPIDFLEAKGYKEVKKDLIIKLPKYSLFELENGRKRMLASAGELQKGNELALPSKYVNFLYLASHYEKLKGSPEDNEQKQLFVEQHKHYLDEIIEQISEFSKRVILADANLDKVLSAYNKHRDKPIREQAENIIHLFTLTNLGAPAAFKYFDTTIDRKRYTSTKEVLDATLIHQSITGLYETRIDLSQLGGDGGGSSGGGGGVQEISDSRPMLHIYLNGRRFLGLLDTGADKTCIAGRDWPANWPIHQTESSLQGLGMACGVARSSQPLRWQHEDKSGIIHPFVIPTLPFTLWGRDIMKDIKVRLMTDSPDDSQDLMIGAIESNLFADQISWKSDQPVWLNQWPLKQEKLQALQQLVTEQLQLGHLEESNSPWNTPVFVIKKKSGKWRLLQDLRAVNATMHDMGALQPGLPSPVAVPKGWEIIIIDLQDCFFNIKLHPEDCKRFAFSVPSPNFKRPYQRFQWKVLPQGMKNSPTLCQKFVDKAILTVRDKYQDSYIVHYMDDILLAHPSRSIVDEILTSMIQALNKHGLVVSTEKIQKYDNLKYLGTHIQGDSVSYQKLQIRTDKLRTLNDFQKLLGNINWIRPFLKLTTGELKPLFEILNPDSNPISTRKLTPEACKALQLMNERLSTARVKRLDLSQPWSLCILKTEYTPTACLWQDGVVEWIHLPHISPKVITPYDIFCTQLIIKGRHRSKELFSKDPDYIVVPYTKVQFDLLLQEKEDWPISLLGFLGEVHFHLPKDPLLTFTLQTAIIFPHMTSTTPLEKGIVIFTDGSANGRSVTYIQGREPIIKENTQNTAQQAEIVAVITAFEEVSQPFNLYTDSKYVTGLFPEIETATLSPRTKIYTELKHLQRLIHKRQEKFYIGHIRGHTGLPGPLAQGNAYADSLTRILTAAGKRTADGSEFEKRTADGSEFESPKKKAKVE

SEQ ID NO: 31 - protein, 2114 aa, synthetic construct
MPAAKRVKLDGGDKKYSIGLDIGTNSVGWAVITDEYKVPSKKFKVLGNTDRHSIKKNLIGALLFDSGETAEATRLKRTARRRYTRRKNRICYLQEIFSNEMAKVDDSFFHRLEESFLVEEDKKHERHPIFGNIVDEVAYHEKYPTIYHLRKKLVDSTDKADLRLIYLALAHMIKFRGHFLIEGDLNPDNSDVDKLFIQLVQTYNQLFEENPINASGVDAKAILSARLSKSRRLENLIAQLPGEKKNGLFGNLIALSLGLTPNFKSNFDLAEDAKLQLSKDTYDDDLDNLLAQIGDQYADLFLAAKNLSDAILLSDILRVNTEITKAPLSASMIKRYDEHHQDLTLLKALVRQQLPEKYKEIFFDQSKNGYAGYIDGGASQEEFYKFIKPILEKMDGTEELLVKLNREDLLRKQRTFDNGSIPHQIHLGELHAILRRQEDFYPFLKDNREKIEKILTFRIPYYVGPLARGNSRFAWMTRKSEETITPWNFEEVVDKGASAQSFIERMTNFDKNLPNEKVLPKHSLLYEYFTVYNELTKVKYVTEGMRKPAFLSGEQKKAIVDLLFKTNRKVTVKQLKEDYFKKIECFDSVEISGVEDRFNASLGTYHDLLKIIKDKDFLDNEENEDILEDIVLTLTLFEDREMIEERLKTYAHLFDDKVMKQLKRRRYTGWGRLSRKLINGIRDKQSGKTILDFLKSDGFANRNFMQLIHDDSLTFKEDIQKAQVSGQGDSLHEHIANLAGSPAIKKGILQTVKVVDELVKVMGRHKPENIVIEMARENQTTQKGQKNSRERMKRIEEGIKELGSQILKEHPVENTQLQNEKLYLYYLQNGRDMYVDQELDINRLSDYDVDHIVPQSFLKDDSIDNKVLTRSDKARGKSDNVPSEEVVKKMKNYWRQLLNAKLITQRKFDNLTKAERGGLSELDKAGFIKRQLVETRQITKHVAQILDSRMNTKYDENDKLIREVKVITLKSKLVSDFRKDFQFYKVREINNYHHAHDAYLNAVVGTALIKKYPKLESEFVYGDYKVYDVRKMIAKSEQEIGKATAKYFFYSNIMNFFKTEITLANGEIRKRPLIETNGETGEIVWDKGRDFATVRKVLSMPQVNIVKKTEVQTGGFSKESILPKRNSDKLIARKKDWDPKKYGGFDSPTVAYSVLVVAKVEKGKSKKLKSVKELLGITIMERSSFEKNPIDFLEAKGYKEVKKDLIIKLPKYSLFELENGRKRMLASAGELQKGNELALPSKYVNFLYLASHYEKLKGSPEDNEQKQLFVEQHKHYLDEIIEQISEFSKRVILADANLDKVLSAYNKHRDKPIREQAENIIHLFTLTNLGAPAAFKYFDTTIDRKRYTSTKEVLDATLIHQSITGLYETRIDLSQLGGDGGGGGPAPGSSGGVQEISDSRPMLHIYLNGRRFLGLLDTGADKTCIAGRDWPANWPIHQTESSLQGLGMACGVARSSQPLRWQHEDKSGIIHPFVIPTLPFTLWGRDIMKDIKVRLMTDSPDDSQDLMIGAIESNLFADQISWKSDQPVWLNQWPLKQEKLQALQQLVTEQLQLGHLEESNSPWNTPVFVIKKKSGKWRLLQDLRAVNATMHDMGALQPGLPSPVAVPKGWEIIIIDLQDCFFNIKLHPEDCKRFAFSVPSPNFKRPYQRFQWKVLPQGMKNSPTLCQKFVDKAILTVRDKYQDSYIVHYMDDILLAHPSRSIVDEILTSMIQALNKHGLVVSTEKIQKYDNLKYLGTHIQGDSVSYQKLQIRTDKLRTLNDFQKLLGNINWIRPFLKLTTGELKPLFEILNPDSNPISTRKLTPEACKALQLMNERLSTARVKRLDLSQPWSLCILKTEYTPTACLWQDGVVEWIHLPHISPKVITPYDIFCTQLIIKGRHRSKELFSKDPDYIVVPYTKVQFDLLLQEKEDWPISLLGFLGEVHFHLPKDPLLTFTLQTAIIFPHMTSTTPLEKGIVIFTDGSANGRSVTYIQGREPIIKENTQNTAQQAEIVAVITAFEEVSQPFNLYTDSKYVTGLFPEIETATLSPRTKIYTELKHLQRLIHKRQEKFYIGHIRGHTGLPGPLAQGNAYADSLTRILTAAGKRTADGSEFEKRTADGSEFESPKKKAKVE

SEQ ID NO: 32 - protein, 2010 aa, synthetic construct
MPAAKRVKLDGGDKKYSIGLDIGTNSVGWAVITDEYKVPSKKFKVLGNTDRHSIKKNLIGALLFDSGETAEATRLKRTARRRYTRRKNRICYLQEIFSNEMAKVDDSFFHRLEESFLVEEDKKHERHPIFGNIVDEVAYHEKYPTIYHLRKKLVDSTDKADLRLIYLALAHMIKFRGHFLIEGDLNPDNSDVDKLFIQLVQTYNQLFEENPINASGVDAKAILSARLSKSRRLENLIAQLPGEKKNGLFGNLIALSLGLTPNFKSNFDLAEDAKLQLSKDTYDDDLDNLLAQIGDQYADLFLAAKNLSDAILLSDILRVNTEITKAPLSASMIKRYDEHHQDLTLLKALVRQQLPEKYKEIFFDQSKNGYAGYIDGGASQEEFYKFIKPILEKMDGTEELLVKLNREDLLRKQRTFDNGSIPHQIHLGELHAILRRQEDFYPFLKDNREKIEKILTFRIPYYVGPLARGNSRFAWMTRKSEETITPWNFEEVVDKGASAQSFIERMTNFDKNLPNEKVLPKHSLLYEYFTVYNELTKVKYVTEGMRKPAFLSGEQKKAIVDLLFKTNRKVTVKQLKEDYFKKIECFDSVEISGVEDRFNASLGTYHDLLKIIKDKDFLDNEENEDILEDIVLTLTLFEDREMIEERLKTYAHLFDDKVMKQLKRRRYTGWGRLSRKLINGIRDKQSGKTILDFLKSDGFANRNFMQLIHDDSLTFKEDIQKAQVSGQGDSLHEHIANLAGSPAIKKGILQTVKVVDELVKVMGRHKPENIVIEMARENQTTQKGQKNSRERMKRIEEGIKELGSQILKEHPVENTQLQNEKLYLYYLQNGRDMYVDQELDINRLSDYDVDHIVPQSFLKDDSIDNKVLTRSDKARGKSDNVPSEEVVKKMKNYWRQLLNAKLITQRKFDNLTKAERGGLSELDKAGFIKRQLVETRQITKHVAQILDSRMNTKYDENDKLIREVKVITLKSKLVSDFRKDFQFYKVREINNYHHAHDAYLNAVVGTALIKKYPKLESEFVYGDYKVYDVRKMIAKSEQEIGKATAKYFFYSNIMNFFKTEITLANGEIRKRPLIETNGETGEIVWDKGRDFATVRKVLSMPQVNIVKKTEVQTGGFSKESILPKRNSDKLIARKKDWDPKKYGGFDSPTVAYSVLVVAKVEKGKSKKLKSVKELLGITIMERSSFEKNPIDFLEAKGYKEVKKDLIIKLPKYSLFELENGRKRMLASAGELQKGNELALPSKYVNFLYLASHYEKLKGSPEDNEQKQLFVEQHKHYLDEIIEQISEFSKRVILADANLDKVLSAYNKHRDKPIREQAENIIHLFTLTNLGAPAAFKYFDTTIDRKRYTSTKEVLDATLIHQSITGLYETRIDLSQLGGDGGGGGEAAAKGSSGGLTAAIDILAPQQCAEPITWKSDEPVWVDQWPLTNDKLAAAQQLVQEQLEAGHITESSSPWNTPIFVIKKKSGKWRLLQDLRAVNATMVLMGALQPGLPSPVAIPQGYLKIIIDLKDCFFSIPLHPSDQKRFAFSLPSTNFKEPMQRFQWKVLPQGMANSPTLCQKYVATAIHKVRHAWKQMYIIHYMDDILIAGKDGQQVLQCFDQLKQELTAAGLHIAPEKVQLQDPYTYLGFELNGPKITNQKAVIRKDKLQTLNDFQKLLGDINWLRPYLKLTTGDLKPLFDTLKGDSDPNSHRSLSKEALASLEKVETAIAEQFVTHINYSLPLIFLIFNTALTPTGLFWQDNPIMWIHLPASPKKVLLPYYDAIADLIILGRDHSKKYFGIEPSTIIQPYSKSQIDWLMQNTEMWPIACASFVGILDNHYPPNKLIQFCKLHTFVFPQIISKTPLNNALLVFTDGSSTGMAAYTLTDTTIKFQTNLNSAQLVELQALIAVLSAFPNQPLNIYTDSAYLAHSIPLLETVAQIKHISETAKLFLQCQQLIYNRSIPFYIGHVRAHSGLPGPIAQGNQRADLATKIVASNINTAGKRTADGSEFEKRTADGSEFESPKKKAKVE

SEQ ID NO: 33 - protein, 2008 aa, synthetic construct
MPAAKRVKLDGGDKKYSIGLDIGTNSVGWAVITDEYKVPSKKFKVLGNTDRHSIKKNLIGALLFDSGETAEATRLKRTARRRYTRRKNRICYLQEIFSNEMAKVDDSFFHRLEESFLVEEDKKHERHPIFGNIVDEVAYHEKYPTIYHLRKKLVDSTDKADLRLIYLALAHMIKFRGHFLIEGDLNPDNSDVDKLFIQLVQTYNQLFEENPINASGVDAKAILSARLSKSRRLENLIAQLPGEKKNGLFGNLIALSLGLTPNFKSNFDLAEDAKLQLSKDTYDDDLDNLLAQIGDQYADLFLAAKNLSDAILLSDILRVNTEITKAPLSASMIKRYDEHHQDLTLLKALVRQQLPEKYKEIFFDQSKNGYAGYIDGGASQEEFYKFIKPILEKMDGTEELLVKLNREDLLRKQRTFDNGSIPHQIHLGELHAILRRQEDFYPFLKDNREKIEKILTFRIPYYVGPLARGNSRFAWMTRKSEETITPWNFEEVVDKGASAQSFIERMTNFDKNLPNEKVLPKHSLLYEYFTVYNELTKVKYVTEGMRKPAFLSGEQKKAIVDLLFKTNRKVTVKQLKEDYFKKIECFDSVEISGVEDRFNASLGTYHDLLKIIKDKDFLDNEENEDILEDIVLTLTLFEDREMIEERLKTYAHLFDDKVMKQLKRRRYTGWGRLSRKLINGIRDKQSGKTILDFLKSDGFANRNFMQLIHDDSLTFKEDIQKAQVSGQGDSLHEHIANLAGSPAIKKGILQTVKVVDELVKVMGRHKPENIVIEMARENQTTQKGQKNSRERMKRIEEGIKELGSQILKEHPVENTQLQNEKLYLYYLQNGRDMYVDQELDINRLSDYDVDHIVPQSFLKDDSIDNKVLTRSDKARGKSDNVPSEEVVKKMKNYWRQLLNAKLITQRKFDNLTKAERGGLSELDKAGFIKRQLVETRQITKHVAQILDSRMNTKYDENDKLIREVKVITLKSKLVSDFRKDFQFYKVREINNYHHAHDAYLNAVVGTALIKKYPKLESEFVYGDYKVYDVRKMIAKSEQEIGKATAKYFFYSNIMNFFKTEITLANGEIRKRPLIETNGETGEIVWDKGRDFATVRKVLSMPQVNIVKKTEVQTGGFSKESILPKRNSDKLIARKKDWDPKKYGGFDSPTVAYSVLVVAKVEKGKSKKLKSVKELLGITIMERSSFEKNPIDFLEAKGYKEVKKDLIIKLPKYSLFELENGRKRMLASAGELQKGNELALPSKYVNFLYLASHYEKLKGSPEDNEQKQLFVEQHKHYLDEIIEQISEFSKRVILADANLDKVLSAYNKHRDKPIREQAENIIHLFTLTNLGAPAAFKYFDTTIDRKRYTSTKEVLDATLIHQSITGLYETRIDLSQLGGDGGGSSPAPGGGGGLTAAIDILAPQQCAEPITWKSDEPVWVDQWPLTNDKLAAAQQLVQEQLEAGHITESSSPWNTPIFVIKKKSGKWRLLQDLRAVNATMVLMGALQPGLPSPVAPPQGYLKIIIDLKDCFFSIPLHPSDQKRFAFSLPSTNFKEPMQRFQWKVLPQGMANSPTLCQKYVATAIHKVRHAWKQMYIIHYMDDILIAGKDGQQVLQCFDQLKQELTAAGLHIAPEKVQLQDPYTYLGFELNGPKITNQKAVIRKDKLQTLNDFQKLLGDINWLRPYLKLTTGDLKPLFDTLKPDSDPNSHRSLSKEALASLEKVETAIAEQFVTHINYSLPLIFLIFNTALTPTGLFWQDNPIMWIHLPASPKKVLLPYYDAIADLIILGRDHSKKYFGIEPSTIIQPYSKSQIDWLMQNTEMWPIACASFVGILDNHYPPNKLIQFCKLHTFVFPQIISKTPLNNALLVFTDGSSTGMAAYTLTDTTIKFQTNLNSAQLVELQALIAVLSAFPNQPLNIYTDSAYLAHSIPLLETVAQIKHISETAKLFLQCQQLIYNRSIPFYIGHVRAHSGLPGPIAQGNQRADLATKIVASNINTAGKRTADGSEFEKRTADGSEFESPKKKAKVE

SEQ ID NO: 34 - protein, 2085 aa, synthetic construct
MPAAKRVKLDGGDKKYSIGLDIGTNSVGWAVITDEYKVPSKKFKVLGNTDRHSIKKNLIGALLFDSGETAEATRLKRTARRRYTRRKNRICYLQEIFSNEMAKVDDSFFHRLEESFLVEEDKKHERHPIFGNIVDEVAYHEKYPTIYHLRKKLVDSTDKADLRLIYLALAHMIKFRGHFLIEGDLNPDNSDVDKLFIQLVQTYNQLFEENPINASGVDAKAILSARLSKSRRLENLIAQLPGEKKNGLFGNLIALSLGLTPNFKSNFDLAEDAKLQLSKDTYDDDLDNLLAQIGDQYADLFLAAKNLSDAILLSDILRVNTEITKAPLSASMIKRYDEHHQDLTLLKALVRQQLPEKYKEIFFDQSKNGYAGYIDGGASQEEFYKFIKPILEKMDGTEELLVKLNREDLLRKQRTFDNGSIPHQIHLGELHAILRRQEDFYPFLKDNREKIEKILTFRIPYYVGPLARGNSRFAWMTRKSEETITPWNFEEVVDKGASAQSFIERMTNFDKNLPNEKVLPKHSLLYEYFTVYNELTKVKYVTEGMRKPAFLSGEQKKAIVDLLFKTNRKVTVKQLKEDYFKKIECFDSVEISGVEDRFNASLGTYHDLLKIIKDKDFLDNEENEDILEDIVLTLTLFEDREMIEERLKTYAHLFDDKVMKQLKRRRYTGWGRLSRKLINGIRDKQSGKTILDFLKSDGFANRNFMQLIHDDSLTFKEDIQKAQVSGQGDSLHEHIANLAGSPAIKKGILQTVKVVDELVKVMGRHKPENIVIEMARENQTTQKGQKNSRERMKRIEEGIKELGSQILKEHPVENTQLQNEKLYLYYLQNGRDMYVDQELDINRLSDYDVDHIVPQSFLKDDSIDNKVLTRSDKARGKSDNVPSEEVVKKMKNYWRQLLNAKLITQRKFDNLTKAERGGLSELDKAGFIKRQLVETRQITKHVAQILDSRMNTKYDENDKLIREVKVITLKSKLVSDFRKDFQFYKVREINNYHHAHDAYLNAVVGTALIKKYPKLESEFVYGDYKVYDVRKMIAKSEQEIGKATAKYFFYSNIMNFFKTEITLANGEIRKRPLIETNGETGEIVWDKGRDFATVRKVLSMPQVNIVKKTEVQTGGFSKESILPKRNSDKLIARKKDWDPKKYGGFDSPTVAYSVLVVAKVEKGKSKKLKSVKELLGITIMERSSFEKNPIDFLEAKGYKEVKKDLIIKLPKYSLFELENGRKRMLASAGELQKGNELALPSKYVNFLYLASHYEKLKGSPEDNEQKQLFVEQHKHYLDEIIEQISEFSKRVILADANLDKVLSAYNKHRDKPIREQAENIIHLFTLTNLGAPAAFKYFDTTIDRKRYTSTKEVLDATLIHQSITGLYETRIDLSQLGGDGGEAAAKGSSGGLDDEYRLYSPLVKPDQNIQFWLEQFPQAWAETAGMGLAKQVPPQVIQLKASATPVSVRQYPLSKEAQEGIRPHVQRLIQQGILVPVQSPWNTPLLPVRKPGTNDYRPVQDLREVNKRVQDIHPTVPNPYNLLCALPPQRSWYTVLDLKDAFFCLRLHPTSQPLFAFEWRDPGTGRTGQLTWTRLPQGFKNSPTIFNEALHRDLANFRIQHPQVTLLQYVDDLLLAGATKQDCLEGTKALLLELSDLGYRASAKKAQICRREVTYLGYSLRDGQRWLTEARKKTVVQIPAPTTAKQVREFLGKAGFCRLFIPGFATLAAPLYPLTKPKGEFSWAPEHQKAFDAIKKALLSAPALALPDVTKPFTLYVDERKGVARGVLTQTLGPWRRPVAYLSKKLDPVASGWPVCLKAIAAVAILVKDADKLTLGQNITVIAPHALENIVRQPPDRWMTNARMTHYQSLLLTERVTFAPPAALNPATLLPEETDEPVTHDCHQLLIEETGVRKDLTDIPLTGEVLTWFTDGSSYVVEGKRMAGAAVVDGTRTIWASSLPEGTSAQKAELMALTQALRLAEGKSINIYTDSRYAFATAHVHGAIYKQRGWLTSAGREIKNKEEILSLLEALHLPKRLAIIHCPGHQKAKDPISRGNQMADRVAKQAAQGVNLLPAGKRTADGSEFEKRTADGSEFESPKKKAKVE

SEQ ID NO: 35 - protein, 2088 aa, synthetic construct
MPAAKRVKLDGGDKKYSIGLDIGTNSVGWAVITDEYKVPSKKFKVLGNTDRHSIKKNLIGALLFDSGETAEATRLKRTARRRYTRRKNRICYLQEIFSNEMAKVDDSFFHRLEESFLVEEDKKHERHPIFGNIVDEVAYHEKYPTIYHLRKKLVDSTDKADLRLIYLALAHMIKFRGHFLIEGDLNPDNSDVDKLFIQLVQTYNQLFEENPINASGVDAKAILSARLSKSRRLENLIAQLPGEKKNGLFGNLIALSLGLTPNFKSNFDLAEDAKLQLSKDTYDDDLDNLLAQIGDQYADLFLAAKNLSDAILLSDILRVNTEITKAPLSASMIKRYDEHHQDLTLLKALVRQQLPEKYKEIFFDQSKNGYAGYIDGGASQEEFYKFIKPILEKMDGTEELLVKLNREDLLRKQRTFDNGSIPHQIHLGELHAILRRQEDFYPFLKDNREKIEKILTFRIPYYVGPLARGNSRFAWMTRKSEETITPWNFEEVVDKGASAQSFIERMTNFDKNLPNEKVLPKHSLLYEYFTVYNELTKVKYVTEGMRKPAFLSGEQKKAIVDLLFKTNRKVTVKQLKEDYFKKIECFDSVEISGVEDRFNASLGTYHDLLKIIKDKDFLDNEENEDILEDIVLTLTLFEDREMIEERLKTYAHLFDDKVMKQLKRRRYTGWGRLSRKLINGIRDKQSGKTILDFLKSDGFANRNFMQLIHDDSLTFKEDIQKAQVSGQGDSLHEHIANLAGSPAIKKGILQTVKVVDELVKVMGRHKPENIVIEMARENQTTQKGQKNSRERMKRIEEGIKELGSQILKEHPVENTQLQNEKLYLYYLQNGRDMYVDQELDINRLSDYDVDHIVPQSFLKDDSIDNKVLTRSDKARGKSDNVPSEEVVKKMKNYWRQLLNAKLITQRKFDNLTKAERGGLSELDKAGFIKRQLVETRQITKHVAQILDSRMNTKYDENDKLIREVKVITLKSKLVSDFRKDFQFYKVREINNYHHAHDAYLNAVVGTALIKKYPKLESEFVYGDYKVYDVRKMIAKSEQEIGKATAKYFFYSNIMNFFKTEITLANGEIRKRPLIETNGETGEIVWDKGRDFATVRKVLSMPQVNIVKKTEVQTGGFSKESILPKRNSDKLIARKKDWDPKKYGGFDSPTVAYSVLVVAKVEKGKSKKLKSVKELLGITIMERSSFEKNPIDFLEAKGYKEVKKDLIIKLPKYSLFELENGRKRMLASAGELQKGNELALPSKYVNFLYLASHYEKLKGSPEDNEQKQLFVEQHKHYLDEIIEQISEFSKRVILADANLDKVLSAYNKHRDKPIREQAENIIHLFTLTNLGAPAAFKYFDTTIDRKRYTSTKEVLDATLIHQSITGLYETRIDLSQLGGDGGEAAAKGGSPAPGGLDDEYRLYSPLVKPDQNIQFWLEQFPQAWAETAGMGLAKQVPPQVIQLKASATPVSVRQYPLSKEAQEGIRPHVQRLIQQGILVPVQSPWNTPLLPVRKPGTNDYRPVQDLREVNKRVQDIHPTVPNPYNLLCALPPQRSWYTVLDLKDAFFCLRLHPTSQPLFAFEWRDPGTGRTGQLTWTRLPQGFKNSPTIFNEALHRDLANFRIQHPQVTLLQYVDDLLLAGATKQDCLEGTKALLLELSDLGYRASAKKAQICRREVTYLGYSLRDGQRWLTEARKKTVVQIPAPTTAKQVREFLGKAGFCRLFIPGFATLAAPLYPLTKPKGEFSWAPEHQKAFDAIKKALLSAPALALPDVTKPFTLYVDERKGVARGVLTQTLGPWRRPVAYLSKKLDPVASGWPVCLKAIAAVAILVKDADKLTLGQNITVIAPHALENIVRQPPDRWMTNARMTHYQSLLLTERVTFAPPAALNPATLLPEETDEPVTHDCHQLLIEETGVRKDLTDIPLTGEVLTWFTDGSSYVVEGKRMAGAAVVDGTRTIWASSLPEGTSAQKAELMALTQALRLAEGKSINIYTDSRYAFATAHVHGAIYKQRGWLTSAGREIKNKEEILSLLEALHLPKRLAIIHCPGHQKAKDPISRGNQMADRVAKQAAQGVNLLPAGKRTADGSEFEKRTADGSEFESPKKKAKVE

SEQ ID NO: 36 - protein, 2123 aa, synthetic construct
MPAAKRVKLDGGDKKYSIGLDIGTNSVGWAVITDEYKVPSKKFKVLGNTDRHSIKKNLIGALLFDSGETAEATRLKRTARRRYTRRKNRICYLQEIFSNEMAKVDDSFFHRLEESFLVEEDKKHERHPIFGNIVDEVAYHEKYPTIYHLRKKLVDSTDKADLRLIYLALAHMIKFRGHFLIEGDLNPDNSDVDKLFIQLVQTYNQLFEENPINASGVDAKAILSARLSKSRRLENLIAQLPGEKKNGLFGNLIALSLGLTPNFKSNFDLAEDAKLQLSKDTYDDDLDNLLAQIGDQYADLFLAAKNLSDAILLSDILRVNTEITKAPLSASMIKRYDEHHQDLTLLKALVRQQLPEKYKEIFFDQSKNGYAGYIDGGASQEEFYKFIKPILEKMDGTEELLVKLNREDLLRKQRTFDNGSIPHQIHLGELHAILRRQEDFYPFLKDNREKIEKILTFRIPYYVGPLARGNSRFAWMTRKSEETITPWNFEEVVDKGASAQSFIERMTNFDKNLPNEKVLPKHSLLYEYFTVYNELTKVKYVTEGMRKPAFLSGEQKKAIVDLLFKTNRKVTVKQLKEDYFKKIECFDSVEISGVEDRFNASLGTYHDLLKIIKDKDFLDNEENEDILEDIVLTLTLFEDREMIEERLKTYAHLFDDKVMKQLKRRRYTGWGRLSRKLINGIRDKQSGKTILDFLKSDGFANRNFMQLIHDDSLTFKEDIQKAQVSGQGDSLHEHIANLAGSPAIKKGILQTVKVVDELVKVMGRHKPENIVIEMARENQTTQKGQKNSRERMKRIEEGIKELGSQILKEHPVENTQLQNEKLYLYYLQNGRDMYVDQELDINRLSDYDVDHIVPQSFLKDDSIDNKVLTRSDKARGKSDNVPSEEVVKKMKNYWRQLLNAKLITQRKFDNLTKAERGGLSELDKAGFIKRQLVETRQITKHVAQILDSRMNTKYDENDKLIREVKVITLKSKLVSDFRKDFQFYKVREINNYHHAHDAYLNAVVGTALIKKYPKLESEFVYGDYKVYDVRKMIAKSEQEIGKATAKYFFYSNIMNFFKTEITLANGEIRKRPLIETNGETGEIVWDKGRDFATVRKVLSMPQVNIVKKTEVQTGGFSKESILPKRNSDKLIARKKDWDPKKYGGFDSPTVAYSVLVVAKVEKGKSKKLKSVKELLGITIMERSSFEKNPIDFLEAKGYKEVKKDLIIKLPKYSLFELENGRKRMLASAGELQKGNELALPSKYVNFLYLASHYEKLKGSPEDNEQKQLFVEQHKHYLDEIIEQISEFSKRVILADANLDKVLSAYNKHRDKPIREQAENIIHLFTLTNLGAPAAFKYFDTTIDRKRYTSTKEVLDATLIHQSITGLYETRIDLSQLGGDGGAEAAAKEAAAKEAAAKEAAAKALEAEAAAKEAAAKEAAAKEAAAKAGGLDDEYRLYSPLVKPDQNIQFWLEQFPQAWAETAGMGLAKQVPPQVIQLKASATPVSVRQYPLSKEAQEGIRPHVQRLIQQGILVPVQSPWNTPLLPVRKPGTNDYRPVQDLREVNKRVQDIHPTVPNPYNLLCALPPQRSWYTVLDLKDAFFCLRLHPTSQPLFAFEWRDPGTGRTGQLTWTRLPQGFKNSPTIFNEALHRDLANFRIQHPQVTLLQYVDDLLLAGATKQDCLEGTKALLLELSDLGYRASAKKAQICRREVTYLGYSLRDGQRWLTEARKKTVVQIPAPTTAKQVREFLGKAGFCRLFIPGFATLAAPLYPLTKPKGEFSWAPEHQKAFDAIKKALLSAPALALPDVTKPFTLYVDERKGVARGVLTQTLGPWRRPVAYLSKKLDPVASGWPVCLKAIAAVAILVKDADKLTLGQNITVIAPHALENIVRQPPDRWMTNARMTHYQSLLLTERVTFAPPAALNPATLLPEETDEPVTHDCHQLLIEETGVRKDLTDIPLTGEVLTWFTDGSSYVVEGKRMAGAAVVDGTRTIWASSLPEGTSAQKAELMALTQALRLAEGKSINIYTDSRYAFATAHVHGAIYKQRGWLTSAGREIKNKEEILSLLEALHLPKRLAIIHCPGHQKAKDPISRGNQMADRVAKQAAQGVNLLPAGKRTADGSEFEKRTADGSEFESPKKKAKVE

SEQ ID NO: 37 - protein, 2092 aa, synthetic construct
MPAAKRVKLDGGDKKYSIGLDIGTNSVGWAVITDEYKVPSKKFKVLGNTDRHSIKKNLIGALLFDSGETAEATRLKRTARRRYTRRKNRICYLQEIFSNEMAKVDDSFFHRLEESFLVEEDKKHERHPIFGNIVDEVAYHEKYPTIYHLRKKLVDSTDKADLRLIYLALAHMIKFRGHFLIEGDLNPDNSDVDKLFIQLVQTYNQLFEENPINASGVDAKAILSARLSKSRRLENLIAQLPGEKKNGLFGNLIALSLGLTPNFKSNFDLAEDAKLQLSKDTYDDDLDNLLAQIGDQYADLFLAAKNLSDAILLSDILRVNTEITKAPLSASMIKRYDEHHQDLTLLKALVRQQLPEKYKEIFFDQSKNGYAGYIDGGASQEEFYKFIKPILEKMDGTEELLVKLNREDLLRKQRTFDNGSIPHQIHLGELHAILRRQEDFYPFLKDNREKIEKILTFRIPYYVGPLARGNSRFAWMTRKSEETITPWNFEEVVDKGASAQSFIERMTNFDKNLPNEKVLPKHSLLYEYFTVYNELTKVKYVTEGMRKPAFLSGEQKKAIVDLLFKTNRKVTVKQLKEDYFKKIECFDSVEISGVEDRFNASLGTYHDLLKIIKDKDFLDNEENEDILEDIVLTLTLFEDREMIEERLKTYAHLFDDKVMKQLKRRRYTGWGRLSRKLINGIRDKQSGKTILDFLKSDGFANRNFMQLIHDDSLTFKEDIQKAQVSGQGDSLHEHIANLAGSPAIKKGILQTVKVVDELVKVMGRHKPENIVIEMARENQTTQKGQKNSRERMKRIEEGIKELGSQILKEHPVENTQLQNEKLYLYYLQNGRDMYVDQELDINRLSDYDVDHIVPQSFLKDDSIDNKVLTRSDKARGKSDNVPSEEVVKKMKNYWRQLLNAKLITQRKFDNLTKAERGGLSELDKAGFIKRQLVETRQITKHVAQILDSRMNTKYDENDKLIREVKVITLKSKLVSDFRKDFQFYKVREINNYHHAHDAYLNAVVGTALIKKYPKLESEFVYGDYKVYDVRKMIAKSEQEIGKATAKYFFYSNIMNFFKTEITLANGEIRKRPLIETNGETGEIVWDKGRDFATVRKVLSMPQVNIVKKTEVQTGGFSKESILPKRNSDKLIARKKDWDPKKYGGFDSPTVAYSVLVVAKVEKGKSKKLKSVKELLGITIMERSSFEKNPIDFLEAKGYKEVKKDLIIKLPKYSLFELENGRKRMLASAGELQKGNELALPSKYVNFLYLASHYEKLKGSPEDNEQKQLFVEQHKHYLDEIIEQISEFSKRVILADANLDKVLSAYNKHRDKPIREQAENIIHLFTLTNLGAPAAFKYFDTTIDRKRYTSTKEVLDATLIHQSITGLYETRIDLSQLGGDGGEAAAKEAAAKEAAAKGGLDDEYRLYSPLVKPDQNIQFWLEQFPQAWAETAGMGLAKQVPPQVIQLKASATPVSVRQYPLSKEAQEGIRPHVQRLIQQGILVPVQSPWNTPLLPVRKPGTNDYRPVQDLREVNKRVQDIHPTVPNPYNLLCALPPQRSWYTVLDLKDAFFCLRLHPTSQPLFAFEWRDPGTGRTGQLTWTRLPQGFKNSPTIFNEALHRDLANFRIQHPQVTLLQYVDDLLLAGATKQDCLEGTKALLLELSDLGYRASAKKAQICRREVTYLGYSLRDGQRWLTEARKKTVVQIPAPTTAKQVREFLGKAGFCRLFIPGFATLAAPLYPLTKPKGEFSWAPEHQKAFDAIKKALLSAPALALPDVTKPFTLYVDERKGVARGVLTQTLGPWRRPVAYLSKKLDPVASGWPVCLKAIAAVAILVKDADKLTLGQNITVIAPHALENIVRQPPDRWMTNARMTHYQSLLLTERVTFAPPAALNPATLLPEETDEPVTHDCHQLLIEETGVRKDLTDIPLTGEVLTWFTDGSSYVVEGKRMAGAAVVDGTRTIWASSLPEGTSAQKAELMALTQALRLAEGKSINIYTDSRYAFATAHVHGAIYKQRGWLTSAGREIKNKEEILSLLEALHLPKRLAIIHCPGHQKAKDPISRGNQMADRVAKQAAQGVNLLPAGKRTADGSEFEKRTADGSEFESPKKKAKVE

SEQ ID NO: 38 - protein, 2086 aa, synthetic construct
MPAAKRVKLDGGDKKYSIGLDIGTNSVGWAVITDEYKVPSKKFKVLGNTDRHSIKKNLIGALLFDSGETAEATRLKRTARRRYTRRKNRICYLQEIFSNEMAKVDDSFFHRLEESFLVEEDKKHERHPIFGNIVDEVAYHEKYPTIYHLRKKLVDSTDKADLRLIYLALAHMIKFRGHFLIEGDLNPDNSDVDKLFIQLVQTYNQLFEENPINASGVDAKAILSARLSKSRRLENLIAQLPGEKKNGLFGNLIALSLGLTPNFKSNFDLAEDAKLQLSKDTYDDDLDNLLAQIGDQYADLFLAAKNLSDAILLSDILRVNTEITKAPLSASMIKRYDEHHQDLTLLKALVRQQLPEKYKEIFFDQSKNGYAGYIDGGASQEEFYKFIKPILEKMDGTEELLVKLNREDLLRKQRTFDNGSIPHQIHLGELHAILRRQEDFYPFLKDNREKIEKILTFRIPYYVGPLARGNSRFAWMTRKSEETITPWNFEEVVDKGASAQSFIERMTNFDKNLPNEKVLPKHSLLYEYFTVYNELTKVKYVTEGMRKPAFLSGEQKKAIVDLLFKTNRKVTVKQLKEDYFKKIECFDSVEISGVEDRFNASLGTYHDLLKIIKDKDFLDNEENEDILEDIVLTLTLFEDREMIEERLKTYAHLFDDKVMKQLKRRRYTGWGRLSRKLINGIRDKQSGKTILDFLKSDGFANRNFMQLIHDDSLTFKEDIQKAQVSGQGDSLHEHIANLAGSPAIKKGILQTVKVVDELVKVMGRHKPENIVIEMARENQTTQKGQKNSRERMKRIEEGIKELGSQILKEHPVENTQLQNEKLYLYYLQNGRDMYVDQELDINRLSDYDVDHIVPQSFLKDDSIDNKVLTRSDKARGKSDNVPSEEVVKKMKNYWRQLLNAKLITQRKFDNLTKAERGGLSELDKAGFIKRQLVETRQITKHVAQILDSRMNTKYDENDKLIREVKVITLKSKLVSDFRKDFQFYKVREINNYHHAHDAYLNAVVGTALIKKYPKLESEFVYGDYKVYDVRKMIAKSEQEIGKATAKYFFYSNIMNFFKTEITLANGEIRKRPLIETNGETGEIVWDKGRDFATVRKVLSMPQVNIVKKTEVQTGGFSKESILPKRNSDKLIARKKDWDPKKYGGFDSPTVAYSVLVVAKVEKGKSKKLKSVKELLGITIMERSSFEKNPIDFLEAKGYKEVKKDLIIKLPKYSLFELENGRKRMLASAGELQKGNELALPSKYVNFLYLASHYEKLKGSPEDNEQKQLFVEQHKHYLDEIIEQISEFSKRVILADANLDKVLSAYNKHRDKPIREQAENIIHLFTLTNLGAPAAFKYFDTTIDRKRYTSTKEVLDATLIHQSITGLYETRIDLSQLGGDGGGGSGSSPAPGGLDDEYRLYSPLVKPDQNIQFWLEQFPQAWAETAGMGLAKQVPPQVIQLKASATPVSVRQYPLSKEAQEGIRPHVQRLIQQGILVPVQSPWNTPLLPVRKPGTNDYRPVQDLREVNKRVQDIHPTVPNPYNLLCALPPQRSWYTVLDLKDAFFCLRLHPTSQPLFAFEWRDPGTGRTGQLTWTRLPQGFKNSPTIFNEALHRDLANFRIQHPQVTLLQYVDDLLLAGATKQDCLEGTKALLLELSDLGYRASAKKAQICRREVTYLGYSLRDGQRWLTEARKKTVVQIPAPTTAKQVREFLGKAGFCRLFIPGFATLAAPLYPLTKPKGEFSWAPEHQKAFDAIKKALLSAPALALPDVTKPFTLYVDERKGVARGVLTQTLGPWRRPVAYLSKKLDPVASGWPVCLKAIAAVAILVKDADKLTLGQNITVIAPHALENIVRQPPDRWMTNARMTHYQSLLLTERVTFAPPAALNPATLLPEETDEPVTHDCHQLLIEETGVRKDLTDIPLTGEVLTWFTDGSSYVVEGKRMAGAAVVDGTRTIWASSLPEGTSAQKAELMALTQALRLAEGKSINIYTDSRYAFATAHVHGAIYKQRGWLTSAGREIKNKEEILSLLEALHLPKRLAIIHCPGHQKAKDPISRGNQMADRVAKQAAQGVNLLPAGKRTADGSEFEKRTADGSEFESPKKKAKVE

SEQ ID NO: 39 - protein, 2102 aa, synthetic construct
MPAAKRVKLDGGDKKYSIGLDIGTNSVGWAVITDEYKVPSKKFKVLGNTDRHSIKKNLIGALLFDSGETAEATRLKRTARRRYTRRKNRICYLQEIFSNEMAKVDDSFFHRLEESFLVEEDKKHERHPIFGNIVDEVAYHEKYPTIYHLRKKLVDSTDKADLRLIYLALAHMIKFRGHFLIEGDLNPDNSDVDKLFIQLVQTYNQLFEENPINASGVDAKAILSARLSKSRRLENLIAQLPGEKKNGLFGNLIALSLGLTPNFKSNFDLAEDAKLQLSKDTYDDDLDNLLAQIGDQYADLFLAAKNLSDAILLSDILRVNTEITKAPLSASMIKRYDEHHQDLTLLKALVRQQLPEKYKEIFFDQSKNGYAGYIDGGASQEEFYKFIKPILEKMDGTEELLVKLNREDLLRKQRTFDNGSIPHQIHLGELHAILRRQEDFYPFLKDNREKIEKILTFRIPYYVGPLARGNSRFAWMTRKSEETITPWNFEEVVDKGASAQSFIERMTNFDKNLPNEKVLPKHSLLYEYFTVYNELTKVKYVTEGMRKPAFLSGEQKKAIVDLLFKTNRKVTVKQLKEDYFKKIECFDSVEISGVEDRFNASLGTYHDLLKIIKDKDFLDNEENEDILEDIVLTLTLFEDREMIEERLKTYAHLFDDKVMKQLKRRRYTGWGRLSRKLINGIRDKQSGKTILDFLKSDGFANRNFMQLIHDDSLTFKEDIQKAQVSGQGDSLHEHIANLAGSPAIKKGILQTVKVVDELVKVMGRHKPENIVIEMARENQTTQKGQKNSRERMKRIEEGIKELGSQILKEHPVENTQLQNEKLYLYYLQNGRDMYVDQELDINRLSDYDVDHIVPQSFLKDDSIDNKVLTRSDKARGKSDNVPSEEVVKKMKNYWRQLLNAKLITQRKFDNLTKAERGGLSELDKAGFIKRQLVETRQITKHVAQILDSRMNTKYDENDKLIREVKVITLKSKLVSDFRKDFQFYKVREINNYHHAHDAYLNAVVGTALIKKYPKLESEFVYGDYKVYDVRKMIAKSEQEIGKATAKYFFYSNIMNFFKTEITLANGEIRKRPLIETNGETGEIVWDKGRDFATVRKVLSMPQVNIVKKTEVQTGGFSKESILPKRNSDKLIARKKDWDPKKYGGFDSPTVAYSVLVVAKVEKGKSKKLKSVKELLGITIMERSSFEKNPIDFLEAKGYKEVKKDLIIKLPKYSLFELENGRKRMLASAGELQKGNELALPSKYVNFLYLASHYEKLKGSPEDNEQKQLFVEQHKHYLDEIIEQISEFSKRVILADANLDKVLSAYNKHRDKPIREQAENIIHLFTLTNLGAPAAFKYFDTTIDRKRYTSTKEVLDATLIHQSITGLYETRIDLSQLGGDGGEAAAKEAAAKEAAAKEAAAKEAAAKGGLDDEYRLYSPLVKPDQNIQFWLEQFPQAWAETAGMGLAKQVPPQVIQLKASATPVSVRQYPLSKEAQEGIRPHVQRLIQQGILVPVQSPWNTPLLPVRKPGTNDYRPVQDLREVNKRVQDIHPTVPNPYNLLCALPPQRSWYTVLDLKDAFFCLRLHPTSQPLFAFEWRDPGTGRTGQLTWTRLPQGFKNSPTIFNEALHRDLANFRIQHPQVTLLQYVDDLLLAGATKQDCLEGTKALLLELSDLGYRASAKKAQICRREVTYLGYSLRDGQRWLTEARKKTVVQIPAPTTAKQVREFLGKAGFCRLFIPGFATLAAPLYPLTKPKGEFSWAPEHQKAFDAIKKALLSAPALALPDVTKPFTLYVDERKGVARGVLTQTLGPWRRPVAYLSKKLDPVASGWPVCLKAIAAVAILVKDADKLTLGQNITVIAPHALENIVRQPPDRWMTNARMTHYQSLLLTERVTFAPPAALNPATLLPEETDEPVTHDCHQLLIEETGVRKDLTDIPLTGEVLTWFTDGSSYVVEGKRMAGAAVVDGTRTIWASSLPEGTSAQKAELMALTQALRLAEGKSINIYTDSRYAFATAHVHGAIYKQRGWLTSAGREIKNKEEILSLLEALHLPKRLAIIHCPGHQKAKDPISRGNQMADRVAKQAAQGVNLLPAGKRTADGSEFEKRTADGSEFESPKKKAKVE

SEQ ID NO: 40 - protein, 2088 aa, synthetic construct
MPAAKRVKLDGGDKKYSIGLDIGTNSVGWAVITDEYKVPSKKFKVLGNTDRHSIKKNLIGALLFDSGETAEATRLKRTARRRYTRRKNRICYLQEIFSNEMAKVDDSFFHRLEESFLVEEDKKHERHPIFGNIVDEVAYHEKYPTIYHLRKKLVDSTDKADLRLIYLALAHMIKFRGHFLIEGDLNPDNSDVDKLFIQLVQTYNQLFEENPINASGVDAKAILSARLSKSRRLENLIAQLPGEKKNGLFGNLIALSLGLTPNFKSNFDLAEDAKLQLSKDTYDDDLDNLLAQIGDQYADLFLAAKNLSDAILLSDILRVNTEITKAPLSASMIKRYDEHHQDLTLLKALVRQQLPEKYKEIFFDQSKNGYAGYIDGGASQEEFYKFIKPILEKMDGTEELLVKLNREDLLRKQRTFDNGSIPHQIHLGELHAILRRQEDFYPFLKDNREKIEKILTFRIPYYVGPLARGNSRFAWMTRKSEETITPWNFEEVVDKGASAQSFIERMTNFDKNLPNEKVLPKHSLLYEYFTVYNELTKVKYVTEGMRKPAFLSGEQKKAIVDLLFKTNRKVTVKQLKEDYFKKIECFDSVEISGVEDRFNASLGTYHDLLKIIKDKDFLDNEENEDILEDIVLTLTLFEDREMIEERLKTYAHLFDDKVMKQLKRRRYTGWGRLSRKLINGIRDKQSGKTILDFLKSDGFANRNFMQLIHDDSLTFKEDIQKAQVSGQGDSLHEHIANLAGSPAIKKGILQTVKVVDELVKVMGRHKPENIVIEMARENQTTQKGQKNSRERMKRIEEGIKELGSQILKEHPVENTQLQNEKLYLYYLQNGRDMYVDQELDINRLSDYDVDHIVPQSFLKDDSIDNKVLTRSDKARGKSDNVPSEEVVKKMKNYWRQLLNAKLITQRKFDNLTKAERGGLSELDKAGFIKRQLVETRQITKHVAQILDSRMNTKYDENDKLIREVKVITLKSKLVSDFRKDFQFYKVREINNYHHAHDAYLNAVVGTALIKKYPKLESEFVYGDYKVYDVRKMIAKSEQEIGKATAKYFFYSNIMNFFKTEITLANGEIRKRPLIETNGETGEIVWDKGRDFATVRKVLSMPQVNIVKKTEVQTGGFSKESILPKRNSDKLIARKKDWDPKKYGGFDSPTVAYSVLVVAKVEKGKSKKLKSVKELLGITIMERSSFEKNPIDFLEAKGYKEVKKDLIIKLPKYSLFELENGRKRMLASAGELQKGNELALPSKYVNFLYLASHYEKLKGSPEDNEQKQLFVEQHKHYLDEIIEQISEFSKRVILADANLDKVLSAYNKHRDKPIREQAENIIHLFTLTNLGAPAAFKYFDTTIDRKRYTSTKEVLDATLIHQSITGLYETRIDLSQLGGDGGGSSGGGEAAAKGGLDDEYRLYSPLVKPDQNIQFWLEQFPQAWAETAGMGLAKQVPPQVIQLKASATPVSVRQYPLSKEAQEGIRPHVQRLIQQGILVPVQSPWNTPLLPVRKPGTNDYRPVQDLREVNKRVQDIHPTVPNPYNLLCALPPQRSWYTVLDLKDAFFCLRLHPTSQPLFAFEWRDPGTGRTGQLTWTRLPQGFKNSPTIFNEALHRDLANFRIQHPQVTLLQYVDDLLLAGATKQDCLEGTKALLLELSDLGYRASAKKAQICRREVTYLGYSLRDGQRWLTEARKKTVVQIPAPTTAKQVREFLGKAGFCRLFIPGFATLAAPLYPLTKPKGEFSWAPEHQKAFDAIKKALLSAPALALPDVTKPFTLYVDERKGVARGVLTQTLGPWRRPVAYLSKKLDPVASGWPVCLKAIAAVAILVKDADKLTLGQNITVIAPHALENIVRQPPDRWMTNARMTHYQSLLLTERVTFAPPAALNPATLLPEETDEPVTHDCHQLLIEETGVRKDLTDIPLTGEVLTWFTDGSSYVVEGKRMAGAAVVDGTRTIWASSLPEGTSAQKAELMALTQALRLAEGKSINIYTDSRYAFATAHVHGAIYKQRGWLTSAGREIKNKEEILSLLEALHLPKRLAIIHCPGHQKAKDPISRGNQMADRVAKQAAQGVNLLPAGKRTADGSEFEKRTADGSEFESPKKKAKVE

SEQ ID NO: 41 - protein, 2089 aa, synthetic construct
MPAAKRVKLDGGDKKYSIGLDIGTNSVGWAVITDEYKVPSKKFKVLGNTDRHSIKKNLIGALLFDSGETAEATRLKRTARRRYTRRKNRICYLQEIFSNEMAKVDDSFFHRLEESFLVEEDKKHERHPIFGNIVDEVAYHEKYPTIYHLRKKLVDSTDKADLRLIYLALAHMIKFRGHFLIEGDLNPDNSDVDKLFIQLVQTYNQLFEENPINASGVDAKAILSARLSKSRRLENLIAQLPGEKKNGLFGNLIALSLGLTPNFKSNFDLAEDAKLQLSKDTYDDDLDNLLAQIGDQYADLFLAAKNLSDAILLSDILRVNTEITKAPLSASMIKRYDEHHQDLTLLKALVRQQLPEKYKEIFFDQSKNGYAGYIDGGASQEEFYKFIKPILEKMDGTEELLVKLNREDLLRKQRTFDNGSIPHQIHLGELHAILRRQEDFYPFLKDNREKIEKILTFRIPYYVGPLARGNSRFAWMTRKSEETITPWNFEEVVDKGASAQSFIERMTNFDKNLPNEKVLPKHSLLYEYFTVYNELTKVKYVTEGMRKPAFLSGEQKKAIVDLLFKTNRKVTVKQLKEDYFKKIECFDSVEISGVEDRFNASLGTYHDLLKIIKDKDFLDNEENEDILEDIVLTLTLFEDREMIEERLKTYAHLFDDKVMKQLKRRRYTGWGRLSRKLINGIRDKQSGKTILDFLKSDGFANRNFMQLIHDDSLTFKEDIQKAQVSGQGDSLHEHIANLAGSPAIKKGILQTVKVVDELVKVMGRHKPENIVIEMARENQTTQKGQKNSRERMKRIEEGIKELGSQILKEHPVENTQLQNEKLYLYYLQNGRDMYVDQELDINRLSDYDVDHIVPQSFLKDDSIDNKVLTRSDKARGKSDNVPSEEVVKKMKNYWRQLLNAKLITQRKFDNLTKAERGGLSELDKAGFIKRQLVETRQITKHVAQILDSRMNTKYDENDKLIREVKVITLKSKLVSDFRKDFQFYKVREINNYHHAHDAYLNAVVGTALIKKYPKLESEFVYGDYKVYDVRKMIAKSEQEIGKATAKYFFYSNIMNFFKTEITLANGEIRKRPLIETNGETGEIVWDKGRDFATVRKVLSMPQVNIVKKTEVQTGGFSKESILPKRNSDKLIARKKDWDPKKYGGFDSPTVAYSVLVVAKVEKGKSKKLKSVKELLGITIMERSSFEKNPIDFLEAKGYKEVKKDLIIKLPKYSLFELENGRKRMLASAGELQKGNELALPSKYVNFLYLASHYEKLKGSPEDNEQKQLFVEQHKHYLDEIIEQISEFSKRVILADANLDKVLSAYNKHRDKPIREQAENIIHLFTLTNLGAPAAFKYFDTTIDRKRYTSTKEVLDATLIHQSITGLYETRIDLSQLGGDGGGSSGSSGSSGSSGGLDDEYRLYSPLVKPDQNIQFWLEQFPQAWAETAGMGLAKQVPPQVIQLKASATPVSVRQYPLSKEAQEGIRPHVQRLIQQGILVPVQSPWNTPLLPVRKPGTNDYRPVQDLREVNKRVQDIHPTVPNPYNLLCALPPQRSWYTVLDLKDAFFCLRLHPTSQPLFAFEWRDPGTGRTGQLTWTRLPQGFKNSPTIFNEALHRDLANFRIQHPQVTLLQYVDDLLLAGATKQDCLEGTKALLLELSDLGYRASAKKAQICRREVTYLGYSLRDGQRWLTEARKKTVVQIPAPTTAKQVREFLGKAGFCRLFIPGFATLAAPLYPLTKPKGEFSWAPEHQKAFDAIKKALLSAPALALPDVTKPFTLYVDERKGVARGVLTQTLGPWRRPVAYLSKKLDPVASGWPVCLKAIAAVAILVKDADKLTLGQNITVIAPHALENIVRQPPDRWMTNARMTHYQSLLLTERVTFAPPAALNPATLLPEETDEPVTHDCHQLLIEETGVRKDLTDIPLTGEVLTWFTDGSSYVVEGKRMAGAAVVDGTRTIWASSLPEGTSAQKAELMALTQALRLAEGKSINIYTDSRYAFATAHVHGAIYKQRGWLTSAGREIKNKEEILSLLEALHLPKRLAIIHCPGHQKAKDPISRGNQMADRVAKQAAQGVNLLPAGKRTADGSEFEKRTADGSEFESPKKKAKVE

SEQ ID NO: 42 - protein, 2088 aa, synthetic construct
MPAAKRVKLDGGDKKYSIGLDIGTNSVGWAVITDEYKVPSKKFKVLGNTDRHSIKKNLIGALLFDSGETAEATRLKRTARRRYTRRKNRICYLQEIFSNEMAKVDDSFFHRLEESFLVEEDKKHERHPIFGNIVDEVAYHEKYPTIYHLRKKLVDSTDKADLRLIYLALAHMIKFRGHFLIEGDLNPDNSDVDKLFIQLVQTYNQLFEENPINASGVDAKAILSARLSKSRRLENLIAQLPGEKKNGLFGNLIALSLGLTPNFKSNFDLAEDAKLQLSKDTYDDDLDNLLAQIGDQYADLFLAAKNLSDAILLSDILRVNTEITKAPLSASMIKRYDEHHQDLTLLKALVRQQLPEKYKEIFFDQSKNGYAGYIDGGASQEEFYKFIKPILEKMDGTEELLVKLNREDLLRKQRTFDNGSIPHQIHLGELHAILRRQEDFYPFLKDNREKIEKILTFRIPYYVGPLARGNSRFAWMTRKSEETITPWNFEEVVDKGASAQSFIERMTNFDKNLPNEKVLPKHSLLYEYFTVYNELTKVKYVTEGMRKPAFLSGEQKKAIVDLLFKTNRKVTVKQLKEDYFKKIECFDSVEISGVEDRFNASLGTYHDLLKIIKDKDFLDNEENEDILEDIVLTLTLFEDREMIEERLKTYAHLFDDKVMKQLKRRRYTGWGRLSRKLINGIRDKQSGKTILDFLKSDGFANRNFMQLIHDDSLTFKEDIQKAQVSGQGDSLHEHIANLAGSPAIKKGILQTVKVVDELVKVMGRHKPENIVIEMARENQTTQKGQKNSRERMKRIEEGIKELGSQILKEHPVENTQLQNEKLYLYYLQNGRDMYVDQELDINRLSDYDVDHIVPQSFLKDDSIDNKVLTRSDKARGKSDNVPSEEVVKKMKNYWRQLLNAKLITQRKFDNLTKAERGGLSELDKAGFIKRQLVETRQITKHVAQILDSRMNTKYDENDKLIREVKVITLKSKLVSDFRKDFQFYKVREINNYHHAHDAYLNAVVGTALIKKYPKLESEFVYGDYKVYDVRKMIAKSEQEIGKATAKYFFYSNIMNFFKTEITLANGEIRKRPLIETNGETGEIVWDKGRDFATVRKVLSMPQVNIVKKTEVQTGGFSKESILPKRNSDKLIARKKDWDPKKYGGFDSPTVAYSVLVVAKVEKGKSKKLKSVKELLGITIMERSSFEKNPIDFLEAKGYKEVKKDLIIKLPKYSLFELENGRKRMLASAGELQKGNELALPSKYVNFLYLASHYEKLKGSPEDNEQKQLFVEQHKHYLDEIIEQISEFSKRVILADANLDKVLSAYNKHRDKPIREQAENIIHLFTLTNLGAPAAFKYFDTTIDRKRYTSTKEVLDATLIHQSITGLYETRIDLSQLGGDGGGSSEAAAKGGGGGLDDEYRLYSPLVKPDQNIQFWLEQFPQAWAETAGMGLAKQVPPQVIQLKASATPVSVRQYPLSKEAQEGIRPHVQRLIQQGILVPVQSPWNTPLLPVRKPGTNDYRPVQDLREVNKRVQDIHPTVPNPYNLLCALPPQRSWYTVLDLKDAFFCLRLHPTSQPLFAFEWRDPGTGRTGQLTWTRLPQGFKNSPTIFNEALHRDLANFRIQHPQVTLLQYVDDLLLAGATKQDCLEGTKALLLELSDLGYRASAKKAQICRREVTYLGYSLRDGQRWLTEARKKTVVQIPAPTTAKQVREFLGKAGFCRLFIPGFATLAAPLYPLTKPKGEFSWAPEHQKAFDAIKKALLSAPALALPDVTKPFTLYVDERKGVARGVLTQTLGPWRRPVAYLSKKLDPVASGWPVCLKAIAAVAILVKDADKLTLGQNITVIAPHALENIVRQPPDRWMTNARMTHYQSLLLTERVTFAPPAALNPATLLPEETDEPVTHDCHQLLIEETGVRKDLTDIPLTGEVLTWFTDGSSYVVEGKRMAGAAVVDGTRTIWASSLPEGTSAQKAELMALTQALRLAEGKSINIYTDSRYAFATAHVHGAIYKQRGWLTSAGREIKNKEEILSLLEALHLPKRLAIIHCPGHQKAKDPISRGNQMADRVAKQAAQGVNLLPAGKRTADGSEFEKRTADGSEFESPKKKAKVE

SEQ ID NO: 43 - protein, 2086 aa, synthetic construct
MPAAKRVKLDGGDKKYSIGLDIGTNSVGWAVITDEYKVPSKKFKVLGNTDRHSIKKNLIGALLFDSGETAEATRLKRTARRRYTRRKNRICYLQEIFSNEMAKVDDSFFHRLEESFLVEEDKKHERHPIFGNIVDEVAYHEKYPTIYHLRKKLVDSTDKADLRLIYLALAHMIKFRGHFLIEGDLNPDNSDVDKLFIQLVQTYNQLFEENPINASGVDAKAILSARLSKSRRLENLIAQLPGEKKNGLFGNLIALSLGLTPNFKSNFDLAEDAKLQLSKDTYDDDLDNLLAQIGDQYADLFLAAKNLSDAILLSDILRVNTEITKAPLSASMIKRYDEHHQDLTLLKALVRQQLPEKYKEIFFDQSKNGYAGYIDGGASQEEFYKFIKPILEKMDGTEELLVKLNREDLLRKQRTFDNGSIPHQIHLGELHAILRRQEDFYPFLKDNREKIEKILTFRIPYYVGPLARGNSRFAWMTRKSEETITPWNFEEVVDKGASAQSFIERMTNFDKNLPNEKVLPKHSLLYEYFTVYNELTKVKYVTEGMRKPAFLSGEQKKAIVDLLFKTNRKVTVKQLKEDYFKKIECFDSVEISGVEDRFNASLGTYHDLLKIIKDKDFLDNEENEDILEDIVLTLTLFEDREMIEERLKTYAHLFDDKVMKQLKRRRYTGWGRLSRKLINGIRDKQSGKTILDFLKSDGFANRNFMQLIHDDSLTFKEDIQKAQVSGQGDSLHEHIANLAGSPAIKKGILQTVKVVDELVKVMGRHKPENIVIEMARENQTTQKGQKNSRERMKRIEEGIKELGSQILKEHPVENTQLQNEKLYLYYLQNGRDMYVDQELDINRLSDYDVDHIVPQSFLKDDSIDNKVLTRSDKARGKSDNVPSEEVVKKMKNYWRQLLNAKLITQRKFDNLTKAERGGLSELDKAGFIKRQLVETRQITKHVAQILDSRMNTKYDENDKLIREVKVITLKSKLVSDFRKDFQFYKVREINNYHHAHDAYLNAVVGTALIKKYPKLESEFVYGDYKVYDVRKMIAKSEQEIGKATAKYFFYSNIMNFFKTEITLANGEIRKRPLIETNGETGEIVWDKGRDFATVRKVLSMPQVNIVKKTEVQTGGFSKESILPKRNSDKLIARKKDWDPKKYGGFDSPTVAYSVLVVAKVEKGKSKKLKSVKELLGITIMERSSFEKNPIDFLEAKGYKEVKKDLIIKLPKYSLFELENGRKRMLASAGELQKGNELALPSKYVNFLYLASHYEKLKGSPEDNEQKQLFVEQHKHYLDEIIEQISEFSKRVILADANLDKVLSAYNKHRDKPIREQAENIIHLFTLTNLGAPAAFKYFDTTIDRKRYTSTKEVLDATLIHQSITGLYETRIDLSQLGGDGGGGGGSSPAPGGLDDEYRLYSPLVKPDQNIQFWLEQFPQAWAETAGMGLAKQVPPQVIQLKASATPVSVRQYPLSKEAQEGIRPHVQRLIQQGILVPVQSPWNTPLLPVRKPGTNDYRPVQDLREVNKRVQDIHPTVPNPYNLLCALPPQRSWYTVLDLKDAFFCLRLHPTSQPLFAFEWRDPGTGRTGQLTWTRLPQGFKNSPTIFNEALHRDLANFRIQHPQVTLLQYVDDLLLAGATKQDCLEGTKALLLELSDLGYRASAKKAQICRREVTYLGYSLRDGQRWLTEARKKTVVQIPAPTTAKQVREFLGKAGFCRLFIPGFATLAAPLYPLTKPKGEFSWAPEHQKAFDAIKKALLSAPALALPDVTKPFTLYVDERKGVARGVLTQTLGPWRRPVAYLSKKLDPVASGWPVCLKAIAAVAILVKDADKLTLGQNITVIAPHALENIVRQPPDRWMTNARMTHYQSLLLTERVTFAPPAALNPATLLPEETDEPVTHDCHQLLIEETGVRKDLTDIPLTGEVLTWFTDGSSYVVEGKRMAGAAVVDGTRTIWASSLPEGTSAQKAELMALTQALRLAEGKSINIYTDSRYAFATAHVHGAIYKQRGWLTSAGREIKNKEEILSLLEALHLPKRLAIIHCPGHQKAKDPISRGNQMADRVAKQAAQGVNLLPAGKRTADGSEFEKRTADGSEFESPKKKAKVE

SEQ ID NO: 44 - protein, 2086 aa, synthetic construct
MPAAKRVKLDGGDKKYSIGLDIGTNSVGWAVITDEYKVPSKKFKVLGNTDRHSIKKNLIGALLFDSGETAEATRLKRTARRRYTRRKNRICYLQEIFSNEMAKVDDSFFHRLEESFLVEEDKKHERHPIFGNIVDEVAYHEKYPTIYHLRKKLVDSTDKADLRLIYLALAHMIKFRGHFLIEGDLNPDNSDVDKLFIQLVQTYNQLFEENPINASGVDAKAILSARLSKSRRLENLIAQLPGEKKNGLFGNLIALSLGLTPNFKSNFDLAEDAKLQLSKDTYDDDLDNLLAQIGDQYADLFLAAKNLSDAILLSDILRVNTEITKAPLSASMIKRYDEHHQDLTLLKALVRQQLPEKYKEIFFDQSKNGYAGYIDGGASQEEFYKFIKPILEKMDGTEELLVKLNREDLLRKQRTFDNGSIPHQIHLGELHAILRRQEDFYPFLKDNREKIEKILTFRIPYYVGPLARGNSRFAWMTRKSEETITPWNFEEVVDKGASAQSFIERMTNFDKNLPNEKVLPKHSLLYEYFTVYNELTKVKYVTEGMRKPAFLSGEQKKAIVDLLFKTNRKVTVKQLKEDYFKKIECFDSVEISGVEDRFNASLGTYHDLLKIIKDKDFLDNEENEDILEDIVLTLTLFEDREMIEERLKTYAHLFDDKVMKQLKRRRYTGWGRLSRKLINGIRDKQSGKTILDFLKSDGFANRNFMQLIHDDSLTFKEDIQKAQVSGQGDSLHEHIANLAGSPAIKKGILQTVKVVDELVKVMGRHKPENIVIEMARENQTTQKGQKNSRERMKRIEEGIKELGSQILKEHPVENTQLQNEKLYLYYLQNGRDMYVDQELDINRLSDYDVDHIVPQSFLKDDSIDNKVLTRSDKARGKSDNVPSEEVVKKMKNYWRQLLNAKLITQRKFDNLTKAERGGLSELDKAGFIKRQLVETRQITKHVAQILDSRMNTKYDENDKLIREVKVITLKSKLVSDFRKDFQFYKVREINNYHHAHDAYLNAVVGTALIKKYPKLESEFVYGDYKVYDVRKMIAKSEQEIGKATAKYFFYSNIMNFFKTEITLANGEIRKRPLIETNGETGEIVWDKGRDFATVRKVLSMPQVNIVKKTEVQTGGFSKESILPKRNSDKLIARKKDWDPKKYGGFDSPTVAYSVLVVAKVEKGKSKKLKSVKELLGITIMERSSFEKNPIDFLEAKGYKEVKKDLIIKLPKYSLFELENGRKRMLASAGELQKGNELALPSKYVNFLYLASHYEKLKGSPEDNEQKQLFVEQHKHYLDEIIEQISEFSKRVILADANLDKVLSAYNKHRDKPIREQAENIIHLFTLTNLGAPAAFKYFDTTIDRKRYTSTKEVLDATLIHQSITGLYETRIDLSQLGGDGGPAPGGSGGGGGLDDEYRLYSPLVKPDQNIQFWLEQFPQAWAETAGMGLAKQVPPQVIQLKASATPVSVRQYPLSKEAQEGIRPHVQRLIQQGILVPVQSPWNTPLLPVRKPGTNDYRPVQDLREVNKRVQDIHPTVPNPYNLLCALPPQRSWYTVLDLKDAFFCLRLHPTSQPLFAFEWRDPGTGRTGQLTWTRLPQGFKNSPTIFNEALHRDLANFRIQHPQVTLLQYVDDLLLAGATKQDCLEGTKALLLELSDLGYRASAKKAQICRREVTYLGYSLRDGQRWLTEARKKTVVQIPAPTTAKQVREFLGKAGFCRLFIPGFATLAAPLYPLTKPKGEFSWAPEHQKAFDAIKKALLSAPALALPDVTKPFTLYVDERKGVARGVLTQTLGPWRRPVAYLSKKLDPVASGWPVCLKAIAAVAILVKDADKLTLGQNITVIAPHALENIVRQPPDRWMTNARMTHYQSLLLTERVTFAPPAALNPATLLPEETDEPVTHDCHQLLIEETGVRKDLTDIPLTGEVLTWFTDGSSYVVEGKRMAGAAVVDGTRTIWASSLPEGTSAQKAELMALTQALRLAEGKSINIYTDSRYAFATAHVHGAIYKQRGWLTSAGREIKNKEEILSLLEALHLPKRLAIIHCPGHQKAKDPISRGNQMADRVAKQAAQGVNLLPAGKRTADGSEFEKRTADGSEFESPKKKAKVE

SEQ ID NO: 45 - protein, 2084 aa, synthetic construct
MPAAKRVKLDGGDKKYSIGLDIGTNSVGWAVITDEYKVPSKKFKVLGNTDRHSIKKNLIGALLFDSGETAEATRLKRTARRRYTRRKNRICYLQEIFSNEMAKVDDSFFHRLEESFLVEEDKKHERHPIFGNIVDEVAYHEKYPTIYHLRKKLVDSTDKADLRLIYLALAHMIKFRGHFLIEGDLNPDNSDVDKLFIQLVQTYNQLFEENPINASGVDAKAILSARLSKSRRLENLIAQLPGEKKNGLFGNLIALSLGLTPNFKSNFDLAEDAKLQLSKDTYDDDLDNLLAQIGDQYADLFLAAKNLSDAILLSDILRVNTEITKAPLSASMIKRYDEHHQDLTLLKALVRQQLPEKYKEIFFDQSKNGYAGYIDGGASQEEFYKFIKPILEKMDGTEELLVKLNREDLLRKQRTFDNGSIPHQIHLGELHAILRRQEDFYPFLKDNREKIEKILTFRIPYYVGPLARGNSRFAWMTRKSEETITPWNFEEVVDKGASAQSFIERMTNFDKNLPNEKVLPKHSLLYEYFTVYNELTKVKYVTEGMRKPAFLSGEQKKAIVDLLFKTNRKVTVKQLKEDYFKKIECFDSVEISGVEDRFNASLGTYHDLLKIIKDKDFLDNEENEDILEDIVLTLTLFEDREMIEERLKTYAHLFDDKVMKQLKRRRYTGWGRLSRKLINGIRDKQSGKTILDFLKSDGFANRNFMQLIHDDSLTFKEDIQKAQVSGQGDSLHEHIANLAGSPAIKKGILQTVKVVDELVKVMGRHKPENIVIEMARENQTTQKGQKNSRERMKRIEEGIKELGSQILKEHPVENTQLQNEKLYLYYLQNGRDMYVDQELDINRLSDYDVDHIVPQSFLKDDSIDNKVLTRSDKARGKSDNVPSEEVVKKMKNYWRQLLNAKLITQRKFDNLTKAERGGLSELDKAGFIKRQLVETRQITKHVAQILDSRMNTKYDENDKLIREVKVITLKSKLVSDFRKDFQFYKVREINNYHHAHDAYLNAVVGTALIKKYPKLESEFVYGDYKVYDVRKMIAKSEQEIGKATAKYFFYSNIMNFFKTEITLANGEIRKRPLIETNGETGEIVWDKGRDFATVRKVLSMPQVNIVKKTEVQTGGFSKESILPKRNSDKLIARKKDWDPKKYGGFDSPTVAYSVLVVAKVEKGKSKKLKSVKELLGITIMERSSFEKNPIDFLEAKGYKEVKKDLIIKLPKYSLFELENGRKRMLASAGELQKGNELALPSKYVNFLYLASHYEKLKGSPEDNEQKQLFVEQHKHYLDEIIEQISEFSKRVILADANLDKVLSAYNKHRDKPIREQAENIIHLFTLTNLGAPAAFKYFDTTIDRKRYTSTKEVLDATLIHQSITGLYETRIDLSQLGGDGGPAPAPAPGGLDDEYRLYSPLVKPDQNIQFWLEQFPQAWAETAGMGLAKQVPPQVIQLKASATPVSVRQYPLSKEAQEGIRPHVQRLIQQGILVPVQSPWNTPLLPVRKPGTNDYRPVQDLREVNKRVQDIHPTVPNPYNLLCALPPQRSWYTVLDLKDAFFCLRLHPTSQPLFAFEWRDPGTGRTGQLTWTRLPQGFKNSPTIFNEALHRDLANFRIQHPQVTLLQYVDDLLLAGATKQDCLEGTKALLLELSDLGYRASAKKAQICRREVTYLGYSLRDGQRWLTEARKKTVVQIPAPTTAKQVREFLGKAGFCRLFIPGFATLAAPLYPLTKPKGEFSWAPEHQKAFDAIKKALLSAPALALPDVTKPFTLYVDERKGVARGVLTQTLGPWRRPVAYLSKKLDPVASGWPVCLKAIAAVAILVKDADKLTLGQNITVIAPHALENIVRQPPDRWMTNARMTHYQSLLLTERVTFAPPAALNPATLLPEETDEPVTHDCHQLLIEETGVRKDLTDIPLTGEVLTWFTDGSSYVVEGKRMAGAAVVDGTRTIWASSLPEGTSAQKAELMALTQALRLAEGKSINIYTDSRYAFATAHVHGAIYKQRGWLTSAGREIKNKEEILSLLEALHLPKRLAIIHCPGHQKAKDPISRGNQMADRVAKQAAQGVNLLPAGKRTADGSEFEKRTADGSEFESPKKKAKVE

SEQ ID NO: 46 - protein, 2097 aa, synthetic construct
MPAAKRVKLDGGDKKYSIGLDIGTNSVGWAVITDEYKVPSKKFKVLGNTDRHSIKKNLIGALLFDSGETAEATRLKRTARRRYTRRKNRICYLQEIFSNEMAKVDDSFFHRLEESFLVEEDKKHERHPIFGNIVDEVAYHEKYPTIYHLRKKLVDSTDKADLRLIYLALAHMIKFRGHFLIEGDLNPDNSDVDKLFIQLVQTYNQLFEENPINASGVDAKAILSARLSKSRRLENLIAQLPGEKKNGLFGNLIALSLGLTPNFKSNFDLAEDAKLQLSKDTYDDDLDNLLAQIGDQYADLFLAAKNLSDAILLSDILRVNTEITKAPLSASMIKRYDEHHQDLTLLKALVRQQLPEKYKEIFFDQSKNGYAGYIDGGASQEEFYKFIKPILEKMDGTEELLVKLNREDLLRKQRTFDNGSIPHQIHLGELHAILRRQEDFYPFLKDNREKIEKILTFRIPYYVGPLARGNSRFAWMTRKSEETITPWNFEEVVDKGASAQSFIERMTNFDKNLPNEKVLPKHSLLYEYFTVYNELTKVKYVTEGMRKPAFLSGEQKKAIVDLLFKTNRKVTVKQLKEDYFKKIECFDSVEISGVEDRFNASLGTYHDLLKIIKDKDFLDNEENEDILEDIVLTLTLFEDREMIEERLKTYAHLFDDKVMKQLKRRRYTGWGRLSRKLINGIRDKQSGKTILDFLKSDGFANRNFMQLIHDDSLTFKEDIQKAQVSGQGDSLHEHIANLAGSPAIKKGILQTVKVVDELVKVMGRHKPENIVIEMARENQTTQKGQKNSRERMKRIEEGIKELGSQILKEHPVENTQLQNEKLYLYYLQNGRDMYVDQELDINRLSDYDVDHIVPQSFLKDDSIDNKVLTRSDKARGKSDNVPSEEVVKKMKNYWRQLLNAKLITQRKFDNLTKAERGGLSELDKAGFIKRQLVETRQITKHVAQILDSRMNTKYDENDKLIREVKVITLKSKLVSDFRKDFQFYKVREINNYHHAHDAYLNAVVGTALIKKYPKLESEFVYGDYKVYDVRKMIAKSEQEIGKATAKYFFYSNIMNFFKTEITLANGEIRKRPLIETNGETGEIVWDKGRDFATVRKVLSMPQVNIVKKTEVQTGGFSKESILPKRNSDKLIARKKDWDPKKYGGFDSPTVAYSVLVVAKVEKGKSKKLKSVKELLGITIMERSSFEKNPIDFLEAKGYKEVKKDLIIKLPKYSLFELENGRKRMLASAGELQKGNELALPSKYVNFLYLASHYEKLKGSPEDNEQKQLFVEQHKHYLDEIIEQISEFSKRVILADANLDKVLSAYNKHRDKPIREQAENIIHLFTLTNLGAPAAFKYFDTTIDRKRYTSTKEVLDATLIHQSITGLYETRIDLSQLGGDGGEAAAKEAAAKEAAAKEAAAKGGLDDEYRLYSPLVKPDQNIQFWLEQFPQAWAETAGMGLAKQVPPQVIQLKASATPVSVRQYPLSKEAQEGIRPHVQRLIQQGILVPVQSPWNTPLLPVRKPGTNDYRPVQDLREVNKRVQDIHPTVPNPYNLLCALPPQRSWYTVLDLKDAFFCLRLHPTSQPLFAFEWRDPGTGRTGQLTWTRLPQGFKNSPTIFNEALHRDLANFRIQHPQVTLLQYVDDLLLAGATKQDCLEGTKALLLELSDLGYRASAKKAQICRREVTYLGYSLRDGQRWLTEARKKTVVQIPAPTTAKQVREFLGKAGFCRLFIPGFATLAAPLYPLTKPKGEFSWAPEHQKAFDAIKKALLSAPALALPDVTKPFTLYVDERKGVARGVLTQTLGPWRRPVAYLSKKLDPVASGWPVCLKAIAAVAILVKDADKLTLGQNITVIAPHALENIVRQPPDRWMTNARMTHYQSLLLTERVTFAPPAALNPATLLPEETDEPVTHDCHQLLIEETGVRKDLTDIPLTGEVLTWFTDGSSYVVEGKRMAGAAVVDGTRTIWASSLPEGTSAQKAELMALTQALRLAEGKSINIYTDSRYAFATAHVHGAIYKQRGWLTSAGREIKNKEEILSLLEALHLPKRLAIIHCPGHQKAKDPISRGNQMADRVAKQAAQGVNLLPAGKRTADGSEFEKRTADGSEFESPKKKAKVE

SEQ ID NO: 47 - protein, 2083 aa, synthetic construct
MPAAKRVKLDGGDKKYSIGLDIGTNSVGWAVITDEYKVPSKKFKVLGNTDRHSIKKNLIGALLFDSGETAEATRLKRTARRRYTRRKNRICYLQEIFSNEMAKVDDSFFHRLEESFLVEEDKKHERHPIFGNIVDEVAYHEKYPTIYHLRKKLVDSTDKADLRLIYLALAHMIKFRGHFLIEGDLNPDNSDVDKLFIQLVQTYNQLFEENPINASGVDAKAILSARLSKSRRLENLIAQLPGEKKNGLFGNLIALSLGLTPNFKSNFDLAEDAKLQLSKDTYDDDLDNLLAQIGDQYADLFLAAKNLSDAILLSDILRVNTEITKAPLSASMIKRYDEHHQDLTLLKALVRQQLPEKYKEIFFDQSKNGYAGYIDGGASQEEFYKFIKPILEKMDGTEELLVKLNREDLLRKQRTFDNGSIPHQIHLGELHAILRRQEDFYPFLKDNREKIEKILTFRIPYYVGPLARGNSRFAWMTRKSEETITPWNFEEVVDKGASAQSFIERMTNFDKNLPNEKVLPKHSLLYEYFTVYNELTKVKYVTEGMRKPAFLSGEQKKAIVDLLFKTNRKVTVKQLKEDYFKKIECFDSVEISGVEDRFNASLGTYHDLLKIIKDKDFLDNEENEDILEDIVLTLTLFEDREMIEERLKTYAHLFDDKVMKQLKRRRYTGWGRLSRKLINGIRDKQSGKTILDFLKSDGFANRNFMQLIHDDSLTFKEDIQKAQVSGQGDSLHEHIANLAGSPAIKKGILQTVKVVDELVKVMGRHKPENIVIEMARENQTTQKGQKNSRERMKRIEEGIKELGSQILKEHPVENTQLQNEKLYLYYLQNGRDMYVDQELDINRLSDYDVDHIVPQSFLKDDSIDNKVLTRSDKARGKSDNVPSEEVVKKMKNYWRQLLNAKLITQRKFDNLTKAERGGLSELDKAGFIKRQLVETRQITKHVAQILDSRMNTKYDENDKLIREVKVITLKSKLVSDFRKDFQFYKVREINNYHHAHDAYLNAVVGTALIKKYPKLESEFVYGDYKVYDVRKMIAKSEQEIGKATAKYFFYSNIMNFFKTEITLANGEIRKRPLIETNGETGEIVWDKGRDFATVRKVLSMPQVNIVKKTEVQTGGFSKESILPKRNSDKLIARKKDWDPKKYGGFDSPTVAYSVLVVAKVEKGKSKKLKSVKELLGITIMERSSFEKNPIDFLEAKGYKEVKKDLIIKLPKYSLFELENGRKRMLASAGELQKGNELALPSKYVNFLYLASHYEKLKGSPEDNEQKQLFVEQHKHYLDEIIEQISEFSKRVILADANLDKVLSAYNKHRDKPIREQAENIIHLFTLTNLGAPAAFKYFDTTIDRKRYTSTKEVLDATLIHQSITGLYETRIDLSQLGGDGGGSSPAPGGLDDEYRLYSPLVKPDQNIQFWLEQFPQAWAETAGMGLAKQVPPQVIQLKASATPVSVRQYPLSKEAQEGIRPHVQRLIQQGILVPVQSPWNTPLLPVRKPGTNDYRPVQDLREVNKRVQDIHPTVPNPYNLLCALPPQRSWYTVLDLKDAFFCLRLHPTSQPLFAFEWRDPGTGRTGQLTWTRLPQGFKNSPTIFNEALHRDLANFRIQHPQVTLLQYVDDLLLAGATKQDCLEGTKALLLELSDLGYRASAKKAQICRREVTYLGYSLRDGQRWLTEARKKTVVQIPAPTTAKQVREFLGKAGFCRLFIPGFATLAAPLYPLTKPKGEFSWAPEHQKAFDAIKKALLSAPALALPDVTKPFTLYVDERKGVARGVLTQTLGPWRRPVAYLSKKLDPVASGWPVCLKAIAAVAILVKDADKLTLGQNITVIAPHALENIVRQPPDRWMTNARMTHYQSLLLTERVTFAPPAALNPATLLPEETDEPVTHDCHQLLIEETGVRKDLTDIPLTGEVLTWFTDGSSYVVEGKRMAGAAVVDGTRTIWASSLPEGTSAQKAELMALTQALRLAEGKSINIYTDSRYAFATAHVHGAIYKQRGWLTSAGREIKNKEEILSLLEALHLPKRLAIIHCPGHQKAKDPISRGNQMADRVAKQAAQGVNLLPAGKRTADGSEFEKRTADGSEFESPKKKAKVE

SEQ ID NO: 48 - protein, 2085 aa, synthetic construct
MPAAKRVKLDGGDKKYSIGLDIGTNSVGWAVITDEYKVPSKKFKVLGNTDRHSIKKNLIGALLFDSGETAEATRLKRTARRRYTRRKNRICYLQEIFSNEMAKVDDSFFHRLEESFLVEEDKKHERHPIFGNIVDEVAYHEKYPTIYHLRKKLVDSTDKADLRLIYLALAHMIKFRGHFLIEGDLNPDNSDVDKLFIQLVQTYNQLFEENPINASGVDAKAILSARLSKSRRLENLIAQLPGEKKNGLFGNLIALSLGLTPNFKSNFDLAEDAKLQLSKDTYDDDLDNLLAQIGDQYADLFLAAKNLSDAILLSDILRVNTEITKAPLSASMIKRYDEHHQDLTLLKALVRQQLPEKYKEIFFDQSKNGYAGYIDGGASQEEFYKFIKPILEKMDGTEELLVKLNREDLLRKQRTFDNGSIPHQIHLGELHAILRRQEDFYPFLKDNREKIEKILTFRIPYYVGPLARGNSRFAWMTRKSEETITPWNFEEVVDKGASAQSFIERMTNFDKNLPNEKVLPKHSLLYEYFTVYNELTKVKYVTEGMRKPAFLSGEQKKAIVDLLFKTNRKVTVKQLKEDYFKKIECFDSVEISGVEDRFNASLGTYHDLLKIIKDKDFLDNEENEDILEDIVLTLTLFEDREMIEERLKTYAHLFDDKVMKQLKRRRYTGWGRLSRKLINGIRDKQSGKTILDFLKSDGFANRNFMQLIHDDSLTFKEDIQKAQVSGQGDSLHEHIANLAGSPAIKKGILQTVKVVDELVKVMGRHKPENIVIEMARENQTTQKGQKNSRERMKRIEEGIKELGSQILKEHPVENTQLQNEKLYLYYLQNGRDMYVDQELDINRLSDYDVDHIVPQSFLKDDSIDNKVLTRSDKARGKSDNVPSEEVVKKMKNYWRQLLNAKLITQRKFDNLTKAERGGLSELDKAGFIKRQLVETRQITKHVAQILDSRMNTKYDENDKLIREVKVITLKSKLVSDFRKDFQFYKVREINNYHHAHDAYLNAVVGTALIKKYPKLESEFVYGDYKVYDVRKMIAKSEQEIGKATAKYFFYSNIMNFFKTEITLANGEIRKRPLIETNGETGEIVWDKGRDFATVRKVLSMPQVNIVKKTEVQTGGFSKESILPKRNSDKLIARKKDWDPKKYGGFDSPTVAYSVLVVAKVEKGKSKKLKSVKELLGITIMERSSFEKNPIDFLEAKGYKEVKKDLIIKLPKYSLFELENGRKRMLASAGELQKGNELALPSKYVNFLYLASHYEKLKGSPEDNEQKQLFVEQHKHYLDEIIEQISEFSKRVILADANLDKVLSAYNKHRDKPIREQAENIIHLFTLTNLGAPAAFKYFDTTIDRKRYTSTKEVLDATLIHQSITGLYETRIDLSQLGGDGGEAAAKGGGGGLDDEYRLYSPLVKPDQNIQFWLEQFPQAWAETAGMGLAKQVPPQVIQLKASATPVSVRQYPLSKEAQEGIRPHVQRLIQQGILVPVQSPWNTPLLPVRKPGTNDYRPVQDLREVNKRVQDIHPTVPNPYNLLCALPPQRSWYTVLDLKDAFFCLRLHPTSQPLFAFEWRDPGTGRTGQLTWTRLPQGFKNSPTIFNEALHRDLANFRIQHPQVTLLQYVDDLLLAGATKQDCLEGTKALLLELSDLGYRASAKKAQICRREVTYLGYSLRDGQRWLTEARKKTVVQIPAPTTAKQVREFLGKAGFCRLFIPGFATLAAPLYPLTKPKGEFSWAPEHQKAFDAIKKALLSAPALALPDVTKPFTLYVDERKGVARGVLTQTLGPWRRPVAYLSKKLDPVASGWPVCLKAIAAVAILVKDADKLTLGQNITVIAPHALENIVRQPPDRWMTNARMTHYQSLLLTERVTFAPPAALNPATLLPEETDEPVTHDCHQLLIEETGVRKDLTDIPLTGEVLTWFTDGSSYVVEGKRMAGAAVVDGTRTIWASSLPEGTSAQKAELMALTQALRLAEGKSINIYTDSRYAFATAHVHGAIYKQRGWLTSAGREIKNKEEILSLLEALHLPKRLAIIHCPGHQKAKDPISRGNQMADRVAKQAAQGVNLLPAGKRTADGSEFEKRTADGSEFESPKKKAKVE

SEQ ID NO: 49 - protein, 2088 aa, synthetic construct
MPAAKRVKLDGGDKKYSIGLDIGTNSVGWAVITDEYKVPSKKFKVLGNTDRHSIKKNLIGALLFDSGETAEATRLKRTARRRYTRRKNRICYLQEIFSNEMAKVDDSFFHRLEESFLVEEDKKHERHPIFGNIVDEVAYHEKYPTIYHLRKKLVDSTDKADLRLIYLALAHMIKFRGHFLIEGDLNPDNSDVDKLFIQLVQTYNQLFEENPINASGVDAKAILSARLSKSRRLENLIAQLPGEKKNGLFGNLIALSLGLTPNFKSNFDLAEDAKLQLSKDTYDDDLDNLLAQIGDQYADLFLAAKNLSDAILLSDILRVNTEITKAPLSASMIKRYDEHHQDLTLLKALVRQQLPEKYKEIFFDQSKNGYAGYIDGGASQEEFYKFIKPILEKMDGTEELLVKLNREDLLRKQRTFDNGSIPHQIHLGELHAILRRQEDFYPFLKDNREKIEKILTFRIPYYVGPLARGNSRFAWMTRKSEETITPWNFEEVVDKGASAQSFIERMTNFDKNLPNEKVLPKHSLLYEYFTVYNELTKVKYVTEGMRKPAFLSGEQKKAIVDLLFKTNRKVTVKQLKEDYFKKIECFDSVEISGVEDRFNASLGTYHDLLKIIKDKDFLDNEENEDILEDIVLTLTLFEDREMIEERLKTYAHLFDDKVMKQLKRRRYTGWGRLSRKLINGIRDKQSGKTILDFLKSDGFANRNFMQLIHDDSLTFKEDIQKAQVSGQGDSLHEHIANLAGSPAIKKGILQTVKVVDELVKVMGRHKPENIVIEMARENQTTQKGQKNSRERMKRIEEGIKELGSQILKEHPVENTQLQNEKLYLYYLQNGRDMYVDQELDINRLSDYDVDHIVPQSFLKDDSIDNKVLTRSDKARGKSDNVPSEEVVKKMKNYWRQLLNAKLITQRKFDNLTKAERGGLSELDKAGFIKRQLVETRQITKHVAQILDSRMNTKYDENDKLIREVKVITLKSKLVSDFRKDFQFYKVREINNYHHAHDAYLNAVVGTALIKKYPKLESEFVYGDYKVYDVRKMIAKSEQEIGKATAKYFFYSNIMNFFKTEITLANGEIRKRPLIETNGETGEIVWDKGRDFATVRKVLSMPQVNIVKKTEVQTGGFSKESILPKRNSDKLIARKKDWDPKKYGGFDSPTVAYSVLVVAKVEKGKSKKLKSVKELLGITIMERSSFEKNPIDFLEAKGYKEVKKDLIIKLPKYSLFELENGRKRMLASAGELQKGNELALPSKYVNFLYLASHYEKLKGSPEDNEQKQLFVEQHKHYLDEIIEQISEFSKRVILADANLDKVLSAYNKHRDKPIREQAENIIHLFTLTNLGAPAAFKYFDTTIDRKRYTSTKEVLDATLIHQSITGLYETRIDLSQLGGDGGGGSEAAAKPAPGGLDDEYRLYSPLVKPDQNIQFWLEQFPQAWAETAGMGLAKQVPPQVIQLKASATPVSVRQYPLSKEAQEGIRPHVQRLIQQGILVPVQSPWNTPLLPVRKPGTNDYRPVQDLREVNKRVQDIHPTVPNPYNLLCALPPQRSWYTVLDLKDAFFCLRLHPTSQPLFAFEWRDPGTGRTGQLTWTRLPQGFKNSPTIFNEALHRDLANFRIQHPQVTLLQYVDDLLLAGATKQDCLEGTKALLLELSDLGYRASAKKAQICRREVTYLGYSLRDGQRWLTEARKKTVVQIPAPTTAKQVREFLGKAGFCRLFIPGFATLAAPLYPLTKPKGEFSWAPEHQKAFDAIKKALLSAPALALPDVTKPFTLYVDERKGVARGVLTQTLGPWRRPVAYLSKKLDPVASGWPVCLKAIAAVAILVKDADKLTLGQNITVIAPHALENIVRQPPDRWMTNARMTHYQSLLLTERVTFAPPAALNPATLLPEETDEPVTHDCHQLLIEETGVRKDLTDIPLTGEVLTWFTDGSSYVVEGKRMAGAAVVDGTRTIWASSLPEGTSAQKAELMALTQALRLAEGKSINIYTDSRYAFATAHVHGAIYKQRGWLTSAGREIKNKEEILSLLEALHLPKRLAIIHCPGHQKAKDPISRGNQMADRVAKQAAQGVNLLPAGKRTADGSEFEKRTADGSEFESPKKKAKVE

SEQ ID NO: 50 - protein, 2088 aa, synthetic construct
MPAAKRVKLDGGDKKYSIGLDIGTNSVGWAVITDEYKVPSKKFKVLGNTDRHSIKKNLIGALLFDSGETAEATRLKRTARRRYTRRKNRICYLQEIFSNEMAKVDDSFFHRLEESFLVEEDKKHERHPIFGNIVDEVAYHEKYPTIYHLRKKLVDSTDKADLRLIYLALAHMIKFRGHFLIEGDLNPDNSDVDKLFIQLVQTYNQLFEENPINASGVDAKAILSARLSKSRRLENLIAQLPGEKKNGLFGNLIALSLGLTPNFKSNFDLAEDAKLQLSKDTYDDDLDNLLAQIGDQYADLFLAAKNLSDAILLSDILRVNTEITKAPLSASMIKRYDEHHQDLTLLKALVRQQLPEKYKEIFFDQSKNGYAGYIDGGASQEEFYKFIKPILEKMDGTEELLVKLNREDLLRKQRTFDNGSIPHQIHLGELHAILRRQEDFYPFLKDNREKIEKILTFRIPYYVGPLARGNSRFAWMTRKSEETITPWNFEEVVDKGASAQSFIERMTNFDKNLPNEKVLPKHSLLYEYFTVYNELTKVKYVTEGMRKPAFLSGEQKKAIVDLLFKTNRKVTVKQLKEDYFKKIECFDSVEISGVEDRFNASLGTYHDLLKIIKDKDFLDNEENEDILEDIVLTLTLFEDREMIEERLKTYAHLFDDKVMKQLKRRRYTGWGRLSRKLINGIRDKQSGKTILDFLKSDGFANRNFMQLIHDDSLTFKEDIQKAQVSGQGDSLHEHIANLAGSPAIKKGILQTVKVVDELVKVMGRHKPENIVIEMARENQTTQKGQKNSRERMKRIEEGIKELGSQILKEHPVENTQLQNEKLYLYYLQNGRDMYVDQELDINRLSDYDVDHIVPQSFLKDDSIDNKVLTRSDKARGKSDNVPSEEVVKKMKNYWRQLLNAKLITQRKFDNLTKAERGGLSELDKAGFIKRQLVETRQITKHVAQILDSRMNTKYDENDKLIREVKVITLKSKLVSDFRKDFQFYKVREINNYHHAHDAYLNAVVGTALIKKYPKLESEFVYGDYKVYDVRKMIAKSEQEIGKATAKYFFYSNIMNFFKTEITLANGEIRKRPLIETNGETGEIVWDKGRDFATVRKVLSMPQVNIVKKTEVQTGGFSKESILPKRNSDKLIARKKDWDPKKYGGFDSPTVAYSVLVVAKVEKGKSKKLKSVKELLGITIMERSSFEKNPIDFLEAKGYKEVKKDLIIKLPKYSLFELENGRKRMLASAGELQKGNELALPSKYVNFLYLASHYEKLKGSPEDNEQKQLFVEQHKHYLDEIIEQISEFSKRVILADANLDKVLSAYNKHRDKPIREQAENIIHLFTLTNLGAPAAFKYFDTTIDRKRYTSTKEVLDATLIHQSITGLYETRIDLSQLGGDGGPAPGGGEAAAKGGLDDEYRLYSPLVKPDQNIQFWLEQFPQAWAETAGMGLAKQVPPQVIQLKASATPVSVRQYPLSKEAQEGIRPHVQRLIQQGILVPVQSPWNTPLLPVRKPGTNDYRPVQDLREVNKRVQDIHPTVPNPYNLLCALPPQRSWYTVLDLKDAFFCLRLHPTSQPLFAFEWRDPGTGRTGQLTWTRLPQGFKNSPTIFNEALHRDLANFRIQHPQVTLLQYVDDLLLAGATKQDCLEGTKALLLELSDLGYRASAKKAQICRREVTYLGYSLRDGQRWLTEARKKTVVQIPAPTTAKQVREFLGKAGFCRLFIPGFATLAAPLYPLTKPKGEFSWAPEHQKAFDAIKKALLSAPALALPDVTKPFTLYVDERKGVARGVLTQTLGPWRRPVAYLSKKLDPVASGWPVCLKAIAAVAILVKDADKLTLGQNITVIAPHALENIVRQPPDRWMTNARMTHYQSLLLTERVTFAPPAALNPATLLPEETDEPVTHDCHQLLIEETGVRKDLTDIPLTGEVLTWFTDGSSYVVEGKRMAGAAVVDGTRTIWASSLPEGTSAQKAELMALTQALRLAEGKSINIYTDSRYAFATAHVHGAIYKQRGWLTSAGREIKNKEEILSLLEALHLPKRLAIIHCPGHQKAKDPISRGNQMADRVAKQAAQGVNLLPAGKRTADGSEFEKRTADGSEFESPKKKAKVE

SEQ ID NO: 51 - protein, 2092 aa, synthetic construct
MPAAKRVKLDGGDKKYSIGLDIGTNSVGWAVITDEYKVPSKKFKVLGNTDRHSIKKNLIGALLFDSGETAEATRLKRTARRRYTRRKNRICYLQEIFSNEMAKVDDSFFHRLEESFLVEEDKKHERHPIFGNIVDEVAYHEKYPTIYHLRKKLVDSTDKADLRLIYLALAHMIKFRGHFLIEGDLNPDNSDVDKLFIQLVQTYNQLFEENPINASGVDAKAILSARLSKSRRLENLIAQLPGEKKNGLFGNLIALSLGLTPNFKSNFDLAEDAKLQLSKDTYDDDLDNLLAQIGDQYADLFLAAKNLSDAILLSDILRVNTEITKAPLSASMIKRYDEHHQDLTLLKALVRQQLPEKYKEIFFDQSKNGYAGYIDGGASQEEFYKFIKPILEKMDGTEELLVKLNREDLLRKQRTFDNGSIPHQIHLGELHAILRRQEDFYPFLKDNREKIEKILTFRIPYYVGPLARGNSRFAWMTRKSEETITPWNFEEVVDKGASAQSFIERMTNFDKNLPNEKVLPKHSLLYEYFTVYNELTKVKYVTEGMRKPAFLSGEQKKAIVDLLFKTNRKVTVKQLKEDYFKKIECFDSVEISGVEDRFNASLGTYHDLLKIIKDKDFLDNEENEDILEDIVLTLTLFEDREMIEERLKTYAHLFDDKVMKQLKRRRYTGWGRLSRKLINGIRDKQSGKTILDFLKSDGFANRNFMQLIHDDSLTFKEDIQKAQVSGQGDSLHEHIANLAGSPAIKKGILQTVKVVDELVKVMGRHKPENIVIEMARENQTTQKGQKNSRERMKRIEEGIKELGSQILKEHPVENTQLQNEKLYLYYLQNGRDMYVDQELDINRLSDYDVDHIVPQSFLKDDSIDNKVLTRSDKARGKSDNVPSEEVVKKMKNYWRQLLNAKLITQRKFDNLTKAERGGLSELDKAGFIKRQLVETRQITKHVAQILDSRMNTKYDENDKLIREVKVITLKSKLVSDFRKDFQFYKVREINNYHHAHDAYLNAVVGTALIKKYPKLESEFVYGDYKVYDVRKMIAKSEQEIGKATAKYFFYSNIMNFFKTEITLANGEIRKRPLIETNGETGEIVWDKGRDFATVRKVLSMPQVNIVKKTEVQTGGFSKESILPKRNSDKLIARKKDWDPKKYGGFDSPTVAYSVLVVAKVEKGKSKKLKSVKELLGITIMERSSFEKNPIDFLEAKGYKEVKKDLIIKLPKYSLFELENGRKRMLASAGELQKGNELALPSKYVNFLYLASHYEKLKGSPEDNEQKQLFVEQHKHYLDEIIEQISEFSKRVILADANLDKVLSAYNKHRDKPIREQAENIIHLFTLTNLGAPAAFKYFDTTIDRKRYTSTKEVLDATLIHQSITGLYETRIDLSQLGGDGGGGGGSGGGGSGGGGSGGLDDEYRLYSPLVKPDQNIQFWLEQFPQAWAETAGMGLAKQVPPQVIQLKASATPVSVRQYPLSKEAQEGIRPHVQRLIQQGILVPVQSPWNTPLLPVRKPGTNDYRPVQDLREVNKRVQDIHPTVPNPYNLLCALPPQRSWYTVLDLKDAFFCLRLHPTSQPLFAFEWRDPGTGRTGQLTWTRLPQGFKNSPTIFNEALHRDLANFRIQHPQVTLLQYVDDLLLAGATKQDCLEGTKALLLELSDLGYRASAKKAQICRREVTYLGYSLRDGQRWLTEARKKTVVQIPAPTTAKQVREFLGKAGFCRLFIPGFATLAAPLYPLTKPKGEFSWAPEHQKAFDAIKKALLSAPALALPDVTKPFTLYVDERKGVARGVLTQTLGPWRRPVAYLSKKLDPVASGWPVCLKAIAAVAILVKDADKLTLGQNITVIAPHALENIVRQPPDRWMTNARMTHYQSLLLTERVTFAPPAALNPATLLPEETDEPVTHDCHQLLIEETGVRKDLTDIPLTGEVLTWFTDGSSYVVEGKRMAGAAVVDGTRTIWASSLPEGTSAQKAELMALTQALRLAEGKSINIYTDSRYAFATAHVHGAIYKQRGWLTSAGREIKNKEEILSLLEALHLPKRLAIIHCPGHQKAKDPISRGNQMADRVAKQAAQGVNLLPAGKRTADGSEFEKRTADGSEFESPKKKAKVE

SEQ ID NO: 52 - protein, 2092 aa, synthetic construct
MPAAKRVKLDGGDKKYSIGLDIGTNSVGWAVITDEYKVPSKKFKVLGNTDRHSIKKNLIGALLFDSGETAEATRLKRTARRRYTRRKNRICYLQEIFSNEMAKVDDSFFHRLEESFLVEEDKKHERHPIFGNIVDEVAYHEKYPTIYHLRKKLVDSTDKADLRLIYLALAHMIKFRGHFLIEGDLNPDNSDVDKLFIQLVQTYNQLFEENPINASGVDAKAILSARLSKSRRLENLIAQLPGEKKNGLFGNLIALSLGLTPNFKSNFDLAEDAKLQLSKDTYDDDLDNLLAQIGDQYADLFLAAKNLSDAILLSDILRVNTEITKAPLSASMIKRYDEHHQDLTLLKALVRQQLPEKYKEIFFDQSKNGYAGYIDGGASQEEFYKFIKPILEKMDGTEELLVKLNREDLLRKQRTFDNGSIPHQIHLGELHAILRRQEDFYPFLKDNREKIEKILTFRIPYYVGPLARGNSRFAWMTRKSEETITPWNFEEVVDKGASAQSFIERMTNFDKNLPNEKVLPKHSLLYEYFTVYNELTKVKYVTEGMRKPAFLSGEQKKAIVDLLFKTNRKVTVKQLKEDYFKKIECFDSVEISGVEDRFNASLGTYHDLLKIIKDKDFLDNEENEDILEDIVLTLTLFEDREMIEERLKTYAHLFDDKVMKQLKRRRYTGWGRLSRKLINGIRDKQSGKTILDFLKSDGFANRNFMQLIHDDSLTFKEDIQKAQVSGQGDSLHEHIANLAGSPAIKKGILQTVKVVDELVKVMGRHKPENIVIEMARENQTTQKGQKNSRERMKRIEEGIKELGSQILKEHPVENTQLQNEKLYLYYLQNGRDMYVDQELDINRLSDYDVDHIVPQSFLKDDSIDNKVLTRSDKARGKSDNVPSEEVVKKMKNYWRQLLNAKLITQRKFDNLTKAERGGLSELDKAGFIKRQLVETRQITKHVAQILDSRMNTKYDENDKLIREVKVITLKSKLVSDFRKDFQFYKVREINNYHHAHDAYLNAVVGTALIKKYPKLESEFVYGDYKVYDVRKMIAKSEQEIGKATAKYFFYSNIMNFFKTEITLANGEIRKRPLIETNGETGEIVWDKGRDFATVRKVLSMPQVNIVKKTEVQTGGFSKESILPKRNSDKLIARKKDWDPKKYGGFDSPTVAYSVLVVAKVEKGKSKKLKSVKELLGITIMERSSFEKNPIDFLEAKGYKEVKKDLIIKLPKYSLFELENGRKRMLASAGELQKGNELALPSKYVNFLYLASHYEKLKGSPEDNEQKQLFVEQHKHYLDEIIEQISEFSKRVILADANLDKVLSAYNKHRDKPIREQAENIIHLFTLTNLGAPAAFKYFDTTIDRKRYTSTKEVLDATLIHQSITGLYETRIDLSQLGGDGGGGSGGSGGSGGSGGSGGLDDEYRLYSPLVKPDQNIQFWLEQFPQAWAETAGMGLAKQVPPQVIQLKASATPVSVRQYPLSKEAQEGIRPHVQRLIQQGILVPVQSPWNTPLLPVRKPGTNDYRPVQDLREVNKRVQDIHPTVPNPYNLLCALPPQRSWYTVLDLKDAFFCLRLHPTSQPLFAFEWRDPGTGRTGQLTWTRLPQGFKNSPTIFNEALHRDLANFRIQHPQVTLLQYVDDLLLAGATKQDCLEGTKALLLELSDLGYRASAKKAQICRREVTYLGYSLRDGQRWLTEARKKTVVQIPAPTTAKQVREFLGKAGFCRLFIPGFATLAAPLYPLTKPKGEFSWAPEHQKAFDAIKKALLSAPALALPDVTKPFTLYVDERKGVARGVLTQTLGPWRRPVAYLSKKLDPVASGWPVCLKAIAAVAILVKDADKLTLGQNITVIAPHALENIVRQPPDRWMTNARMTHYQSLLLTERVTFAPPAALNPATLLPEETDEPVTHDCHQLLIEETGVRKDLTDIPLTGEVLTWFTDGSSYVVEGKRMAGAAVVDGTRTIWASSLPEGTSAQKAELMALTQALRLAEGKSINIYTDSRYAFATAHVHGAIYKQRGWLTSAGREIKNKEEILSLLEALHLPKRLAIIHCPGHQKAKDPISRGNQMADRVAKQAAQGVNLLPAGKRTADGSEFEKRTADGSEFESPKKKAKVE

SEQ ID NO: 53 - protein, 2088 aa, synthetic construct
MPAAKRVKLDGGDKKYSIGLDIGTNSVGWAVITDEYKVPSKKFKVLGNTDRHSIKKNLIGALLFDSGETAEATRLKRTARRRYTRRKNRICYLQEIFSNEMAKVDDSFFHRLEESFLVEEDKKHERHPIFGNIVDEVAYHEKYPTIYHLRKKLVDSTDKADLRLIYLALAHMIKFRGHFLIEGDLNPDNSDVDKLFIQLVQTYNQLFEENPINASGVDAKAILSARLSKSRRLENLIAQLPGEKKNGLFGNLIALSLGLTPNFKSNFDLAEDAKLQLSKDTYDDDLDNLLAQIGDQYADLFLAAKNLSDAILLSDILRVNTEITKAPLSASMIKRYDEHHQDLTLLKALVRQQLPEKYKEIFFDQSKNGYAGYIDGGASQEEFYKFIKPILEKMDGTEELLVKLNREDLLRKQRTFDNGSIPHQIHLGELHAILRRQEDFYPFLKDNREKIEKILTFRIPYYVGPLARGNSRFAWMTRKSEETITPWNFEEVVDKGASAQSFIERMTNFDKNLPNEKVLPKHSLLYEYFTVYNELTKVKYVTEGMRKPAFLSGEQKKAIVDLLFKTNRKVTVKQLKEDYFKKIECFDSVEISGVEDRFNASLGTYHDLLKIIKDKDFLDNEENEDILEDIVLTLTLFEDREMIEERLKTYAHLFDDKVMKQLKRRRYTGWGRLSRKLINGIRDKQSGKTILDFLKSDGFANRNFMQLIHDDSLTFKEDIQKAQVSGQGDSLHEHIANLAGSPAIKKGILQTVKVVDELVKVMGRHKPENIVIEMARENQTTQKGQKNSRERMKRIEEGIKELGSQILKEHPVENTQLQNEKLYLYYLQNGRDMYVDQELDINRLSDYDVDHIVPQSFLKDDSIDNKVLTRSDKARGKSDNVPSEEVVKKMKNYWRQLLNAKLITQRKFDNLTKAERGGLSELDKAGFIKRQLVETRQITKHVAQILDSRMNTKYDENDKLIREVKVITLKSKLVSDFRKDFQFYKVREINNYHHAHDAYLNAVVGTALIKKYPKLESEFVYGDYKVYDVRKMIAKSEQEIGKATAKYFFYSNIMNFFKTEITLANGEIRKRPLIETNGETGEIVWDKGRDFATVRKVLSMPQVNIVKKTEVQTGGFSKESILPKRNSDKLIARKKDWDPKKYGGFDSPTVAYSVLVVAKVEKGKSKKLKSVKELLGITIMERSSFEKNPIDFLEAKGYKEVKKDLIIKLPKYSLFELENGRKRMLASAGELQKGNELALPSKYVNFLYLASHYEKLKGSPEDNEQKQLFVEQHKHYLDEIIEQISEFSKRVILADANLDKVLSAYNKHRDKPIREQAENIIHLFTLTNLGAPAAFKYFDTTIDRKRYTSTKEVLDATLIHQSITGLYETRIDLSQLGGDGGEAAAKGGGGSSGGLDDEYRLYSPLVKPDQNIQFWLEQFPQAWAETAGMGLAKQVPPQVIQLKASATPVSVRQYPLSKEAQEGIRPHVQRLIQQGILVPVQSPWNTPLLPVRKPGTNDYRPVQDLREVNKRVQDIHPTVPNPYNLLCALPPQRSWYTVLDLKDAFFCLRLHPTSQPLFAFEWRDPGTGRTGQLTWTRLPQGFKNSPTIFNEALHRDLANFRIQHPQVTLLQYVDDLLLAGATKQDCLEGTKALLLELSDLGYRASAKKAQICRREVTYLGYSLRDGQRWLTEARKKTVVQIPAPTTAKQVREFLGKAGFCRLFIPGFATLAAPLYPLTKPKGEFSWAPEHQKAFDAIKKALLSAPALALPDVTKPFTLYVDERKGVARGVLTQTLGPWRRPVAYLSKKLDPVASGWPVCLKAIAAVAILVKDADKLTLGQNITVIAPHALENIVRQPPDRWMTNARMTHYQSLLLTERVTFAPPAALNPATLLPEETDEPVTHDCHQLLIEETGVRKDLTDIPLTGEVLTWFTDGSSYVVEGKRMAGAAVVDGTRTIWASSLPEGTSAQKAELMALTQALRLAEGKSINIYTDSRYAFATAHVHGAIYKQRGWLTSAGREIKNKEEILSLLEALHLPKRLAIIHCPGHQKAKDPISRGNQMADRVAKQAAQGVNLLPAGKRTADGSEFEKRTADGSEFESPKKKAKVE

SEQ ID NO: 54 - protein, 2090 aa, synthetic construct
MPAAKRVKLDGGDKKYSIGLDIGTNSVGWAVITDEYKVPSKKFKVLGNTDRHSIKKNLIGALLFDSGETAEATRLKRTARRRYTRRKNRICYLQEIFSNEMAKVDDSFFHRLEESFLVEEDKKHERHPIFGNIVDEVAYHEKYPTIYHLRKKLVDSTDKADLRLIYLALAHMIKFRGHFLIEGDLNPDNSDVDKLFIQLVQTYNQLFEENPINASGVDAKAILSARLSKSRRLENLIAQLPGEKKNGLFGNLIALSLGLTPNFKSNFDLAEDAKLQLSKDTYDDDLDNLLAQIGDQYADLFLAAKNLSDAILLSDILRVNTEITKAPLSASMIKRYDEHHQDLTLLKALVRQQLPEKYKEIFFDQSKNGYAGYIDGGASQEEFYKFIKPILEKMDGTEELLVKLNREDLLRKQRTFDNGSIPHQIHLGELHAILRRQEDFYPFLKDNREKIEKILTFRIPYYVGPLARGNSRFAWMTRKSEETITPWNFEEVVDKGASAQSFIERMTNFDKNLPNEKVLPKHSLLYEYFTVYNELTKVKYVTEGMRKPAFLSGEQKKAIVDLLFKTNRKVTVKQLKEDYFKKIECFDSVEISGVEDRFNASLGTYHDLLKIIKDKDFLDNEENEDILEDIVLTLTLFEDREMIEERLKTYAHLFDDKVMKQLKRRRYTGWGRLSRKLINGIRDKQSGKTILDFLKSDGFANRNFMQLIHDDSLTFKEDIQKAQVSGQGDSLHEHIANLAGSPAIKKGILQTVKVVDELVKVMGRHKPENIVIEMARENQTTQKGQKNSRERMKRIEEGIKELGSQILKEHPVENTQLQNEKLYLYYLQNGRDMYVDQELDINRLSDYDVDHIVPQSFLKDDSIDNKVLTRSDKARGKSDNVPSEEVVKKMKNYWRQLLNAKLITQRKFDNLTKAERGGLSELDKAGFIKRQLVETRQITKHVAQILDSRMNTKYDENDKLIREVKVITLKSKLVSDFRKDFQFYKVREINNYHHAHDAYLNAVVGTALIKKYPKLESEFVYGDYKVYDVRKMIAKSEQEIGKATAKYFFYSNIMNFFKTEITLANGEIRKRPLIETNGETGEIVWDKGRDFATVRKVLSMPQVNIVKKTEVQTGGFSKESILPKRNSDKLIARKKDWDPKKYGGFDSPTVAYSVLVVAKVEKGKSKKLKSVKELLGITIMERSSFEKNPIDFLEAKGYKEVKKDLIIKLPKYSLFELENGRKRMLASAGELQKGNELALPSKYVNFLYLASHYEKLKGSPEDNEQKQLFVEQHKHYLDEIIEQISEFSKRVILADANLDKVLSAYNKHRDKPIREQAENIIHLFTLTNLGAPAAFKYFDTTIDRKRYTSTKEVLDATLIHQSITGLYETRIDLSQLGGDGGPAPAPAPAPAPAPGGLDDEYRLYSPLVKPDQNIQFWLEQFPQAWAETAGMGLAKQVPPQVIQLKASATPVSVRQYPLSKEAQEGIRPHVQRLIQQGILVPVQSPWNTPLLPVRKPGTNDYRPVQDLREVNKRVQDIHPTVPNPYNLLCALPPQRSWYTVLDLKDAFFCLRLHPTSQPLFAFEWRDPGTGRTGQLTWTRLPQGFKNSPTIFNEALHRDLANFRIQHPQVTLLQYVDDLLLAGATKQDCLEGTKALLLELSDLGYRASAKKAQICRREVTYLGYSLRDGQRWLTEARKKTVVQIPAPTTAKQVREFLGKAGFCRLFIPGFATLAAPLYPLTKPKGEFSWAPEHQKAFDAIKKALLSAPALALPDVTKPFTLYVDERKGVARGVLTQTLGPWRRPVAYLSKKLDPVASGWPVCLKAIAAVAILVKDADKLTLGQNITVIAPHALENIVRQPPDRWMTNARMTHYQSLLLTERVTFAPPAALNPATLLPEETDEPVTHDCHQLLIEETGVRKDLTDIPLTGEVLTWFTDGSSYVVEGKRMAGAAVVDGTRTIWASSLPEGTSAQKAELMALTQALRLAEGKSINIYTDSRYAFATAHVHGAIYKQRGWLTSAGREIKNKEEILSLLEALHLPKRLAIIHCPGHQKAKDPISRGNQMADRVAKQAAQGVNLLPAGKRTADGSEFEKRTADGSEFESPKKKAKVE

SEQ ID NO: 55 - protein, 2087 aa, synthetic construct
MPAAKRVKLDGGDKKYSIGLDIGTNSVGWAVITDEYKVPSKKFKVLGNTDRHSIKKNLIGALLFDSGETAEATRLKRTARRRYTRRKNRICYLQEIFSNEMAKVDDSFFHRLEESFLVEEDKKHERHPIFGNIVDEVAYHEKYPTIYHLRKKLVDSTDKADLRLIYLALAHMIKFRGHFLIEGDLNPDNSDVDKLFIQLVQTYNQLFEENPINASGVDAKAILSARLSKSRRLENLIAQLPGEKKNGLFGNLIALSLGLTPNFKSNFDLAEDAKLQLSKDTYDDDLDNLLAQIGDQYADLFLAAKNLSDAILLSDILRVNTEITKAPLSASMIKRYDEHHQDLTLLKALVRQQLPEKYKEIFFDQSKNGYAGYIDGGASQEEFYKFIKPILEKMDGTEELLVKLNREDLLRKQRTFDNGSIPHQIHLGELHAILRRQEDFYPFLKDNREKIEKILTFRIPYYVGPLARGNSRFAWMTRKSEETITPWNFEEVVDKGASAQSFIERMTNFDKNLPNEKVLPKHSLLYEYFTVYNELTKVKYVTEGMRKPAFLSGEQKKAIVDLLFKTNRKVTVKQLKEDYFKKIECFDSVEISGVEDRFNASLGTYHDLLKIIKDKDFLDNEENEDILEDIVLTLTLFEDREMIEERLKTYAHLFDDKVMKQLKRRRYTGWGRLSRKLINGIRDKQSGKTILDFLKSDGFANRNFMQLIHDDSLTFKEDIQKAQVSGQGDSLHEHIANLAGSPAIKKGILQTVKVVDELVKVMGRHKPENIVIEMARENQTTQKGQKNSRERMKRIEEGIKELGSQILKEHPVENTQLQNEKLYLYYLQNGRDMYVDQELDINRLSDYDVDHIVPQSFLKDDSIDNKVLTRSDKARGKSDNVPSEEVVKKMKNYWRQLLNAKLITQRKFDNLTKAERGGLSELDKAGFIKRQLVETRQITKHVAQILDSRMNTKYDENDKLIREVKVITLKSKLVSDFRKDFQFYKVREINNYHHAHDAYLNAVVGTALIKKYPKLESEFVYGDYKVYDVRKMIAKSEQEIGKATAKYFFYSNIMNFFKTEITLANGEIRKRPLIETNGETGEIVWDKGRDFATVRKVLSMPQVNIVKKTEVQTGGFSKESILPKRNSDKLIARKKDWDPKKYGGFDSPTVAYSVLVVAKVEKGKSKKLKSVKELLGITIMERSSFEKNPIDFLEAKGYKEVKKDLIIKLPKYSLFELENGRKRMLASAGELQKGNELALPSKYVNFLYLASHYEKLKGSPEDNEQKQLFVEQHKHYLDEIIEQISEFSKRVILADANLDKVLSAYNKHRDKPIREQAENIIHLFTLTNLGAPAAFKYFDTTIDRKRYTSTKEVLDATLIHQSITGLYETRIDLSQLGGDGGGGGGSGGGGSGGLDDEYRLYSPLVKPDQNIQFWLEQFPQAWAETAGMGLAKQVPPQVIQLKASATPVSVRQYPLSKEAQEGIRPHVQRLIQQGILVPVQSPWNTPLLPVRKPGTNDYRPVQDLREVNKRVQDIHPTVPNPYNLLCALPPQRSWYTVLDLKDAFFCLRLHPTSQPLFAFEWRDPGTGRTGQLTWTRLPQGFKNSPTIFNEALHRDLANFRIQHPQVTLLQYVDDLLLAGATKQDCLEGTKALLLELSDLGYRASAKKAQICRREVTYLGYSLRDGQRWLTEARKKTVVQIPAPTTAKQVREFLGKAGFCRLFIPGFATLAAPLYPLTKPKGEFSWAPEHQKAFDAIKKALLSAPALALPDVTKPFTLYVDERKGVARGVLTQTLGPWRRPVAYLSKKLDPVASGWPVCLKAIAAVAILVKDADKLTLGQNITVIAPHALENIVRQPPDRWMTNARMTHYQSLLLTERVTFAPPAALNPATLLPEETDEPVTHDCHQLLIEETGVRKDLTDIPLTGEVLTWFTDGSSYVVEGKRMAGAAVVDGTRTIWASSLPEGTSAQKAELMALTQALRLAEGKSINIYTDSRYAFATAHVHGAIYKQRGWLTSAGREIKNKEEILSLLEALHLPKRLAIIHCPGHQKAKDPISRGNQMADRVAKQAAQGVNLLPAGKRTADGSEFEKRTADGSEFESPKKKAKVE

SEQ ID NO: 56 - protein, 2092 aa, synthetic construct
MPAAKRVKLDGGDKKYSIGLDIGTNSVGWAVITDEYKVPSKKFKVLGNTDRHSIKKNLIGALLFDSGETAEATRLKRTARRRYTRRKNRICYLQEIFSNEMAKVDDSFFHRLEESFLVEEDKKHERHPIFGNIVDEVAYHEKYPTIYHLRKKLVDSTDKADLRLIYLALAHMIKFRGHFLIEGDLNPDNSDVDKLFIQLVQTYNQLFEENPINASGVDAKAILSARLSKSRRLENLIAQLPGEKKNGLFGNLIALSLGLTPNFKSNFDLAEDAKLQLSKDTYDDDLDNLLAQIGDQYADLFLAAKNLSDAILLSDILRVNTEITKAPLSASMIKRYDEHHQDLTLLKALVRQQLPEKYKEIFFDQSKNGYAGYIDGGASQEEFYKFIKPILEKMDGTEELLVKLNREDLLRKQRTFDNGSIPHQIHLGELHAILRRQEDFYPFLKDNREKIEKILTFRIPYYVGPLARGNSRFAWMTRKSEETITPWNFEEVVDKGASAQSFIERMTNFDKNLPNEKVLPKHSLLYEYFTVYNELTKVKYVTEGMRKPAFLSGEQKKAIVDLLFKTNRKVTVKQLKEDYFKKIECFDSVEISGVEDRFNASLGTYHDLLKIIKDKDFLDNEENEDILEDIVLTLTLFEDREMIEERLKTYAHLFDDKVMKQLKRRRYTGWGRLSRKLINGIRDKQSGKTILDFLKSDGFANRNFMQLIHDDSLTFKEDIQKAQVSGQGDSLHEHIANLAGSPAIKKGILQTVKVVDELVKVMGRHKPENIVIEMARENQTTQKGQKNSRERMKRIEEGIKELGSQILKEHPVENTQLQNEKLYLYYLQNGRDMYVDQELDINRLSDYDVDHIVPQSFLKDDSIDNKVLTRSDKARGKSDNVPSEEVVKKMKNYWRQLLNAKLITQRKFDNLTKAERGGLSELDKAGFIKRQLVETRQITKHVAQILDSRMNTKYDENDKLIREVKVITLKSKLVSDFRKDFQFYKVREINNYHHAHDAYLNAVVGTALIKKYPKLESEFVYGDYKVYDVRKMIAKSEQEIGKATAKYFFYSNIMNFFKTEITLANGEIRKRPLIETNGETGEIVWDKGRDFATVRKVLSMPQVNIVKKTEVQTGGFSKESILPKRNSDKLIARKKDWDPKKYGGFDSPTVAYSVLVVAKVEKGKSKKLKSVKELLGITIMERSSFEKNPIDFLEAKGYKEVKKDLIIKLPKYSLFELENGRKRMLASAGELQKGNELALPSKYVNFLYLASHYEKLKGSPEDNEQKQLFVEQHKHYLDEIIEQISEFSKRVILADANLDKVLSAYNKHRDKPIREQAENIIHLFTLTNLGAPAAFKYFDTTIDRKRYTSTKEVLDATLIHQSITGLYETRIDLSQLGGDGGEAAAKGGGGSEAAAKGGLDDEYRLYSPLVKPDQNIQFWLEQFPQAWAETAGMGLAKQVPPQVIQLKASATPVSVRQYPLSKEAQEGIRPHVQRLIQQGILVPVQSPWNTPLLPVRKPGTNDYRPVQDLREVNKRVQDIHPTVPNPYNLLCALPPQRSWYTVLDLKDAFFCLRLHPTSQPLFAFEWRDPGTGRTGQLTWTRLPQGFKNSPTIFNEALHRDLANFRIQHPQVTLLQYVDDLLLAGATKQDCLEGTKALLLELSDLGYRASAKKAQICRREVTYLGYSLRDGQRWLTEARKKTVVQIPAPTTAKQVREFLGKAGFCRLFIPGFATLAAPLYPLTKPKGEFSWAPEHQKAFDAIKKALLSAPALALPDVTKPFTLYVDERKGVARGVLTQTLGPWRRPVAYLSKKLDPVASGWPVCLKAIAAVAILVKDADKLTLGQNITVIAPHALENIVRQPPDRWMTNARMTHYQSLLLTERVTFAPPAALNPATLLPEETDEPVTHDCHQLLIEETGVRKDLTDIPLTGEVLTWFTDGSSYVVEGKRMAGAAVVDGTRTIWASSLPEGTSAQKAELMALTQALRLAEGKSINIYTDSRYAFATAHVHGAIYKQRGWLTSAGREIKNKEEILSLLEALHLPKRLAIIHCPGHQKAKDPISRGNQMADRVAKQAAQGVNLLPAGKRTADGSEFEKRTADGSEFESPKKKAKVE

SEQ ID NO: 57 - protein, 2085 aa, synthetic construct
MPAAKRVKLDGGDKKYSIGLDIGTNSVGWAVITDEYKVPSKKFKVLGNTDRHSIKKNLIGALLFDSGETAEATRLKRTARRRYTRRKNRICYLQEIFSNEMAKVDDSFFHRLEESFLVEEDKKHERHPIFGNIVDEVAYHEKYPTIYHLRKKLVDSTDKADLRLIYLALAHMIKFRGHFLIEGDLNPDNSDVDKLFIQLVQTYNQLFEENPINASGVDAKAILSARLSKSRRLENLIAQLPGEKKNGLFGNLIALSLGLTPNFKSNFDLAEDAKLQLSKDTYDDDLDNLLAQIGDQYADLFLAAKNLSDAILLSDILRVNTEITKAPLSASMIKRYDEHHQDLTLLKALVRQQLPEKYKEIFFDQSKNGYAGYIDGGASQEEFYKFIKPILEKMDGTEELLVKLNREDLLRKQRTFDNGSIPHQIHLGELHAILRRQEDFYPFLKDNREKIEKILTFRIPYYVGPLARGNSRFAWMTRKSEETITPWNFEEVVDKGASAQSFIERMTNFDKNLPNEKVLPKHSLLYEYFTVYNELTKVKYVTEGMRKPAFLSGEQKKAIVDLLFKTNRKVTVKQLKEDYFKKIECFDSVEISGVEDRFNASLGTYHDLLKIIKDKDFLDNEENEDILEDIVLTLTLFEDREMIEERLKTYAHLFDDKVMKQLKRRRYTGWGRLSRKLINGIRDKQSGKTILDFLKSDGFANRNFMQLIHDDSLTFKEDIQKAQVSGQGDSLHEHIANLAGSPAIKKGILQTVKVVDELVKVMGRHKPENIVIEMARENQTTQKGQKNSRERMKRIEEGIKELGSQILKEHPVENTQLQNEKLYLYYLQNGRDMYVDQELDINRLSDYDVDHIVPQSFLKDDSIDNKVLTRSDKARGKSDNVPSEEVVKKMKNYWRQLLNAKLITQRKFDNLTKAERGGLSELDKAGFIKRQLVETRQITKHVAQILDSRMNTKYDENDKLIREVKVITLKSKLVSDFRKDFQFYKVREINNYHHAHDAYLNAVVGTALIKKYPKLESEFVYGDYKVYDVRKMIAKSEQEIGKATAKYFFYSNIMNFFKTEITLANGEIRKRPLIETNGETGEIVWDKGRDFATVRKVLSMPQVNIVKKTEVQTGGFSKESILPKRNSDKLIARKKDWDPKKYGGFDSPTVAYSVLVVAKVEKGKSKKLKSVKELLGITIMERSSFEKNPIDFLEAKGYKEVKKDLIIKLPKYSLFELENGRKRMLASAGELQKGNELALPSKYVNFLYLASHYEKLKGSPEDNEQKQLFVEQHKHYLDEIIEQISEFSKRVILADANLDKVLSAYNKHRDKPIREQAENIIHLFTLTNLGAPAAFKYFDTTIDRKRYTSTKEVLDATLIHQSITGLYETRIDLSQLGGDGGGGGGGGGGGGLDDEYRLYSPLVKPDQNIQFWLEQFPQAWAETAGMGLAKQVPPQVIQLKASATPVSVRQYPLSKEAQEGIRPHVQRLIQQGILVPVQSPWNTPLLPVRKPGTNDYRPVQDLREVNKRVQDIHPTVPNPYNLLCALPPQRSWYTVLDLKDAFFCLRLHPTSQPLFAFEWRDPGTGRTGQLTWTRLPQGFKNSPTIFNEALHRDLANFRIQHPQVTLLQYVDDLLLAGATKQDCLEGTKALLLELSDLGYRASAKKAQICRREVTYLGYSLRDGQRWLTEARKKTVVQIPAPTTAKQVREFLGKAGFCRLFIPGFATLAAPLYPLTKPKGEFSWAPEHQKAFDAIKKALLSAPALALPDVTKPFTLYVDERKGVARGVLTQTLGPWRRPVAYLSKKLDPVASGWPVCLKAIAAVAILVKDADKLTLGQNITVIAPHALENIVRQPPDRWMTNARMTHYQSLLLTERVTFAPPAALNPATLLPEETDEPVTHDCHQLLIEETGVRKDLTDIPLTGEVLTWFTDGSSYVVEGKRMAGAAVVDGTRTIWASSLPEGTSAQKAELMALTQALRLAEGKSINIYTDSRYAFATAHVHGAIYKQRGWLTSAGREIKNKEEILSLLEALHLPKRLAIIHCPGHQKAKDPISRGNQMADRVAKQAAQGVNLLPAGKRTADGSEFEKRTADGSEFESPKKKAKVE

SEQ ID NO: 58 - protein, 2086 aa, synthetic construct
MPAAKRVKLDGGDKKYSIGLDIGTNSVGWAVITDEYKVPSKKFKVLGNTDRHSIKKNLIGALLFDSGETAEATRLKRTARRRYTRRKNRICYLQEIFSNEMAKVDDSFFHRLEESFLVEEDKKHERHPIFGNIVDEVAYHEKYPTIYHLRKKLVDSTDKADLRLIYLALAHMIKFRGHFLIEGDLNPDNSDVDKLFIQLVQTYNQLFEENPINASGVDAKAILSARLSKSRRLENLIAQLPGEKKNGLFGNLIALSLGLTPNFKSNFDLAEDAKLQLSKDTYDDDLDNLLAQIGDQYADLFLAAKNLSDAILLSDILRVNTEITKAPLSASMIKRYDEHHQDLTLLKALVRQQLPEKYKEIFFDQSKNGYAGYIDGGASQEEFYKFIKPILEKMDGTEELLVKLNREDLLRKQRTFDNGSIPHQIHLGELHAILRRQEDFYPFLKDNREKIEKILTFRIPYYVGPLARGNSRFAWMTRKSEETITPWNFEEVVDKGASAQSFIERMTNFDKNLPNEKVLPKHSLLYEYFTVYNELTKVKYVTEGMRKPAFLSGEQKKAIVDLLFKTNRKVTVKQLKEDYFKKIECFDSVEISGVEDRFNASLGTYHDLLKIIKDKDFLDNEENEDILEDIVLTLTLFEDREMIEERLKTYAHLFDDKVMKQLKRRRYTGWGRLSRKLINGIRDKQSGKTILDFLKSDGFANRNFMQLIHDDSLTFKEDIQKAQVSGQGDSLHEHIANLAGSPAIKKGILQTVKVVDELVKVMGRHKPENIVIEMARENQTTQKGQKNSRERMKRIEEGIKELGSQILKEHPVENTQLQNEKLYLYYLQNGRDMYVDQELDINRLSDYDVDHIVPQSFLKDDSIDNKVLTRSDKARGKSDNVPSEEVVKKMKNYWRQLLNAKLITQRKFDNLTKAERGGLSELDKAGFIKRQLVETRQITKHVAQILDSRMNTKYDENDKLIREVKVITLKSKLVSDFRKDFQFYKVREINNYHHAHDAYLNAVVGTALIKKYPKLESEFVYGDYKVYDVRKMIAKSEQEIGKATAKYFFYSNIMNFFKTEITLANGEIRKRPLIETNGETGEIVWDKGRDFATVRKVLSMPQVNIVKKTEVQTGGFSKESILPKRNSDKLIARKKDWDPKKYGGFDSPTVAYSVLVVAKVEKGKSKKLKSVKELLGITIMERSSFEKNPIDFLEAKGYKEVKKDLIIKLPKYSLFELENGRKRMLASAGELQKGNELALPSKYVNFLYLASHYEKLKGSPEDNEQKQLFVEQHKHYLDEIIEQISEFSKRVILADANLDKVLSAYNKHRDKPIREQAENIIHLFTLTNLGAPAAFKYFDTTIDRKRYTSTKEVLDATLIHQSITGLYETRIDLSQLGGDGGGGSPAPGGGGGLDDEYRLYSPLVKPDQNIQFWLEQFPQAWAETAGMGLAKQVPPQVIQLKASATPVSVRQYPLSKEAQEGIRPHVQRLIQQGILVPVQSPWNTPLLPVRKPGTNDYRPVQDLREVNKRVQDIHPTVPNPYNLLCALPPQRSWYTVLDLKDAFFCLRLHPTSQPLFAFEWRDPGTGRTGQLTWTRLPQGFKNSPTIFNEALHRDLANFRIQHPQVTLLQYVDDLLLAGATKQDCLEGTKALLLELSDLGYRASAKKAQICRREVTYLGYSLRDGQRWLTEARKKTVVQIPAPTTAKQVREFLGKAGFCRLFIPGFATLAAPLYPLTKPKGEFSWAPEHQKAFDAIKKALLSAPALALPDVTKPFTLYVDERKGVARGVLTQTLGPWRRPVAYLSKKLDPVASGWPVCLKAIAAVAILVKDADKLTLGQNITVIAPHALENIVRQPPDRWMTNARMTHYQSLLLTERVTFAPPAALNPATLLPEETDEPVTHDCHQLLIEETGVRKDLTDIPLTGEVLTWFTDGSSYVVEGKRMAGAAVVDGTRTIWASSLPEGTSAQKAELMALTQALRLAEGKSINIYTDSRYAFATAHVHGAIYKQRGWLTSAGREIKNKEEILSLLEALHLPKRLAIIHCPGHQKAKDPISRGNQMADRVAKQAAQGVNLLPAGKRTADGSEFEKRTADGSEFESPKKKAKVE

SEQ ID NO: 59 - protein, 2083 aa, synthetic construct
MPAAKRVKLDGGDKKYSIGLDIGTNSVGWAVITDEYKVPSKKFKVLGNTDRHSIKKNLIGALLFDSGETAEATRLKRTARRRYTRRKNRICYLQEIFSNEMAKVDDSFFHRLEESFLVEEDKKHERHPIFGNIVDEVAYHEKYPTIYHLRKKLVDSTDKADLRLIYLALAHMIKFRGHFLIEGDLNPDNSDVDKLFIQLVQTYNQLFEENPINASGVDAKAILSARLSKSRRLENLIAQLPGEKKNGLFGNLIALSLGLTPNFKSNFDLAEDAKLQLSKDTYDDDLDNLLAQIGDQYADLFLAAKNLSDAILLSDILRVNTEITKAPLSASMIKRYDEHHQDLTLLKALVRQQLPEKYKEIFFDQSKNGYAGYIDGGASQEEFYKFIKPILEKMDGTEELLVKLNREDLLRKQRTFDNGSIPHQIHLGELHAILRRQEDFYPFLKDNREKIEKILTFRIPYYVGPLARGNSRFAWMTRKSEETITPWNFEEVVDKGASAQSFIERMTNFDKNLPNEKVLPKHSLLYEYFTVYNELTKVKYVTEGMRKPAFLSGEQKKAIVDLLFKTNRKVTVKQLKEDYFKKIECFDSVEISGVEDRFNASLGTYHDLLKIIKDKDFLDNEENEDILEDIVLTLTLFEDREMIEERLKTYAHLFDDKVMKQLKRRRYTGWGRLSRKLINGIRDKQSGKTILDFLKSDGFANRNFMQLIHDDSLTFKEDIQKAQVSGQGDSLHEHIANLAGSPAIKKGILQTVKVVDELVKVMGRHKPENIVIEMARENQTTQKGQKNSRERMKRIEEGIKELGSQILKEHPVENTQLQNEKLYLYYLQNGRDMYVDQELDINRLSDYDVDHIVPQSFLKDDSIDNKVLTRSDKARGKSDNVPSEEVVKKMKNYWRQLLNAKLITQRKFDNLTKAERGGLSELDKAGFIKRQLVETRQITKHVAQILDSRMNTKYDENDKLIREVKVITLKSKLVSDFRKDFQFYKVREINNYHHAHDAYLNAVVGTALIKKYPKLESEFVYGDYKVYDVRKMIAKSEQEIGKATAKYFFYSNIMNFFKTEITLANGEIRKRPLIETNGETGEIVWDKGRDFATVRKVLSMPQVNIVKKTEVQTGGFSKESILPKRNSDKLIARKKDWDPKKYGGFDSPTVAYSVLVVAKVEKGKSKKLKSVKELLGITIMERSSFEKNPIDFLEAKGYKEVKKDLIIKLPKYSLFELENGRKRMLASAGELQKGNELALPSKYVNFLYLASHYEKLKGSPEDNEQKQLFVEQHKHYLDEIIEQISEFSKRVILADANLDKVLSAYNKHRDKPIREQAENIIHLFTLTNLGAPAAFKYFDTTIDRKRYTSTKEVLDATLIHQSITGLYETRIDLSQLGGDGGGGGGGGGGLDDEYRLYSPLVKPDQNIQFWLEQFPQAWAETAGMGLAKQVPPQVIQLKASATPVSVRQYPLSKEAQEGIRPHVQRLIQQGILVPVQSPWNTPLLPVRKPGTNDYRPVQDLREVNKRVQDIHPTVPNPYNLLCALPPQRSWYTVLDLKDAFFCLRLHPTSQPLFAFEWRDPGTGRTGQLTWTRLPQGFKNSPTIFNEALHRDLANFRIQHPQVTLLQYVDDLLLAGATKQDCLEGTKALLLELSDLGYRASAKKAQICRREVTYLGYSLRDGQRWLTEARKKTVVQIPAPTTAKQVREFLGKAGFCRLFIPGFATLAAPLYPLTKPKGEFSWAPEHQKAFDAIKKALLSAPALALPDVTKPFTLYVDERKGVARGVLTQTLGPWRRPVAYLSKKLDPVASGWPVCLKAIAAVAILVKDADKLTLGQNITVIAPHALENIVRQPPDRWMTNARMTHYQSLLLTERVTFAPPAALNPATLLPEETDEPVTHDCHQLLIEETGVRKDLTDIPLTGEVLTWFTDGSSYVVEGKRMAGAAVVDGTRTIWASSLPEGTSAQKAELMALTQALRLAEGKSINIYTDSRYAFATAHVHGAIYKQRGWLTSAGREIKNKEEILSLLEALHLPKRLAIIHCPGHQKAKDPISRGNQMADRVAKQAAQGVNLLPAGKRTADGSEFEKRTADGSEFESPKKKAKVE

SEQ ID NO: 60 - protein, 2086 aa, synthetic construct
MPAAKRVKLDGGDKKYSIGLDIGTNSVGWAVITDEYKVPSKKFKVLGNTDRHSIKKNLIGALLFDSGETAEATRLKRTARRRYTRRKNRICYLQEIFSNEMAKVDDSFFHRLEESFLVEEDKKHERHPIFGNIVDEVAYHEKYPTIYHLRKKLVDSTDKADLRLIYLALAHMIKFRGHFLIEGDLNPDNSDVDKLFIQLVQTYNQLFEENPINASGVDAKAILSARLSKSRRLENLIAQLPGEKKNGLFGNLIALSLGLTPNFKSNFDLAEDAKLQLSKDTYDDDLDNLLAQIGDQYADLFLAAKNLSDAILLSDILRVNTEITKAPLSASMIKRYDEHHQDLTLLKALVRQQLPEKYKEIFFDQSKNGYAGYIDGGASQEEFYKFIKPILEKMDGTEELLVKLNREDLLRKQRTFDNGSIPHQIHLGELHAILRRQEDFYPFLKDNREKIEKILTFRIPYYVGPLARGNSRFAWMTRKSEETITPWNFEEVVDKGASAQSFIERMTNFDKNLPNEKVLPKHSLLYEYFTVYNELTKVKYVTEGMRKPAFLSGEQKKAIVDLLFKTNRKVTVKQLKEDYFKKIECFDSVEISGVEDRFNASLGTYHDLLKIIKDKDFLDNEENEDILEDIVLTLTLFEDREMIEERLKTYAHLFDDKVMKQLKRRRYTGWGRLSRKLINGIRDKQSGKTILDFLKSDGFANRNFMQLIHDDSLTFKEDIQKAQVSGQGDSLHEHIANLAGSPAIKKGILQTVKVVDELVKVMGRHKPENIVIEMARENQTTQKGQKNSRERMKRIEEGIKELGSQILKEHPVENTQLQNEKLYLYYLQNGRDMYVDQELDINRLSDYDVDHIVPQSFLKDDSIDNKVLTRSDKARGKSDNVPSEEVVKKMKNYWRQLLNAKLITQRKFDNLTKAERGGLSELDKAGFIKRQLVETRQITKHVAQILDSRMNTKYDENDKLIREVKVITLKSKLVSDFRKDFQFYKVREINNYHHAHDAYLNAVVGTALIKKYPKLESEFVYGDYKVYDVRKMIAKSEQEIGKATAKYFFYSNIMNFFKTEITLANGEIRKRPLIETNGETGEIVWDKGRDFATVRKVLSMPQVNIVKKTEVQTGGFSKESILPKRNSDKLIARKKDWDPKKYGGFDSPTVAYSVLVVAKVEKGKSKKLKSVKELLGITIMERSSFEKNPIDFLEAKGYKEVKKDLIIKLPKYSLFELENGRKRMLASAGELQKGNELALPSKYVNFLYLASHYEKLKGSPEDNEQKQLFVEQHKHYLDEIIEQISEFSKRVILADANLDKVLSAYNKHRDKPIREQAENIIHLFTLTNLGAPAAFKYFDTTIDRKRYTSTKEVLDATLIHQSITGLYETRIDLSQLGGDGGPAPGGSGSSGGLDDEYRLYSPLVKPDQNIQFWLEQFPQAWAETAGMGLAKQVPPQVIQLKASATPVSVRQYPLSKEAQEGIRPHVQRLIQQGILVPVQSPWNTPLLPVRKPGTNDYRPVQDLREVNKRVQDIHPTVPNPYNLLCALPPQRSWYTVLDLKDAFFCLRLHPTSQPLFAFEWRDPGTGRTGQLTWTRLPQGFKNSPTIFNEALHRDLANFRIQHPQVTLLQYVDDLLLAGATKQDCLEGTKALLLELSDLGYRASAKKAQICRREVTYLGYSLRDGQRWLTEARKKTVVQIPAPTTAKQVREFLGKAGFCRLFIPGFATLAAPLYPLTKPKGEFSWAPEHQKAFDAIKKALLSAPALALPDVTKPFTLYVDERKGVARGVLTQTLGPWRRPVAYLSKKLDPVASGWPVCLKAIAAVAILVKDADKLTLGQNITVIAPHALENIVRQPPDRWMTNARMTHYQSLLLTERVTFAPPAALNPATLLPEETDEPVTHDCHQLLIEETGVRKDLTDIPLTGEVLTWFTDGSSYVVEGKRMAGAAVVDGTRTIWASSLPEGTSAQKAELMALTQALRLAEGKSINIYTDSRYAFATAHVHGAIYKQRGWLTSAGREIKNKEEILSLLEALHLPKRLAIIHCPGHQKAKDPISRGNQMADRVAKQAAQGVNLLPAGKRTADGSEFEKRTADGSEFESPKKKAKVE

SEQ ID NO: 61 - protein, 2083 aa, synthetic construct
MPAAKRVKLDGGDKKYSIGLDIGTNSVGWAVITDEYKVPSKKFKVLGNTDRHSIKKNLIGALLFDSGETAEATRLKRTARRRYTRRKNRICYLQEIFSNEMAKVDDSFFHRLEESFLVEEDKKHERHPIFGNIVDEVAYHEKYPTIYHLRKKLVDSTDKADLRLIYLALAHMIKFRGHFLIEGDLNPDNSDVDKLFIQLVQTYNQLFEENPINASGVDAKAILSARLSKSRRLENLIAQLPGEKKNGLFGNLIALSLGLTPNFKSNFDLAEDAKLQLSKDTYDDDLDNLLAQIGDQYADLFLAAKNLSDAILLSDILRVNTEITKAPLSASMIKRYDEHHQDLTLLKALVRQQLPEKYKEIFFDQSKNGYAGYIDGGASQEEFYKFIKPILEKMDGTEELLVKLNREDLLRKQRTFDNGSIPHQIHLGELHAILRRQEDFYPFLKDNREKIEKILTFRIPYYVGPLARGNSRFAWMTRKSEETITPWNFEEVVDKGASAQSFIERMTNFDKNLPNEKVLPKHSLLYEYFTVYNELTKVKYVTEGMRKPAFLSGEQKKAIVDLLFKTNRKVTVKQLKEDYFKKIECFDSVEISGVEDRFNASLGTYHDLLKIIKDKDFLDNEENEDILEDIVLTLTLFEDREMIEERLKTYAHLFDDKVMKQLKRRRYTGWGRLSRKLINGIRDKQSGKTILDFLKSDGFANRNFMQLIHDDSLTFKEDIQKAQVSGQGDSLHEHIANLAGSPAIKKGILQTVKVVDELVKVMGRHKPENIVIEMARENQTTQKGQKNSRERMKRIEEGIKELGSQILKEHPVENTQLQNEKLYLYYLQNGRDMYVDQELDINRLSDYDVDHIVPQSFLKDDSIDNKVLTRSDKARGKSDNVPSEEVVKKMKNYWRQLLNAKLITQRKFDNLTKAERGGLSELDKAGFIKRQLVETRQITKHVAQILDSRMNTKYDENDKLIREVKVITLKSKLVSDFRKDFQFYKVREINNYHHAHDAYLNAVVGTALIKKYPKLESEFVYGDYKVYDVRKMIAKSEQEIGKATAKYFFYSNIMNFFKTEITLANGEIRKRPLIETNGETGEIVWDKGRDFATVRKVLSMPQVNIVKKTEVQTGGFSKESILPKRNSDKLIARKKDWDPKKYGGFDSPTVAYSVLVVAKVEKGKSKKLKSVKELLGITIMERSSFEKNPIDFLEAKGYKEVKKDLIIKLPKYSLFELENGRKRMLASAGELQKGNELALPSKYVNFLYLASHYEKLKGSPEDNEQKQLFVEQHKHYLDEIIEQISEFSKRVILADANLDKVLSAYNKHRDKPIREQAENIIHLFTLTNLGAPAAFKYFDTTIDRKRYTSTKEVLDATLIHQSITGLYETRIDLSQLGGDGGPAPGSSGGLDDEYRLYSPLVKPDQNIQFWLEQFPQAWAETAGMGLAKQVPPQVIQLKASATPVSVRQYPLSKEAQEGIRPHVQRLIQQGILVPVQSPWNTPLLPVRKPGTNDYRPVQDLREVNKRVQDIHPTVPNPYNLLCALPPQRSWYTVLDLKDAFFCLRLHPTSQPLFAFEWRDPGTGRTGQLTWTRLPQGFKNSPTIFNEALHRDLANFRIQHPQVTLLQYVDDLLLAGATKQDCLEGTKALLLELSDLGYRASAKKAQICRREVTYLGYSLRDGQRWLTEARKKTVVQIPAPTTAKQVREFLGKAGFCRLFIPGFATLAAPLYPLTKPKGEFSWAPEHQKAFDAIKKALLSAPALALPDVTKPFTLYVDERKGVARGVLTQTLGPWRRPVAYLSKKLDPVASGWPVCLKAIAAVAILVKDADKLTLGQNITVIAPHALENIVRQPPDRWMTNARMTHYQSLLLTERVTFAPPAALNPATLLPEETDEPVTHDCHQLLIEETGVRKDLTDIPLTGEVLTWFTDGSSYVVEGKRMAGAAVVDGTRTIWASSLPEGTSAQKAELMALTQALRLAEGKSINIYTDSRYAFATAHVHGAIYKQRGWLTSAGREIKNKEEILSLLEALHLPKRLAIIHCPGHQKAKDPISRGNQMADRVAKQAAQGVNLLPAGKRTADGSEFEKRTADGSEFESPKKKAKVE

SEQ ID NO: 62 - protein, 2088 aa, synthetic construct
MPAAKRVKLDGGDKKYSIGLDIGTNSVGWAVITDEYKVPSKKFKVLGNTDRHSIKKNLIGALLFDSGETAEATRLKRTARRRYTRRKNRICYLQEIFSNEMAKVDDSFFHRLEESFLVEEDKKHERHPIFGNIVDEVAYHEKYPTIYHLRKKLVDSTDKADLRLIYLALAHMIKFRGHFLIEGDLNPDNSDVDKLFIQLVQTYNQLFEENPINASGVDAKAILSARLSKSRRLENLIAQLPGEKKNGLFGNLIALSLGLTPNFKSNFDLAEDAKLQLSKDTYDDDLDNLLAQIGDQYADLFLAAKNLSDAILLSDILRVNTEITKAPLSASMIKRYDEHHQDLTLLKALVRQQLPEKYKEIFFDQSKNGYAGYIDGGASQEEFYKFIKPILEKMDGTEELLVKLNREDLLRKQRTFDNGSIPHQIHLGELHAILRRQEDFYPFLKDNREKIEKILTFRIPYYVGPLARGNSRFAWMTRKSEETITPWNFEEVVDKGASAQSFIERMTNFDKNLPNEKVLPKHSLLYEYFTVYNELTKVKYVTEGMRKPAFLSGEQKKAIVDLLFKTNRKVTVKQLKEDYFKKIECFDSVEISGVEDRFNASLGTYHDLLKIIKDKDFLDNEENEDILEDIVLTLTLFEDREMIEERLKTYAHLFDDKVMKQLKRRRYTGWGRLSRKLINGIRDKQSGKTILDFLKSDGFANRNFMQLIHDDSLTFKEDIQKAQVSGQGDSLHEHIANLAGSPAIKKGILQTVKVVDELVKVMGRHKPENIVIEMARENQTTQKGQKNSRERMKRIEEGIKELGSQILKEHPVENTQLQNEKLYLYYLQNGRDMYVDQELDINRLSDYDVDHIVPQSFLKDDSIDNKVLTRSDKARGKSDNVPSEEVVKKMKNYWRQLLNAKLITQRKFDNLTKAERGGLSELDKAGFIKRQLVETRQITKHVAQILDSRMNTKYDENDKLIREVKVITLKSKLVSDFRKDFQFYKVREINNYHHAHDAYLNAVVGTALIKKYPKLESEFVYGDYKVYDVRKMIAKSEQEIGKATAKYFFYSNIMNFFKTEITLANGEIRKRPLIETNGETGEIVWDKGRDFATVRKVLSMPQVNIVKKTEVQTGGFSKESILPKRNSDKLIARKKDWDPKKYGGFDSPTVAYSVLVVAKVEKGKSKKLKSVKELLGITIMERSSFEKNPIDFLEAKGYKEVKKDLIIKLPKYSLFELENGRKRMLASAGELQKGNELALPSKYVNFLYLASHYEKLKGSPEDNEQKQLFVEQHKHYLDEIIEQISEFSKRVILADANLDKVLSAYNKHRDKPIREQAENIIHLFTLTNLGAPAAFKYFDTTIDRKRYTSTKEVLDATLIHQSITGLYETRIDLSQLGGDGGPAPAPAPAPAPGGLDDEYRLYSPLVKPDQNIQFWLEQFPQAWAETAGMGLAKQVPPQVIQLKASATPVSVRQYPLSKEAQEGIRPHVQRLIQQGILVPVQSPWNTPLLPVRKPGTNDYRPVQDLREVNKRVQDIHPTVPNPYNLLCALPPQRSWYTVLDLKDAFFCLRLHPTSQPLFAFEWRDPGTGRTGQLTWTRLPQGFKNSPTIFNEALHRDLANFRIQHPQVTLLQYVDDLLLAGATKQDCLEGTKALLLELSDLGYRASAKKAQICRREVTYLGYSLRDGQRWLTEARKKTVVQIPAPTTAKQVREFLGKAGFCRLFIPGFATLAAPLYPLTKPKGEFSWAPEHQKAFDAIKKALLSAPALALPDVTKPFTLYVDERKGVARGVLTQTLGPWRRPVAYLSKKLDPVASGWPVCLKAIAAVAILVKDADKLTLGQNITVIAPHALENIVRQPPDRWMTNARMTHYQSLLLTERVTFAPPAALNPATLLPEETDEPVTHDCHQLLIEETGVRKDLTDIPLTGEVLTWFTDGSSYVVEGKRMAGAAVVDGTRTIWASSLPEGTSAQKAELMALTQALRLAEGKSINIYTDSRYAFATAHVHGAIYKQRGWLTSAGREIKNKEEILSLLEALHLPKRLAIIHCPGHQKAKDPISRGNQMADRVAKQAAQGVNLLPAGKRTADGSEFEKRTADGSEFESPKKKAKVE

SEQ ID NO: 63 - protein, 2088 aa, synthetic construct
MPAAKRVKLDGGDKKYSIGLDIGTNSVGWAVITDEYKVPSKKFKVLGNTDRHSIKKNLIGALLFDSGETAEATRLKRTARRRYTRRKNRICYLQEIFSNEMAKVDDSFFHRLEESFLVEEDKKHERHPIFGNIVDEVAYHEKYPTIYHLRKKLVDSTDKADLRLIYLALAHMIKFRGHFLIEGDLNPDNSDVDKLFIQLVQTYNQLFEENPINASGVDAKAILSARLSKSRRLENLIAQLPGEKKNGLFGNLIALSLGLTPNFKSNFDLAEDAKLQLSKDTYDDDLDNLLAQIGDQYADLFLAAKNLSDAILLSDILRVNTEITKAPLSASMIKRYDEHHQDLTLLKALVRQQLPEKYKEIFFDQSKNGYAGYIDGGASQEEFYKFIKPILEKMDGTEELLVKLNREDLLRKQRTFDNGSIPHQIHLGELHAILRRQEDFYPFLKDNREKIEKILTFRIPYYVGPLARGNSRFAWMTRKSEETITPWNFEEVVDKGASAQSFIERMTNFDKNLPNEKVLPKHSLLYEYFTVYNELTKVKYVTEGMRKPAFLSGEQKKAIVDLLFKTNRKVTVKQLKEDYFKKIECFDSVEISGVEDRFNASLGTYHDLLKIIKDKDFLDNEENEDILEDIVLTLTLFEDREMIEERLKTYAHLFDDKVMKQLKRRRYTGWGRLSRKLINGIRDKQSGKTILDFLKSDGFANRNFMQLIHDDSLTFKEDIQKAQVSGQGDSLHEHIANLAGSPAIKKGILQTVKVVDELVKVMGRHKPENIVIEMARENQTTQKGQKNSRERMKRIEEGIKELGSQILKEHPVENTQLQNEKLYLYYLQNGRDMYVDQELDINRLSDYDVDHIVPQSFLKDDSIDNKVLTRSDKARGKSDNVPSEEVVKKMKNYWRQLLNAKLITQRKFDNLTKAERGGLSELDKAGFIKRQLVETRQITKHVAQILDSRMNTKYDENDKLIREVKVITLKSKLVSDFRKDFQFYKVREINNYHHAHDAYLNAVVGTALIKKYPKLESEFVYGDYKVYDVRKMIAKSEQEIGKATAKYFFYSNIMNFFKTEITLANGEIRKRPLIETNGETGEIVWDKGRDFATVRKVLSMPQVNIVKKTEVQTGGFSKESILPKRNSDKLIARKKDWDPKKYGGFDSPTVAYSVLVVAKVEKGKSKKLKSVKELLGITIMERSSFEKNPIDFLEAKGYKEVKKDLIIKLPKYSLFELENGRKRMLASAGELQKGNELALPSKYVNFLYLASHYEKLKGSPEDNEQKQLFVEQHKHYLDEIIEQISEFSKRVILADANLDKVLSAYNKHRDKPIREQAENIIHLFTLTNLGAPAAFKYFDTTIDRKRYTSTKEVLDATLIHQSITGLYETRIDLSQLGGDGGGGGEAAAKPAPGGLDDEYRLYSPLVKPDQNIQFWLEQFPQAWAETAGMGLAKQVPPQVIQLKASATPVSVRQYPLSKEAQEGIRPHVQRLIQQGILVPVQSPWNTPLLPVRKPGTNDYRPVQDLREVNKRVQDIHPTVPNPYNLLCALPPQRSWYTVLDLKDAFFCLRLHPTSQPLFAFEWRDPGTGRTGQLTWTRLPQGFKNSPTIFNEALHRDLANFRIQHPQVTLLQYVDDLLLAGATKQDCLEGTKALLLELSDLGYRASAKKAQICRREVTYLGYSLRDGQRWLTEARKKTVVQIPAPTTAKQVREFLGKAGFCRLFIPGFATLAAPLYPLTKPKGEFSWAPEHQKAFDAIKKALLSAPALALPDVTKPFTLYVDERKGVARGVLTQTLGPWRRPVAYLSKKLDPVASGWPVCLKAIAAVAILVKDADKLTLGQNITVIAPHALENIVRQPPDRWMTNARMTHYQSLLLTERVTFAPPAALNPATLLPEETDEPVTHDCHQLLIEETGVRKDLTDIPLTGEVLTWFTDGSSYVVEGKRMAGAAVVDGTRTIWASSLPEGTSAQKAELMALTQALRLAEGKSINIYTDSRYAFATAHVHGAIYKQRGWLTSAGREIKNKEEILSLLEALHLPKRLAIIHCPGHQKAKDPISRGNQMADRVAKQAAQGVNLLPAGKRTADGSEFEKRTADGSEFESPKKKAKVE

SEQ ID NO: 64 - protein, 2086 aa, synthetic construct
MPAAKRVKLDGGDKKYSIGLDIGTNSVGWAVITDEYKVPSKKFKVLGNTDRHSIKKNLIGALLFDSGETAEATRLKRTARRRYTRRKNRICYLQEIFSNEMAKVDDSFFHRLEESFLVEEDKKHERHPIFGNIVDEVAYHEKYPTIYHLRKKLVDSTDKADLRLIYLALAHMIKFRGHFLIEGDLNPDNSDVDKLFIQLVQTYNQLFEENPINASGVDAKAILSARLSKSRRLENLIAQLPGEKKNGLFGNLIALSLGLTPNFKSNFDLAEDAKLQLSKDTYDDDLDNLLAQIGDQYADLFLAAKNLSDAILLSDILRVNTEITKAPLSASMIKRYDEHHQDLTLLKALVRQQLPEKYKEIFFDQSKNGYAGYIDGGASQEEFYKFIKPILEKMDGTEELLVKLNREDLLRKQRTFDNGSIPHQIHLGELHAILRRQEDFYPFLKDNREKIEKILTFRIPYYVGPLARGNSRFAWMTRKSEETITPWNFEEVVDKGASAQSFIERMTNFDKNLPNEKVLPKHSLLYEYFTVYNELTKVKYVTEGMRKPAFLSGEQKKAIVDLLFKTNRKVTVKQLKEDYFKKIECFDSVEISGVEDRFNASLGTYHDLLKIIKDKDFLDNEENEDILEDIVLTLTLFEDREMIEERLKTYAHLFDDKVMKQLKRRRYTGWGRLSRKLINGIRDKQSGKTILDFLKSDGFANRNFMQLIHDDSLTFKEDIQKAQVSGQGDSLHEHIANLAGSPAIKKGILQTVKVVDELVKVMGRHKPENIVIEMARENQTTQKGQKNSRERMKRIEEGIKELGSQILKEHPVENTQLQNEKLYLYYLQNGRDMYVDQELDINRLSDYDVDHIVPQSFLKDDSIDNKVLTRSDKARGKSDNVPSEEVVKKMKNYWRQLLNAKLITQRKFDNLTKAERGGLSELDKAGFIKRQLVETRQITKHVAQILDSRMNTKYDENDKLIREVKVITLKSKLVSDFRKDFQFYKVREINNYHHAHDAYLNAVVGTALIKKYPKLESEFVYGDYKVYDVRKMIAKSEQEIGKATAKYFFYSNIMNFFKTEITLANGEIRKRPLIETNGETGEIVWDKGRDFATVRKVLSMPQVNIVKKTEVQTGGFSKESILPKRNSDKLIARKKDWDPKKYGGFDSPTVAYSVLVVAKVEKGKSKKLKSVKELLGITIMERSSFEKNPIDFLEAKGYKEVKKDLIIKLPKYSLFELENGRKRMLASAGELQKGNELALPSKYVNFLYLASHYEKLKGSPEDNEQKQLFVEQHKHYLDEIIEQISEFSKRVILADANLDKVLSAYNKHRDKPIREQAENIIHLFTLTNLGAPAAFKYFDTTIDRKRYTSTKEVLDATLIHQSITGLYETRIDLSQLGGDGGGSSGGSPAPGGLDDEYRLYSPLVKPDQNIQFWLEQFPQAWAETAGMGLAKQVPPQVIQLKASATPVSVRQYPLSKEAQEGIRPHVQRLIQQGILVPVQSPWNTPLLPVRKPGTNDYRPVQDLREVNKRVQDIHPTVPNPYNLLCALPPQRSWYTVLDLKDAFFCLRLHPTSQPLFAFEWRDPGTGRTGQLTWTRLPQGFKNSPTIFNEALHRDLANFRIQHPQVTLLQYVDDLLLAGATKQDCLEGTKALLLELSDLGYRASAKKAQICRREVTYLGYSLRDGQRWLTEARKKTVVQIPAPTTAKQVREFLGKAGFCRLFIPGFATLAAPLYPLTKPKGEFSWAPEHQKAFDAIKKALLSAPALALPDVTKPFTLYVDERKGVARGVLTQTLGPWRRPVAYLSKKLDPVASGWPVCLKAIAAVAILVKDADKLTLGQNITVIAPHALENIVRQPPDRWMTNARMTHYQSLLLTERVTFAPPAALNPATLLPEETDEPVTHDCHQLLIEETGVRKDLTDIPLTGEVLTWFTDGSSYVVEGKRMAGAAVVDGTRTIWASSLPEGTSAQKAELMALTQALRLAEGKSINIYTDSRYAFATAHVHGAIYKQRGWLTSAGREIKNKEEILSLLEALHLPKRLAIIHCPGHQKAKDPISRGNQMADRVAKQAAQGVNLLPAGKRTADGSEFEKRTADGSEFESPKKKAKVE

SEQ ID NO: 65 - protein, 2088 aa, synthetic construct
MPAAKRVKLDGGDKKYSIGLDIGTNSVGWAVITDEYKVPSKKFKVLGNTDRHSIKKNLIGALLFDSGETAEATRLKRTARRRYTRRKNRICYLQEIFSNEMAKVDDSFFHRLEESFLVEEDKKHERHPIFGNIVDEVAYHEKYPTIYHLRKKLVDSTDKADLRLIYLALAHMIKFRGHFLIEGDLNPDNSDVDKLFIQLVQTYNQLFEENPINASGVDAKAILSARLSKSRRLENLIAQLPGEKKNGLFGNLIALSLGLTPNFKSNFDLAEDAKLQLSKDTYDDDLDNLLAQIGDQYADLFLAAKNLSDAILLSDILRVNTEITKAPLSASMIKRYDEHHQDLTLLKALVRQQLPEKYKEIFFDQSKNGYAGYIDGGASQEEFYKFIKPILEKMDGTEELLVKLNREDLLRKQRTFDNGSIPHQIHLGELHAILRRQEDFYPFLKDNREKIEKILTFRIPYYVGPLARGNSRFAWMTRKSEETITPWNFEEVVDKGASAQSFIERMTNFDKNLPNEKVLPKHSLLYEYFTVYNELTKVKYVTEGMRKPAFLSGEQKKAIVDLLFKTNRKVTVKQLKEDYFKKIECFDSVEISGVEDRFNASLGTYHDLLKIIKDKDFLDNEENEDILEDIVLTLTLFEDREMIEERLKTYAHLFDDKVMKQLKRRRYTGWGRLSRKLINGIRDKQSGKTILDFLKSDGFANRNFMQLIHDDSLTFKEDIQKAQVSGQGDSLHEHIANLAGSPAIKKGILQTVKVVDELVKVMGRHKPENIVIEMARENQTTQKGQKNSRERMKRIEEGIKELGSQILKEHPVENTQLQNEKLYLYYLQNGRDMYVDQELDINRLSDYDVDHIVPQSFLKDDSIDNKVLTRSDKARGKSDNVPSEEVVKKMKNYWRQLLNAKLITQRKFDNLTKAERGGLSELDKAGFIKRQLVETRQITKHVAQILDSRMNTKYDENDKLIREVKVITLKSKLVSDFRKDFQFYKVREINNYHHAHDAYLNAVVGTALIKKYPKLESEFVYGDYKVYDVRKMIAKSEQEIGKATAKYFFYSNIMNFFKTEITLANGEIRKRPLIETNGETGEIVWDKGRDFATVRKVLSMPQVNIVKKTEVQTGGFSKESILPKRNSDKLIARKKDWDPKKYGGFDSPTVAYSVLVVAKVEKGKSKKLKSVKELLGITIMERSSFEKNPIDFLEAKGYKEVKKDLIIKLPKYSLFELENGRKRMLASAGELQKGNELALPSKYVNFLYLASHYEKLKGSPEDNEQKQLFVEQHKHYLDEIIEQISEFSKRVILADANLDKVLSAYNKHRDKPIREQAENIIHLFTLTNLGAPAAFKYFDTTIDRKRYTSTKEVLDATLIHQSITGLYETRIDLSQLGGDGGGGGEAAAKGGSGGLDDEYRLYSPLVKPDQNIQFWLEQFPQAWAETAGMGLAKQVPPQVIQLKASATPVSVRQYPLSKEAQEGIRPHVQRLIQQGILVPVQSPWNTPLLPVRKPGTNDYRPVQDLREVNKRVQDIHPTVPNPYNLLCALPPQRSWYTVLDLKDAFFCLRLHPTSQPLFAFEWRDPGTGRTGQLTWTRLPQGFKNSPTIFNEALHRDLANFRIQHPQVTLLQYVDDLLLAGATKQDCLEGTKALLLELSDLGYRASAKKAQICRREVTYLGYSLRDGQRWLTEARKKTVVQIPAPTTAKQVREFLGKAGFCRLFIPGFATLAAPLYPLTKPKGEFSWAPEHQKAFDAIKKALLSAPALALPDVTKPFTLYVDERKGVARGVLTQTLGPWRRPVAYLSKKLDPVASGWPVCLKAIAAVAILVKDADKLTLGQNITVIAPHALENIVRQPPDRWMTNARMTHYQSLLLTERVTFAPPAALNPATLLPEETDEPVTHDCHQLLIEETGVRKDLTDIPLTGEVLTWFTDGSSYVVEGKRMAGAAVVDGTRTIWASSLPEGTSAQKAELMALTQALRLAEGKSINIYTDSRYAFATAHVHGAIYKQRGWLTSAGREIKNKEEILSLLEALHLPKRLAIIHCPGHQKAKDPISRGNQMADRVAKQAAQGVNLLPAGKRTADGSEFEKRTADGSEFESPKKKAKVE

SEQ ID NO: 66 - protein, 2081 aa, synthetic construct
MPAAKRVKLDGGDKKYSIGLDIGTNSVGWAVITDEYKVPSKKFKVLGNTDRHSIKKNLIGALLFDSGETAEATRLKRTARRRYTRRKNRICYLQEIFSNEMAKVDDSFFHRLEESFLVEEDKKHERHPIFGNIVDEVAYHEKYPTIYHLRKKLVDSTDKADLRLIYLALAHMIKFRGHFLIEGDLNPDNSDVDKLFIQLVQTYNQLFEENPINASGVDAKAILSARLSKSRRLENLIAQLPGEKKNGLFGNLIALSLGLTPNFKSNFDLAEDAKLQLSKDTYDDDLDNLLAQIGDQYADLFLAAKNLSDAILLSDILRVNTEITKAPLSASMIKRYDEHHQDLTLLKALVRQQLPEKYKEIFFDQSKNGYAGYIDGGASQEEFYKFIKPILEKMDGTEELLVKLNREDLLRKQRTFDNGSIPHQIHLGELHAILRRQEDFYPFLKDNREKIEKILTFRIPYYVGPLARGNSRFAWMTRKSEETITPWNFEEVVDKGASAQSFIERMTNFDKNLPNEKVLPKHSLLYEYFTVYNELTKVKYVTEGMRKPAFLSGEQKKAIVDLLFKTNRKVTVKQLKEDYFKKIECFDSVEISGVEDRFNASLGTYHDLLKIIKDKDFLDNEENEDILEDIVLTLTLFEDREMIEERLKTYAHLFDDKVMKQLKRRRYTGWGRLSRKLINGIRDKQSGKTILDFLKSDGFANRNFMQLIHDDSLTFKEDIQKAQVSGQGDSLHEHIANLAGSPAIKKGILQTVKVVDELVKVMGRHKPENIVIEMARENQTTQKGQKNSRERMKRIEEGIKELGSQILKEHPVENTQLQNEKLYLYYLQNGRDMYVDQELDINRLSDYDVDHIVPQSFLKDDSIDNKVLTRSDKARGKSDNVPSEEVVKKMKNYWRQLLNAKLITQRKFDNLTKAERGGLSELDKAGFIKRQLVETRQITKHVAQILDSRMNTKYDENDKLIREVKVITLKSKLVSDFRKDFQFYKVREINNYHHAHDAYLNAVVGTALIKKYPKLESEFVYGDYKVYDVRKMIAKSEQEIGKATAKYFFYSNIMNFFKTEITLANGEIRKRPLIETNGETGEIVWDKGRDFATVRKVLSMPQVNIVKKTEVQTGGFSKESILPKRNSDKLIARKKDWDPKKYGGFDSPTVAYSVLVVAKVEKGKSKKLKSVKELLGITIMERSSFEKNPIDFLEAKGYKEVKKDLIIKLPKYSLFELENGRKRMLASAGELQKGNELALPSKYVNFLYLASHYEKLKGSPEDNEQKQLFVEQHKHYLDEIIEQISEFSKRVILADANLDKVLSAYNKHRDKPIREQAENIIHLFTLTNLGAPAAFKYFDTTIDRKRYTSTKEVLDATLIHQSITGLYETRIDLSQLGGDGGGGGGGGLDDEYRLYSPLVKPDQNIQFWLEQFPQAWAETAGMGLAKQVPPQVIQLKASATPVSVRQYPLSKEAQEGIRPHVQRLIQQGILVPVQSPWNTPLLPVRKPGTNDYRPVQDLREVNKRVQDIHPTVPNPYNLLCALPPQRSWYTVLDLKDAFFCLRLHPTSQPLFAFEWRDPGTGRTGQLTWTRLPQGFKNSPTIFNEALHRDLANFRIQHPQVTLLQYVDDLLLAGATKQDCLEGTKALLLELSDLGYRASAKKAQICRREVTYLGYSLRDGQRWLTEARKKTVVQIPAPTTAKQVREFLGKAGFCRLFIPGFATLAAPLYPLTKPKGEFSWAPEHQKAFDAIKKALLSAPALALPDVTKPFTLYVDERKGVARGVLTQTLGPWRRPVAYLSKKLDPVASGWPVCLKAIAAVAILVKDADKLTLGQNITVIAPHALENIVRQPPDRWMTNARMTHYQSLLLTERVTFAPPAALNPATLLPEETDEPVTHDCHQLLIEETGVRKDLTDIPLTGEVLTWFTDGSSYVVEGKRMAGAAVVDGTRTIWASSLPEGTSAQKAELMALTQALRLAEGKSINIYTDSRYAFATAHVHGAIYKQRGWLTSAGREIKNKEEILSLLEALHLPKRLAIIHCPGHQKAKDPISRGNQMADRVAKQAAQGVNLLPAGKRTADGSEFEKRTADGSEFESPKKKAKVE

SEQ ID NO: 67 - protein, 2089 aa, synthetic construct
MPAAKRVKLDGGDKKYSIGLDIGTNSVGWAVITDEYKVPSKKFKVLGNTDRHSIKKNLIGALLFDSGETAEATRLKRTARRRYTRRKNRICYLQEIFSNEMAKVDDSFFHRLEESFLVEEDKKHERHPIFGNIVDEVAYHEKYPTIYHLRKKLVDSTDKADLRLIYLALAHMIKFRGHFLIEGDLNPDNSDVDKLFIQLVQTYNQLFEENPINASGVDAKAILSARLSKSRRLENLIAQLPGEKKNGLFGNLIALSLGLTPNFKSNFDLAEDAKLQLSKDTYDDDLDNLLAQIGDQYADLFLAAKNLSDAILLSDILRVNTEITKAPLSASMIKRYDEHHQDLTLLKALVRQQLPEKYKEIFFDQSKNGYAGYIDGGASQEEFYKFIKPILEKMDGTEELLVKLNREDLLRKQRTFDNGSIPHQIHLGELHAILRRQEDFYPFLKDNREKIEKILTFRIPYYVGPLARGNSRFAWMTRKSEETITPWNFEEVVDKGASAQSFIERMTNFDKNLPNEKVLPKHSLLYEYFTVYNELTKVKYVTEGMRKPAFLSGEQKKAIVDLLFKTNRKVTVKQLKEDYFKKIECFDSVEISGVEDRFNASLGTYHDLLKIIKDKDFLDNEENEDILEDIVLTLTLFEDREMIEERLKTYAHLFDDKVMKQLKRRRYTGWGRLSRKLINGIRDKQSGKTILDFLKSDGFANRNFMQLIHDDSLTFKEDIQKAQVSGQGDSLHEHIANLAGSPAIKKGILQTVKVVDELVKVMGRHKPENIVIEMARENQTTQKGQKNSRERMKRIEEGIKELGSQILKEHPVENTQLQNEKLYLYYLQNGRDMYVDQELDINRLSDYDVDHIVPQSFLKDDSIDNKVLTRSDKARGKSDNVPSEEVVKKMKNYWRQLLNAKLITQRKFDNLTKAERGGLSELDKAGFIKRQLVETRQITKHVAQILDSRMNTKYDENDKLIREVKVITLKSKLVSDFRKDFQFYKVREINNYHHAHDAYLNAVVGTALIKKYPKLESEFVYGDYKVYDVRKMIAKSEQEIGKATAKYFFYSNIMNFFKTEITLANGEIRKRPLIETNGETGEIVWDKGRDFATVRKVLSMPQVNIVKKTEVQTGGFSKESILPKRNSDKLIARKKDWDPKKYGGFDSPTVAYSVLVVAKVEKGKSKKLKSVKELLGITIMERSSFEKNPIDFLEAKGYKEVKKDLIIKLPKYSLFELENGRKRMLASAGELQKGNELALPSKYVNFLYLASHYEKLKGSPEDNEQKQLFVEQHKHYLDEIIEQISEFSKRVILADANLDKVLSAYNKHRDKPIREQAENIIHLFTLTNLGAPAAFKYFDTTIDRKRYTSTKEVLDATLIHQSITGLYETRIDLSQLGGDGGGGSGGSGGSGGSGGLDDEYRLYSPLVKPDQNIQFWLEQFPQAWAETAGMGLAKQVPPQVIQLKASATPVSVRQYPLSKEAQEGIRPHVQRLIQQGILVPVQSPWNTPLLPVRKPGTNDYRPVQDLREVNKRVQDIHPTVPNPYNLLCALPPQRSWYTVLDLKDAFFCLRLHPTSQPLFAFEWRDPGTGRTGQLTWTRLPQGFKNSPTIFNEALHRDLANFRIQHPQVTLLQYVDDLLLAGATKQDCLEGTKALLLELSDLGYRASAKKAQICRREVTYLGYSLRDGQRWLTEARKKTVVQIPAPTTAKQVREFLGKAGFCRLFIPGFATLAAPLYPLTKPKGEFSWAPEHQKAFDAIKKALLSAPALALPDVTKPFTLYVDERKGVARGVLTQTLGPWRRPVAYLSKKLDPVASGWPVCLKAIAAVAILVKDADKLTLGQNITVIAPHALENIVRQPPDRWMTNARMTHYQSLLLTERVTFAPPAALNPATLLPEETDEPVTHDCHQLLIEETGVRKDLTDIPLTGEVLTWFTDGSSYVVEGKRMAGAAVVDGTRTIWASSLPEGTSAQKAELMALTQALRLAEGKSINIYTDSRYAFATAHVHGAIYKQRGWLTSAGREIKNKEEILSLLEALHLPKRLAIIHCPGHQKAKDPISRGNQMADRVAKQAAQGVNLLPAGKRTADGSEFEKRTADGSEFESPKKKAKVE

SEQ ID NO: 68 - protein, 2088 aa, synthetic construct
MPAAKRVKLDGGDKKYSIGLDIGTNSVGWAVITDEYKVPSKKFKVLGNTDRHSIKKNLIGALLFDSGETAEATRLKRTARRRYTRRKNRICYLQEIFSNEMAKVDDSFFHRLEESFLVEEDKKHERHPIFGNIVDEVAYHEKYPTIYHLRKKLVDSTDKADLRLIYLALAHMIKFRGHFLIEGDLNPDNSDVDKLFIQLVQTYNQLFEENPINASGVDAKAILSARLSKSRRLENLIAQLPGEKKNGLFGNLIALSLGLTPNFKSNFDLAEDAKLQLSKDTYDDDLDNLLAQIGDQYADLFLAAKNLSDAILLSDILRVNTEITKAPLSASMIKRYDEHHQDLTLLKALVRQQLPEKYKEIFFDQSKNGYAGYIDGGASQEEFYKFIKPILEKMDGTEELLVKLNREDLLRKQRTFDNGSIPHQIHLGELHAILRRQEDFYPFLKDNREKIEKILTFRIPYYVGPLARGNSRFAWMTRKSEETITPWNFEEVVDKGASAQSFIERMTNFDKNLPNEKVLPKHSLLYEYFTVYNELTKVKYVTEGMRKPAFLSGEQKKAIVDLLFKTNRKVTVKQLKEDYFKKIECFDSVEISGVEDRFNASLGTYHDLLKIIKDKDFLDNEENEDILEDIVLTLTLFEDREMIEERLKTYAHLFDDKVMKQLKRRRYTGWGRLSRKLINGIRDKQSGKTILDFLKSDGFANRNFMQLIHDDSLTFKEDIQKAQVSGQGDSLHEHIANLAGSPAIKKGILQTVKVVDELVKVMGRHKPENIVIEMARENQTTQKGQKNSRERMKRIEEGIKELGSQILKEHPVENTQLQNEKLYLYYLQNGRDMYVDQELDINRLSDYDVDHIVPQSFLKDDSIDNKVLTRSDKARGKSDNVPSEEVVKKMKNYWRQLLNAKLITQRKFDNLTKAERGGLSELDKAGFIKRQLVETRQITKHVAQILDSRMNTKYDENDKLIREVKVITLKSKLVSDFRKDFQFYKVREINNYHHAHDAYLNAVVGTALIKKYPKLESEFVYGDYKVYDVRKMIAKSEQEIGKATAKYFFYSNIMNFFKTEITLANGEIRKRPLIETNGETGEIVWDKGRDFATVRKVLSMPQVNIVKKTEVQTGGFSKESILPKRNSDKLIARKKDWDPKKYGGFDSPTVAYSVLVVAKVEKGKSKKLKSVKELLGITIMERSSFEKNPIDFLEAKGYKEVKKDLIIKLPKYSLFELENGRKRMLASAGELQKGNELALPSKYVNFLYLASHYEKLKGSPEDNEQKQLFVEQHKHYLDEIIEQISEFSKRVILADANLDKVLSAYNKHRDKPIREQAENIIHLFTLTNLGAPAAFKYFDTTIDRKRYTSTKEVLDATLIHQSITGLYETRIDLSQLGGDGGGGGGGSEAAAKGGLDDEYRLYSPLVKPDQNIQFWLEQFPQAWAETAGMGLAKQVPPQVIQLKASATPVSVRQYPLSKEAQEGIRPHVQRLIQQGILVPVQSPWNTPLLPVRKPGTNDYRPVQDLREVNKRVQDIHPTVPNPYNLLCALPPQRSWYTVLDLKDAFFCLRLHPTSQPLFAFEWRDPGTGRTGQLTWTRLPQGFKNSPTIFNEALHRDLANFRIQHPQVTLLQYVDDLLLAGATKQDCLEGTKALLLELSDLGYRASAKKAQICRREVTYLGYSLRDGQRWLTEARKKTVVQIPAPTTAKQVREFLGKAGFCRLFIPGFATLAAPLYPLTKPKGEFSWAPEHQKAFDAIKKALLSAPALALPDVTKPFTLYVDERKGVARGVLTQTLGPWRRPVAYLSKKLDPVASGWPVCLKAIAAVAILVKDADKLTLGQNITVIAPHALENIVRQPPDRWMTNARMTHYQSLLLTERVTFAPPAALNPATLLPEETDEPVTHDCHQLLIEETGVRKDLTDIPLTGEVLTWFTDGSSYVVEGKRMAGAAVVDGTRTIWASSLPEGTSAQKAELMALTQALRLAEGKSINIYTDSRYAFATAHVHGAIYKQRGWLTSAGREIKNKEEILSLLEALHLPKRLAIIHCPGHQKAKDPISRGNQMADRVAKQAAQGVNLLPAGKRTADGSEFEKRTADGSEFESPKKKAKVE

SEQ ID NO: 69 - protein, 2086 aa, synthetic construct
MPAAKRVKLDGGDKKYSIGLDIGTNSVGWAVITDEYKVPSKKFKVLGNTDRHSIKKNLIGALLFDSGETAEATRLKRTARRRYTRRKNRICYLQEIFSNEMAKVDDSFFHRLEESFLVEEDKKHERHPIFGNIVDEVAYHEKYPTIYHLRKKLVDSTDKADLRLIYLALAHMIKFRGHFLIEGDLNPDNSDVDKLFIQLVQTYNQLFEENPINASGVDAKAILSARLSKSRRLENLIAQLPGEKKNGLFGNLIALSLGLTPNFKSNFDLAEDAKLQLSKDTYDDDLDNLLAQIGDQYADLFLAAKNLSDAILLSDILRVNTEITKAPLSASMIKRYDEHHQDLTLLKALVRQQLPEKYKEIFFDQSKNGYAGYIDGGASQEEFYKFIKPILEKMDGTEELLVKLNREDLLRKQRTFDNGSIPHQIHLGELHAILRRQEDFYPFLKDNREKIEKILTFRIPYYVGPLARGNSRFAWMTRKSEETITPWNFEEVVDKGASAQSFIERMTNFDKNLPNEKVLPKHSLLYEYFTVYNELTKVKYVTEGMRKPAFLSGEQKKAIVDLLFKTNRKVTVKQLKEDYFKKIECFDSVEISGVEDRFNASLGTYHDLLKIIKDKDFLDNEENEDILEDIVLTLTLFEDREMIEERLKTYAHLFDDKVMKQLKRRRYTGWGRLSRKLINGIRDKQSGKTILDFLKSDGFANRNFMQLIHDDSLTFKEDIQKAQVSGQGDSLHEHIANLAGSPAIKKGILQTVKVVDELVKVMGRHKPENIVIEMARENQTTQKGQKNSRERMKRIEEGIKELGSQILKEHPVENTQLQNEKLYLYYLQNGRDMYVDQELDINRLSDYDVDHIVPQSFLKDDSIDNKVLTRSDKARGKSDNVPSEEVVKKMKNYWRQLLNAKLITQRKFDNLTKAERGGLSELDKAGFIKRQLVETRQITKHVAQILDSRMNTKYDENDKLIREVKVITLKSKLVSDFRKDFQFYKVREINNYHHAHDAYLNAVVGTALIKKYPKLESEFVYGDYKVYDVRKMIAKSEQEIGKATAKYFFYSNIMNFFKTEITLANGEIRKRPLIETNGETGEIVWDKGRDFATVRKVLSMPQVNIVKKTEVQTGGFSKESILPKRNSDKLIARKKDWDPKKYGGFDSPTVAYSVLVVAKVEKGKSKKLKSVKELLGITIMERSSFEKNPIDFLEAKGYKEVKKDLIIKLPKYSLFELENGRKRMLASAGELQKGNELALPSKYVNFLYLASHYEKLKGSPEDNEQKQLFVEQHKHYLDEIIEQISEFSKRVILADANLDKVLSAYNKHRDKPIREQAENIIHLFTLTNLGAPAAFKYFDTTIDRKRYTSTKEVLDATLIHQSITGLYETRIDLSQLGGDGGGSSPAPGGSGGLDDEYRLYSPLVKPDQNIQFWLEQFPQAWAETAGMGLAKQVPPQVIQLKASATPVSVRQYPLSKEAQEGIRPHVQRLIQQGILVPVQSPWNTPLLPVRKPGTNDYRPVQDLREVNKRVQDIHPTVPNPYNLLCALPPQRSWYTVLDLKDAFFCLRLHPTSQPLFAFEWRDPGTGRTGQLTWTRLPQGFKNSPTIFNEALHRDLANFRIQHPQVTLLQYVDDLLLAGATKQDCLEGTKALLLELSDLGYRASAKKAQICRREVTYLGYSLRDGQRWLTEARKKTVVQIPAPTTAKQVREFLGKAGFCRLFIPGFATLAAPLYPLTKPKGEFSWAPEHQKAFDAIKKALLSAPALALPDVTKPFTLYVDERKGVARGVLTQTLGPWRRPVAYLSKKLDPVASGWPVCLKAIAAVAILVKDADKLTLGQNITVIAPHALENIVRQPPDRWMTNARMTHYQSLLLTERVTFAPPAALNPATLLPEETDEPVTHDCHQLLIEETGVRKDLTDIPLTGEVLTWFTDGSSYVVEGKRMAGAAVVDGTRTIWASSLPEGTSAQKAELMALTQALRLAEGKSINIYTDSRYAFATAHVHGAIYKQRGWLTSAGREIKNKEEILSLLEALHLPKRLAIIHCPGHQKAKDPISRGNQMADRVAKQAAQGVNLLPAGKRTADGSEFEKRTADGSEFESPKKKAKVE

SEQ ID NO: 70 - protein, 2082 aa, synthetic construct
MPAAKRVKLDGGDKKYSIGLDIGTNSVGWAVITDEYKVPSKKFKVLGNTDRHSIKKNLIGALLFDSGETAEATRLKRTARRRYTRRKNRICYLQEIFSNEMAKVDDSFFHRLEESFLVEEDKKHERHPIFGNIVDEVAYHEKYPTIYHLRKKLVDSTDKADLRLIYLALAHMIKFRGHFLIEGDLNPDNSDVDKLFIQLVQTYNQLFEENPINASGVDAKAILSARLSKSRRLENLIAQLPGEKKNGLFGNLIALSLGLTPNFKSNFDLAEDAKLQLSKDTYDDDLDNLLAQIGDQYADLFLAAKNLSDAILLSDILRVNTEITKAPLSASMIKRYDEHHQDLTLLKALVRQQLPEKYKEIFFDQSKNGYAGYIDGGASQEEFYKFIKPILEKMDGTEELLVKLNREDLLRKQRTFDNGSIPHQIHLGELHAILRRQEDFYPFLKDNREKIEKILTFRIPYYVGPLARGNSRFAWMTRKSEETITPWNFEEVVDKGASAQSFIERMTNFDKNLPNEKVLPKHSLLYEYFTVYNELTKVKYVTEGMRKPAFLSGEQKKAIVDLLFKTNRKVTVKQLKEDYFKKIECFDSVEISGVEDRFNASLGTYHDLLKIIKDKDFLDNEENEDILEDIVLTLTLFEDREMIEERLKTYAHLFDDKVMKQLKRRRYTGWGRLSRKLINGIRDKQSGKTILDFLKSDGFANRNFMQLIHDDSLTFKEDIQKAQVSGQGDSLHEHIANLAGSPAIKKGILQTVKVVDELVKVMGRHKPENIVIEMARENQTTQKGQKNSRERMKRIEEGIKELGSQILKEHPVENTQLQNEKLYLYYLQNGRDMYVDQELDINRLSDYDVDHIVPQSFLKDDSIDNKVLTRSDKARGKSDNVPSEEVVKKMKNYWRQLLNAKLITQRKFDNLTKAERGGLSELDKAGFIKRQLVETRQITKHVAQILDSRMNTKYDENDKLIREVKVITLKSKLVSDFRKDFQFYKVREINNYHHAHDAYLNAVVGTALIKKYPKLESEFVYGDYKVYDVRKMIAKSEQEIGKATAKYFFYSNIMNFFKTEITLANGEIRKRPLIETNGETGEIVWDKGRDFATVRKVLSMPQVNIVKKTEVQTGGFSKESILPKRNSDKLIARKKDWDPKKYGGFDSPTVAYSVLVVAKVEKGKSKKLKSVKELLGITIMERSSFEKNPIDFLEAKGYKEVKKDLIIKLPKYSLFELENGRKRMLASAGELQKGNELALPSKYVNFLYLASHYEKLKGSPEDNEQKQLFVEQHKHYLDEIIEQISEFSKRVILADANLDKVLSAYNKHRDKPIREQAENIIHLFTLTNLGAPAAFKYFDTTIDRKRYTSTKEVLDATLIHQSITGLYETRIDLSQLGGDGGGGGGGGGLDDEYRLYSPLVKPDQNIQFWLEQFPQAWAETAGMGLAKQVPPQVIQLKASATPVSVRQYPLSKEAQEGIRPHVQRLIQQGILVPVQSPWNTPLLPVRKPGTNDYRPVQDLREVNKRVQDIHPTVPNPYNLLCALPPQRSWYTVLDLKDAFFCLRLHPTSQPLFAFEWRDPGTGRTGQLTWTRLPQGFKNSPTIFNEALHRDLANFRIQHPQVTLLQYVDDLLLAGATKQDCLEGTKALLLELSDLGYRASAKKAQICRREVTYLGYSLRDGQRWLTEARKKTVVQIPAPTTAKQVREFLGKAGFCRLFIPGFATLAAPLYPLTKPKGEFSWAPEHQKAFDAIKKALLSAPALALPDVTKPFTLYVDERKGVARGVLTQTLGPWRRPVAYLSKKLDPVASGWPVCLKAIAAVAILVKDADKLTLGQNITVIAPHALENIVRQPPDRWMTNARMTHYQSLLLTERVTFAPPAALNPATLLPEETDEPVTHDCHQLLIEETGVRKDLTDIPLTGEVLTWFTDGSSYVVEGKRMAGAAVVDGTRTIWASSLPEGTSAQKAELMALTQALRLAEGKSINIYTDSRYAFATAHVHGAIYKQRGWLTSAGREIKNKEEILSLLEALHLPKRLAIIHCPGHQKAKDPISRGNQMADRVAKQAAQGVNLLPAGKRTADGSEFEKRTADGSEFESPKKKAKVE

SEQ ID NO: 71 - protein, 2088 aa, synthetic construct
MPAAKRVKLDGGDKKYSIGLDIGTNSVGWAVITDEYKVPSKKFKVLGNTDRHSIKKNLIGALLFDSGETAEATRLKRTARRRYTRRKNRICYLQEIFSNEMAKVDDSFFHRLEESFLVEEDKKHERHPIFGNIVDEVAYHEKYPTIYHLRKKLVDSTDKADLRLIYLALAHMIKFRGHFLIEGDLNPDNSDVDKLFIQLVQTYNQLFEENPINASGVDAKAILSARLSKSRRLENLIAQLPGEKKNGLFGNLIALSLGLTPNFKSNFDLAEDAKLQLSKDTYDDDLDNLLAQIGDQYADLFLAAKNLSDAILLSDILRVNTEITKAPLSASMIKRYDEHHQDLTLLKALVRQQLPEKYKEIFFDQSKNGYAGYIDGGASQEEFYKFIKPILEKMDGTEELLVKLNREDLLRKQRTFDNGSIPHQIHLGELHAILRRQEDFYPFLKDNREKIEKILTFRIPYYVGPLARGNSRFAWMTRKSEETITPWNFEEVVDKGASAQSFIERMTNFDKNLPNEKVLPKHSLLYEYFTVYNELTKVKYVTEGMRKPAFLSGEQKKAIVDLLFKTNRKVTVKQLKEDYFKKIECFDSVEISGVEDRFNASLGTYHDLLKIIKDKDFLDNEENEDILEDIVLTLTLFEDREMIEERLKTYAHLFDDKVMKQLKRRRYTGWGRLSRKLINGIRDKQSGKTILDFLKSDGFANRNFMQLIHDDSLTFKEDIQKAQVSGQGDSLHEHIANLAGSPAIKKGILQTVKVVDELVKVMGRHKPENIVIEMARENQTTQKGQKNSRERMKRIEEGIKELGSQILKEHPVENTQLQNEKLYLYYLQNGRDMYVDQELDINRLSDYDVDHIVPQSFLKDDSIDNKVLTRSDKARGKSDNVPSEEVVKKMKNYWRQLLNAKLITQRKFDNLTKAERGGLSELDKAGFIKRQLVETRQITKHVAQILDSRMNTKYDENDKLIREVKVITLKSKLVSDFRKDFQFYKVREINNYHHAHDAYLNAVVGTALIKKYPKLESEFVYGDYKVYDVRKMIAKSEQEIGKATAKYFFYSNIMNFFKTEITLANGEIRKRPLIETNGETGEIVWDKGRDFATVRKVLSMPQVNIVKKTEVQTGGFSKESILPKRNSDKLIARKKDWDPKKYGGFDSPTVAYSVLVVAKVEKGKSKKLKSVKELLGITIMERSSFEKNPIDFLEAKGYKEVKKDLIIKLPKYSLFELENGRKRMLASAGELQKGNELALPSKYVNFLYLASHYEKLKGSPEDNEQKQLFVEQHKHYLDEIIEQISEFSKRVILADANLDKVLSAYNKHRDKPIREQAENIIHLFTLTNLGAPAAFKYFDTTIDRKRYTSTKEVLDATLIHQSITGLYETRIDLSQLGGDGGEAAAKGGSGSSGGLDDEYRLYSPLVKPDQNIQFWLEQFPQAWAETAGMGLAKQVPPQVIQLKASATPVSVRQYPLSKEAQEGIRPHVQRLIQQGILVPVQSPWNTPLLPVRKPGTNDYRPVQDLREVNKRVQDIHPTVPNPYNLLCALPPQRSWYTVLDLKDAFFCLRLHPTSQPLFAFEWRDPGTGRTGQLTWTRLPQGFKNSPTIFNEALHRDLANFRIQHPQVTLLQYVDDLLLAGATKQDCLEGTKALLLELSDLGYRASAKKAQICRREVTYLGYSLRDGQRWLTEARKKTVVQIPAPTTAKQVREFLGKAGFCRLFIPGFATLAAPLYPLTKPKGEFSWAPEHQKAFDAIKKALLSAPALALPDVTKPFTLYVDERKGVARGVLTQTLGPWRRPVAYLSKKLDPVASGWPVCLKAIAAVAILVKDADKLTLGQNITVIAPHALENIVRQPPDRWMTNARMTHYQSLLLTERVTFAPPAALNPATLLPEETDEPVTHDCHQLLIEETGVRKDLTDIPLTGEVLTWFTDGSSYVVEGKRMAGAAVVDGTRTIWASSLPEGTSAQKAELMALTQALRLAEGKSINIYTDSRYAFATAHVHGAIYKQRGWLTSAGREIKNKEEILSLLEALHLPKRLAIIHCPGHQKAKDPISRGNQMADRVAKQAAQGVNLLPAGKRTADGSEFEKRTADGSEFESPKKKAKVE

SEQ ID NO: 72 - protein, 2088 aa, synthetic construct
MPAAKRVKLDGGDKKYSIGLDIGTNSVGWAVITDEYKVPSKKFKVLGNTDRHSIKKNLIGALLFDSGETAEATRLKRTARRRYTRRKNRICYLQEIFSNEMAKVDDSFFHRLEESFLVEEDKKHERHPIFGNIVDEVAYHEKYPTIYHLRKKLVDSTDKADLRLIYLALAHMIKFRGHFLIEGDLNPDNSDVDKLFIQLVQTYNQLFEENPINASGVDAKAILSARLSKSRRLENLIAQLPGEKKNGLFGNLIALSLGLTPNFKSNFDLAEDAKLQLSKDTYDDDLDNLLAQIGDQYADLFLAAKNLSDAILLSDILRVNTEITKAPLSASMIKRYDEHHQDLTLLKALVRQQLPEKYKEIFFDQSKNGYAGYIDGGASQEEFYKFIKPILEKMDGTEELLVKLNREDLLRKQRTFDNGSIPHQIHLGELHAILRRQEDFYPFLKDNREKIEKILTFRIPYYVGPLARGNSRFAWMTRKSEETITPWNFEEVVDKGASAQSFIERMTNFDKNLPNEKVLPKHSLLYEYFTVYNELTKVKYVTEGMRKPAFLSGEQKKAIVDLLFKTNRKVTVKQLKEDYFKKIECFDSVEISGVEDRFNASLGTYHDLLKIIKDKDFLDNEENEDILEDIVLTLTLFEDREMIEERLKTYAHLFDDKVMKQLKRRRYTGWGRLSRKLINGIRDKQSGKTILDFLKSDGFANRNFMQLIHDDSLTFKEDIQKAQVSGQGDSLHEHIANLAGSPAIKKGILQTVKVVDELVKVMGRHKPENIVIEMARENQTTQKGQKNSRERMKRIEEGIKELGSQILKEHPVENTQLQNEKLYLYYLQNGRDMYVDQELDINRLSDYDVDHIVPQSFLKDDSIDNKVLTRSDKARGKSDNVPSEEVVKKMKNYWRQLLNAKLITQRKFDNLTKAERGGLSELDKAGFIKRQLVETRQITKHVAQILDSRMNTKYDENDKLIREVKVITLKSKLVSDFRKDFQFYKVREINNYHHAHDAYLNAVVGTALIKKYPKLESEFVYGDYKVYDVRKMIAKSEQEIGKATAKYFFYSNIMNFFKTEITLANGEIRKRPLIETNGETGEIVWDKGRDFATVRKVLSMPQVNIVKKTEVQTGGFSKESILPKRNSDKLIARKKDWDPKKYGGFDSPTVAYSVLVVAKVEKGKSKKLKSVKELLGITIMERSSFEKNPIDFLEAKGYKEVKKDLIIKLPKYSLFELENGRKRMLASAGELQKGNELALPSKYVNFLYLASHYEKLKGSPEDNEQKQLFVEQHKHYLDEIIEQISEFSKRVILADANLDKVLSAYNKHRDKPIREQAENIIHLFTLTNLGAPAAFKYFDTTIDRKRYTSTKEVLDATLIHQSITGLYETRIDLSQLGGDGGEAAAKGGSGGGGGLDDEYRLYSPLVKPDQNIQFWLEQFPQAWAETAGMGLAKQVPPQVIQLKASATPVSVRQYPLSKEAQEGIRPHVQRLIQQGILVPVQSPWNTPLLPVRKPGTNDYRPVQDLREVNKRVQDIHPTVPNPYNLLCALPPQRSWYTVLDLKDAFFCLRLHPTSQPLFAFEWRDPGTGRTGQLTWTRLPQGFKNSPTIFNEALHRDLANFRIQHPQVTLLQYVDDLLLAGATKQDCLEGTKALLLELSDLGYRASAKKAQICRREVTYLGYSLRDGQRWLTEARKKTVVQIPAPTTAKQVREFLGKAGFCRLFIPGFATLAAPLYPLTKPKGEFSWAPEHQKAFDAIKKALLSAPALALPDVTKPFTLYVDERKGVARGVLTQTLGPWRRPVAYLSKKLDPVASGWPVCLKAIAAVAILVKDADKLTLGQNITVIAPHALENIVRQPPDRWMTNARMTHYQSLLLTERVTFAPPAALNPATLLPEETDEPVTHDCHQLLIEETGVRKDLTDIPLTGEVLTWFTDGSSYVVEGKRMAGAAVVDGTRTIWASSLPEGTSAQKAELMALTQALRLAEGKSINIYTDSRYAFATAHVHGAIYKQRGWLTSAGREIKNKEEILSLLEALHLPKRLAIIHCPGHQKAKDPISRGNQMADRVAKQAAQGVNLLPAGKRTADGSEFEKRTADGSEFESPKKKAKVE

SEQ ID NO: 73 - protein, 2086 aa, synthetic construct
MPAAKRVKLDGGDKKYSIGLDIGTNSVGWAVITDEYKVPSKKFKVLGNTDRHSIKKNLIGALLFDSGETAEATRLKRTARRRYTRRKNRICYLQEIFSNEMAKVDDSFFHRLEESFLVEEDKKHERHPIFGNIVDEVAYHEKYPTIYHLRKKLVDSTDKADLRLIYLALAHMIKFRGHFLIEGDLNPDNSDVDKLFIQLVQTYNQLFEENPINASGVDAKAILSARLSKSRRLENLIAQLPGEKKNGLFGNLIALSLGLTPNFKSNFDLAEDAKLQLSKDTYDDDLDNLLAQIGDQYADLFLAAKNLSDAILLSDILRVNTEITKAPLSASMIKRYDEHHQDLTLLKALVRQQLPEKYKEIFFDQSKNGYAGYIDGGASQEEFYKFIKPILEKMDGTEELLVKLNREDLLRKQRTFDNGSIPHQIHLGELHAILRRQEDFYPFLKDNREKIEKILTFRIPYYVGPLARGNSRFAWMTRKSEETITPWNFEEVVDKGASAQSFIERMTNFDKNLPNEKVLPKHSLLYEYFTVYNELTKVKYVTEGMRKPAFLSGEQKKAIVDLLFKTNRKVTVKQLKEDYFKKIECFDSVEISGVEDRFNASLGTYHDLLKIIKDKDFLDNEENEDILEDIVLTLTLFEDREMIEERLKTYAHLFDDKVMKQLKRRRYTGWGRLSRKLINGIRDKQSGKTILDFLKSDGFANRNFMQLIHDDSLTFKEDIQKAQVSGQGDSLHEHIANLAGSPAIKKGILQTVKVVDELVKVMGRHKPENIVIEMARENQTTQKGQKNSRERMKRIEEGIKELGSQILKEHPVENTQLQNEKLYLYYLQNGRDMYVDQELDINRLSDYDVDHIVPQSFLKDDSIDNKVLTRSDKARGKSDNVPSEEVVKKMKNYWRQLLNAKLITQRKFDNLTKAERGGLSELDKAGFIKRQLVETRQITKHVAQILDSRMNTKYDENDKLIREVKVITLKSKLVSDFRKDFQFYKVREINNYHHAHDAYLNAVVGTALIKKYPKLESEFVYGDYKVYDVRKMIAKSEQEIGKATAKYFFYSNIMNFFKTEITLANGEIRKRPLIETNGETGEIVWDKGRDFATVRKVLSMPQVNIVKKTEVQTGGFSKESILPKRNSDKLIARKKDWDPKKYGGFDSPTVAYSVLVVAKVEKGKSKKLKSVKELLGITIMERSSFEKNPIDFLEAKGYKEVKKDLIIKLPKYSLFELENGRKRMLASAGELQKGNELALPSKYVNFLYLASHYEKLKGSPEDNEQKQLFVEQHKHYLDEIIEQISEFSKRVILADANLDKVLSAYNKHRDKPIREQAENIIHLFTLTNLGAPAAFKYFDTTIDRKRYTSTKEVLDATLIHQSITGLYETRIDLSQLGGDGGGSSPAPGGGGGLDDEYRLYSPLVKPDQNIQFWLEQFPQAWAETAGMGLAKQVPPQVIQLKASATPVSVRQYPLSKEAQEGIRPHVQRLIQQGILVPVQSPWNTPLLPVRKPGTNDYRPVQDLREVNKRVQDIHPTVPNPYNLLCALPPQRSWYTVLDLKDAFFCLRLHPTSQPLFAFEWRDPGTGRTGQLTWTRLPQGFKNSPTIFNEALHRDLANFRIQHPQVTLLQYVDDLLLAGATKQDCLEGTKALLLELSDLGYRASAKKAQICRREVTYLGYSLRDGQRWLTEARKKTVVQIPAPTTAKQVREFLGKAGFCRLFIPGFATLAAPLYPLTKPKGEFSWAPEHQKAFDAIKKALLSAPALALPDVTKPFTLYVDERKGVARGVLTQTLGPWRRPVAYLSKKLDPVASGWPVCLKAIAAVAILVKDADKLTLGQNITVIAPHALENIVRQPPDRWMTNARMTHYQSLLLTERVTFAPPAALNPATLLPEETDEPVTHDCHQLLIEETGVRKDLTDIPLTGEVLTWFTDGSSYVVEGKRMAGAAVVDGTRTIWASSLPEGTSAQKAELMALTQALRLAEGKSINIYTDSRYAFATAHVHGAIYKQRGWLTSAGREIKNKEEILSLLEALHLPKRLAIIHCPGHQKAKDPISRGNQMADRVAKQAAQGVNLLPAGKRTADGSEFEKRTADGSEFESPKKKAKVE

SEQ ID NO: 74 - protein, 2089 aa, synthetic construct
MPAAKRVKLDGGDKKYSIGLDIGTNSVGWAVITDEYKVPSKKFKVLGNTDRHSIKKNLIGALLFDSGETAEATRLKRTARRRYTRRKNRICYLQEIFSNEMAKVDDSFFHRLEESFLVEEDKKHERHPIFGNIVDEVAYHEKYPTIYHLRKKLVDSTDKADLRLIYLALAHMIKFRGHFLIEGDLNPDNSDVDKLFIQLVQTYNQLFEENPINASGVDAKAILSARLSKSRRLENLIAQLPGEKKNGLFGNLIALSLGLTPNFKSNFDLAEDAKLQLSKDTYDDDLDNLLAQIGDQYADLFLAAKNLSDAILLSDILRVNTEITKAPLSASMIKRYDEHHQDLTLLKALVRQQLPEKYKEIFFDQSKNGYAGYIDGGASQEEFYKFIKPILEKMDGTEELLVKLNREDLLRKQRTFDNGSIPHQIHLGELHAILRRQEDFYPFLKDNREKIEKILTFRIPYYVGPLARGNSRFAWMTRKSEETITPWNFEEVVDKGASAQSFIERMTNFDKNLPNEKVLPKHSLLYEYFTVYNELTKVKYVTEGMRKPAFLSGEQKKAIVDLLFKTNRKVTVKQLKEDYFKKIECFDSVEISGVEDRFNASLGTYHDLLKIIKDKDFLDNEENEDILEDIVLTLTLFEDREMIEERLKTYAHLFDDKVMKQLKRRRYTGWGRLSRKLINGIRDKQSGKTILDFLKSDGFANRNFMQLIHDDSLTFKEDIQKAQVSGQGDSLHEHIANLAGSPAIKKGILQTVKVVDELVKVMGRHKPENIVIEMARENQTTQKGQKNSRERMKRIEEGIKELGSQILKEHPVENTQLQNEKLYLYYLQNGRDMYVDQELDINRLSDYDVDHIVPQSFLKDDSIDNKVLTRSDKARGKSDNVPSEEVVKKMKNYWRQLLNAKLITQRKFDNLTKAERGGLSELDKAGFIKRQLVETRQITKHVAQILDSRMNTKYDENDKLIREVKVITLKSKLVSDFRKDFQFYKVREINNYHHAHDAYLNAVVGTALIKKYPKLESEFVYGDYKVYDVRKMIAKSEQEIGKATAKYFFYSNIMNFFKTEITLANGEIRKRPLIETNGETGEIVWDKGRDFATVRKVLSMPQVNIVKKTEVQTGGFSKESILPKRNSDKLIARKKDWDPKKYGGFDSPTVAYSVLVVAKVEKGKSKKLKSVKELLGITIMERSSFEKNPIDFLEAKGYKEVKKDLIIKLPKYSLFELENGRKRMLASAGELQKGNELALPSKYVNFLYLASHYEKLKGSPEDNEQKQLFVEQHKHYLDEIIEQISEFSKRVILADANLDKVLSAYNKHRDKPIREQAENIIHLFTLTNLGAPAAFKYFDTTIDRKRYTSTKEVLDATLIHQSITGLYETRIDLSQLGGDGGGSAGSAAGSGEFGGLDDEYRLYSPLVKPDQNIQFWLEQFPQAWAETAGMGLAKQVPPQVIQLKASATPVSVRQYPLSKEAQEGIRPHVQRLIQQGILVPVQSPWNTPLLPVRKPGTNDYRPVQDLREVNKRVQDIHPTVPNPYNLLCALPPQRSWYTVLDLKDAFFCLRLHPTSQPLFAFEWRDPGTGRTGQLTWTRLPQGFKNSPTIFNEALHRDLANFRIQHPQVTLLQYVDDLLLAGATKQDCLEGTKALLLELSDLGYRASAKKAQICRREVTYLGYSLRDGQRWLTEARKKTVVQIPAPTTAKQVREFLGKAGFCRLFIPGFATLAAPLYPLTKPKGEFSWAPEHQKAFDAIKKALLSAPALALPDVTKPFTLYVDERKGVARGVLTQTLGPWRRPVAYLSKKLDPVASGWPVCLKAIAAVAILVKDADKLTLGQNITVIAPHALENIVRQPPDRWMTNARMTHYQSLLLTERVTFAPPAALNPATLLPEETDEPVTHDCHQLLIEETGVRKDLTDIPLTGEVLTWFTDGSSYVVEGKRMAGAAVVDGTRTIWASSLPEGTSAQKAELMALTQALRLAEGKSINIYTDSRYAFATAHVHGAIYKQRGWLTSAGREIKNKEEILSLLEALHLPKRLAIIHCPGHQKAKDPISRGNQMADRVAKQAAQGVNLLPAGKRTADGSEFEKRTADGSEFESPKKKAKVE

SEQ ID NO: 75 - protein, 2092 aa, synthetic construct
MPAAKRVKLDGGDKKYSIGLDIGTNSVGWAVITDEYKVPSKKFKVLGNTDRHSIKKNLIGALLFDSGETAEATRLKRTARRRYTRRKNRICYLQEIFSNEMAKVDDSFFHRLEESFLVEEDKKHERHPIFGNIVDEVAYHEKYPTIYHLRKKLVDSTDKADLRLIYLALAHMIKFRGHFLIEGDLNPDNSDVDKLFIQLVQTYNQLFEENPINASGVDAKAILSARLSKSRRLENLIAQLPGEKKNGLFGNLIALSLGLTPNFKSNFDLAEDAKLQLSKDTYDDDLDNLLAQIGDQYADLFLAAKNLSDAILLSDILRVNTEITKAPLSASMIKRYDEHHQDLTLLKALVRQQLPEKYKEIFFDQSKNGYAGYIDGGASQEEFYKFIKPILEKMDGTEELLVKLNREDLLRKQRTFDNGSIPHQIHLGELHAILRRQEDFYPFLKDNREKIEKILTFRIPYYVGPLARGNSRFAWMTRKSEETITPWNFEEVVDKGASAQSFIERMTNFDKNLPNEKVLPKHSLLYEYFTVYNELTKVKYVTEGMRKPAFLSGEQKKAIVDLLFKTNRKVTVKQLKEDYFKKIECFDSVEISGVEDRFNASLGTYHDLLKIIKDKDFLDNEENEDILEDIVLTLTLFEDREMIEERLKTYAHLFDDKVMKQLKRRRYTGWGRLSRKLINGIRDKQSGKTILDFLKSDGFANRNFMQLIHDDSLTFKEDIQKAQVSGQGDSLHEHIANLAGSPAIKKGILQTVKVVDELVKVMGRHKPENIVIEMARENQTTQKGQKNSRERMKRIEEGIKELGSQILKEHPVENTQLQNEKLYLYYLQNGRDMYVDQELDINRLSDYDVDHIVPQSFLKDDSIDNKVLTRSDKARGKSDNVPSEEVVKKMKNYWRQLLNAKLITQRKFDNLTKAERGGLSELDKAGFIKRQLVETRQITKHVAQILDSRMNTKYDENDKLIREVKVITLKSKLVSDFRKDFQFYKVREINNYHHAHDAYLNAVVGTALIKKYPKLESEFVYGDYKVYDVRKMIAKSEQEIGKATAKYFFYSNIMNFFKTEITLANGEIRKRPLIETNGETGEIVWDKGRDFATVRKVLSMPQVNIVKKTEVQTGGFSKESILPKRNSDKLIARKKDWDPKKYGGFDSPTVAYSVLVVAKVEKGKSKKLKSVKELLGITIMERSSFEKNPIDFLEAKGYKEVKKDLIIKLPKYSLFELENGRKRMLASAGELQKGNELALPSKYVNFLYLASHYEKLKGSPEDNEQKQLFVEQHKHYLDEIIEQISEFSKRVILADANLDKVLSAYNKHRDKPIREQAENIIHLFTLTNLGAPAAFKYFDTTIDRKRYTSTKEVLDATLIHQSITGLYETRIDLSQLGGDGGGGGGSEAAAKGGGGSGGLDDEYRLYSPLVKPDQNIQFWLEQFPQAWAETAGMGLAKQVPPQVIQLKASATPVSVRQYPLSKEAQEGIRPHVQRLIQQGILVPVQSPWNTPLLPVRKPGTNDYRPVQDLREVNKRVQDIHPTVPNPYNLLCALPPQRSWYTVLDLKDAFFCLRLHPTSQPLFAFEWRDPGTGRTGQLTWTRLPQGFKNSPTIFNEALHRDLANFRIQHPQVTLLQYVDDLLLAGATKQDCLEGTKALLLELSDLGYRASAKKAQICRREVTYLGYSLRDGQRWLTEARKKTVVQIPAPTTAKQVREFLGKAGFCRLFIPGFATLAAPLYPLTKPKGEFSWAPEHQKAFDAIKKALLSAPALALPDVTKPFTLYVDERKGVARGVLTQTLGPWRRPVAYLSKKLDPVASGWPVCLKAIAAVAILVKDADKLTLGQNITVIAPHALENIVRQPPDRWMTNARMTHYQSLLLTERVTFAPPAALNPATLLPEETDEPVTHDCHQLLIEETGVRKDLTDIPLTGEVLTWFTDGSSYVVEGKRMAGAAVVDGTRTIWASSLPEGTSAQKAELMALTQALRLAEGKSINIYTDSRYAFATAHVHGAIYKQRGWLTSAGREIKNKEEILSLLEALHLPKRLAIIHCPGHQKAKDPISRGNQMADRVAKQAAQGVNLLPAGKRTADGSEFEKRTADGSEFESPKKKAKVE

SEQ ID NO: 76 - protein, 2083 aa, synthetic construct
MPAAKRVKLDGGDKKYSIGLDIGTNSVGWAVITDEYKVPSKKFKVLGNTDRHSIKKNLIGALLFDSGETAEATRLKRTARRRYTRRKNRICYLQEIFSNEMAKVDDSFFHRLEESFLVEEDKKHERHPIFGNIVDEVAYHEKYPTIYHLRKKLVDSTDKADLRLIYLALAHMIKFRGHFLIEGDLNPDNSDVDKLFIQLVQTYNQLFEENPINASGVDAKAILSARLSKSRRLENLIAQLPGEKKNGLFGNLIALSLGLTPNFKSNFDLAEDAKLQLSKDTYDDDLDNLLAQIGDQYADLFLAAKNLSDAILLSDILRVNTEITKAPLSASMIKRYDEHHQDLTLLKALVRQQLPEKYKEIFFDQSKNGYAGYIDGGASQEEFYKFIKPILEKMDGTEELLVKLNREDLLRKQRTFDNGSIPHQIHLGELHAILRRQEDFYPFLKDNREKIEKILTFRIPYYVGPLARGNSRFAWMTRKSEETITPWNFEEVVDKGASAQSFIERMTNFDKNLPNEKVLPKHSLLYEYFTVYNELTKVKYVTEGMRKPAFLSGEQKKAIVDLLFKTNRKVTVKQLKEDYFKKIECFDSVEISGVEDRFNASLGTYHDLLKIIKDKDFLDNEENEDILEDIVLTLTLFEDREMIEERLKTYAHLFDDKVMKQLKRRRYTGWGRLSRKLINGIRDKQSGKTILDFLKSDGFANRNFMQLIHDDSLTFKEDIQKAQVSGQGDSLHEHIANLAGSPAIKKGILQTVKVVDELVKVMGRHKPENIVIEMARENQTTQKGQKNSRERMKRIEEGIKELGSQILKEHPVENTQLQNEKLYLYYLQNGRDMYVDQELDINRLSDYDVDHIVPQSFLKDDSIDNKVLTRSDKARGKSDNVPSEEVVKKMKNYWRQLLNAKLITQRKFDNLTKAERGGLSELDKAGFIKRQLVETRQITKHVAQILDSRMNTKYDENDKLIREVKVITLKSKLVSDFRKDFQFYKVREINNYHHAHDAYLNAVVGTALIKKYPKLESEFVYGDYKVYDVRKMIAKSEQEIGKATAKYFFYSNIMNFFKTEITLANGEIRKRPLIETNGETGEIVWDKGRDFATVRKVLSMPQVNIVKKTEVQTGGFSKESILPKRNSDKLIARKKDWDPKKYGGFDSPTVAYSVLVVAKVEKGKSKKLKSVKELLGITIMERSSFEKNPIDFLEAKGYKEVKKDLIIKLPKYSLFELENGRKRMLASAGELQKGNELALPSKYVNFLYLASHYEKLKGSPEDNEQKQLFVEQHKHYLDEIIEQISEFSKRVILADANLDKVLSAYNKHRDKPIREQAENIIHLFTLTNLGAPAAFKYFDTTIDRKRYTSTKEVLDATLIHQSITGLYETRIDLSQLGGDGGGGGPAPGGLDDEYRLYSPLVKPDQNIQFWLEQFPQAWAETAGMGLAKQVPPQVIQLKASATPVSVRQYPLSKEAQEGIRPHVQRLIQQGILVPVQSPWNTPLLPVRKPGTNDYRPVQDLREVNKRVQDIHPTVPNPYNLLCALPPQRSWYTVLDLKDAFFCLRLHPTSQPLFAFEWRDPGTGRTGQLTWTRLPQGFKNSPTIFNEALHRDLANFRIQHPQVTLLQYVDDLLLAGATKQDCLEGTKALLLELSDLGYRASAKKAQICRREVTYLGYSLRDGQRWLTEARKKTVVQIPAPTTAKQVREFLGKAGFCRLFIPGFATLAAPLYPLTKPKGEFSWAPEHQKAFDAIKKALLSAPALALPDVTKPFTLYVDERKGVARGVLTQTLGPWRRPVAYLSKKLDPVASGWPVCLKAIAAVAILVKDADKLTLGQNITVIAPHALENIVRQPPDRWMTNARMTHYQSLLLTERVTFAPPAALNPATLLPEETDEPVTHDCHQLLIEETGVRKDLTDIPLTGEVLTWFTDGSSYVVEGKRMAGAAVVDGTRTIWASSLPEGTSAQKAELMALTQALRLAEGKSINIYTDSRYAFATAHVHGAIYKQRGWLTSAGREIKNKEEILSLLEALHLPKRLAIIHCPGHQKAKDPISRGNQMADRVAKQAAQGVNLLPAGKRTADGSEFEKRTADGSEFESPKKKAKVE

SEQ ID NO: 77 - protein, 2084 aa, synthetic construct
MPAAKRVKLDGGDKKYSIGLDIGTNSVGWAVITDEYKVPSKKFKVLGNTDRHSIKKNLIGALLFDSGETAEATRLKRTARRRYTRRKNRICYLQEIFSNEMAKVDDSFFHRLEESFLVEEDKKHERHPIFGNIVDEVAYHEKYPTIYHLRKKLVDSTDKADLRLIYLALAHMIKFRGHFLIEGDLNPDNSDVDKLFIQLVQTYNQLFEENPINASGVDAKAILSARLSKSRRLENLIAQLPGEKKNGLFGNLIALSLGLTPNFKSNFDLAEDAKLQLSKDTYDDDLDNLLAQIGDQYADLFLAAKNLSDAILLSDILRVNTEITKAPLSASMIKRYDEHHQDLTLLKALVRQQLPEKYKEIFFDQSKNGYAGYIDGGASQEEFYKFIKPILEKMDGTEELLVKLNREDLLRKQRTFDNGSIPHQIHLGELHAILRRQEDFYPFLKDNREKIEKILTFRIPYYVGPLARGNSRFAWMTRKSEETITPWNFEEVVDKGASAQSFIERMTNFDKNLPNEKVLPKHSLLYEYFTVYNELTKVKYVTEGMRKPAFLSGEQKKAIVDLLFKTNRKVTVKQLKEDYFKKIECFDSVEISGVEDRFNASLGTYHDLLKIIKDKDFLDNEENEDILEDIVLTLTLFEDREMIEERLKTYAHLFDDKVMKQLKRRRYTGWGRLSRKLINGIRDKQSGKTILDFLKSDGFANRNFMQLIHDDSLTFKEDIQKAQVSGQGDSLHEHIANLAGSPAIKKGILQTVKVVDELVKVMGRHKPENIVIEMARENQTTQKGQKNSRERMKRIEEGIKELGSQILKEHPVENTQLQNEKLYLYYLQNGRDMYVDQELDINRLSDYDVDHIVPQSFLKDDSIDNKVLTRSDKARGKSDNVPSEEVVKKMKNYWRQLLNAKLITQRKFDNLTKAERGGLSELDKAGFIKRQLVETRQITKHVAQILDSRMNTKYDENDKLIREVKVITLKSKLVSDFRKDFQFYKVREINNYHHAHDAYLNAVVGTALIKKYPKLESEFVYGDYKVYDVRKMIAKSEQEIGKATAKYFFYSNIMNFFKTEITLANGEIRKRPLIETNGETGEIVWDKGRDFATVRKVLSMPQVNIVKKTEVQTGGFSKESILPKRNSDKLIARKKDWDPKKYGGFDSPTVAYSVLVVAKVEKGKSKKLKSVKELLGITIMERSSFEKNPIDFLEAKGYKEVKKDLIIKLPKYSLFELENGRKRMLASAGELQKGNELALPSKYVNFLYLASHYEKLKGSPEDNEQKQLFVEQHKHYLDEIIEQISEFSKRVILADANLDKVLSAYNKHRDKPIREQAENIIHLFTLTNLGAPAAFKYFDTTIDRKRYTSTKEVLDATLIHQSITGLYETRIDLSQLGGDGGGGGGGGGGGLDDEYRLYSPLVKPDQNIQFWLEQFPQAWAETAGMGLAKQVPPQVIQLKASATPVSVRQYPLSKEAQEGIRPHVQRLIQQGILVPVQSPWNTPLLPVRKPGTNDYRPVQDLREVNKRVQDIHPTVPNPYNLLCALPPQRSWYTVLDLKDAFFCLRLHPTSQPLFAFEWRDPGTGRTGQLTWTRLPQGFKNSPTIFNEALHRDLANFRIQHPQVTLLQYVDDLLLAGATKQDCLEGTKALLLELSDLGYRASAKKAQICRREVTYLGYSLRDGQRWLTEARKKTVVQIPAPTTAKQVREFLGKAGFCRLFIPGFATLAAPLYPLTKPKGEFSWAPEHQKAFDAIKKALLSAPALALPDVTKPFTLYVDERKGVARGVLTQTLGPWRRPVAYLSKKLDPVASGWPVCLKAIAAVAILVKDADKLTLGQNITVIAPHALENIVRQPPDRWMTNARMTHYQSLLLTERVTFAPPAALNPATLLPEETDEPVTHDCHQLLIEETGVRKDLTDIPLTGEVLTWFTDGSSYVVEGKRMAGAAVVDGTRTIWASSLPEGTSAQKAELMALTQALRLAEGKSINIYTDSRYAFATAHVHGAIYKQRGWLTSAGREIKNKEEILSLLEALHLPKRLAIIHCPGHQKAKDPISRGNQMADRVAKQAAQGVNLLPAGKRTADGSEFEKRTADGSEFESPKKKAKVE

SEQ ID NO: 78 - protein, 2083 aa, synthetic construct
MPAAKRVKLDGGDKKYSIGLDIGTNSVGWAVITDEYKVPSKKFKVLGNTDRHSIKKNLIGALLFDSGETAEATRLKRTARRRYTRRKNRICYLQEIFSNEMAKVDDSFFHRLEESFLVEEDKKHERHPIFGNIVDEVAYHEKYPTIYHLRKKLVDSTDKADLRLIYLALAHMIKFRGHFLIEGDLNPDNSDVDKLFIQLVQTYNQLFEENPINASGVDAKAILSARLSKSRRLENLIAQLPGEKKNGLFGNLIALSLGLTPNFKSNFDLAEDAKLQLSKDTYDDDLDNLLAQIGDQYADLFLAAKNLSDAILLSDILRVNTEITKAPLSASMIKRYDEHHQDLTLLKALVRQQLPEKYKEIFFDQSKNGYAGYIDGGASQEEFYKFIKPILEKMDGTEELLVKLNREDLLRKQRTFDNGSIPHQIHLGELHAILRRQEDFYPFLKDNREKIEKILTFRIPYYVGPLARGNSRFAWMTRKSEETITPWNFEEVVDKGASAQSFIERMTNFDKNLPNEKVLPKHSLLYEYFTVYNELTKVKYVTEGMRKPAFLSGEQKKAIVDLLFKTNRKVTVKQLKEDYFKKIECFDSVEISGVEDRFNASLGTYHDLLKIIKDKDFLDNEENEDILEDIVLTLTLFEDREMIEERLKTYAHLFDDKVMKQLKRRRYTGWGRLSRKLINGIRDKQSGKTILDFLKSDGFANRNFMQLIHDDSLTFKEDIQKAQVSGQGDSLHEHIANLAGSPAIKKGILQTVKVVDELVKVMGRHKPENIVIEMARENQTTQKGQKNSRERMKRIEEGIKELGSQILKEHPVENTQLQNEKLYLYYLQNGRDMYVDQELDINRLSDYDVDHIVPQSFLKDDSIDNKVLTRSDKARGKSDNVPSEEVVKKMKNYWRQLLNAKLITQRKFDNLTKAERGGLSELDKAGFIKRQLVETRQITKHVAQILDSRMNTKYDENDKLIREVKVITLKSKLVSDFRKDFQFYKVREINNYHHAHDAYLNAVVGTALIKKYPKLESEFVYGDYKVYDVRKMIAKSEQEIGKATAKYFFYSNIMNFFKTEITLANGEIRKRPLIETNGETGEIVWDKGRDFATVRKVLSMPQVNIVKKTEVQTGGFSKESILPKRNSDKLIARKKDWDPKKYGGFDSPTVAYSVLVVAKVEKGKSKKLKSVKELLGITIMERSSFEKNPIDFLEAKGYKEVKKDLIIKLPKYSLFELENGRKRMLASAGELQKGNELALPSKYVNFLYLASHYEKLKGSPEDNEQKQLFVEQHKHYLDEIIEQISEFSKRVILADANLDKVLSAYNKHRDKPIREQAENIIHLFTLTNLGAPAAFKYFDTTIDRKRYTSTKEVLDATLIHQSITGLYETRIDLSQLGGDGGGGSPAPGGLDDEYRLYSPLVKPDQNIQFWLEQFPQAWAETAGMGLAKQVPPQVIQLKASATPVSVRQYPLSKEAQEGIRPHVQRLIQQGILVPVQSPWNTPLLPVRKPGTNDYRPVQDLREVNKRVQDIHPTVPNPYNLLCALPPQRSWYTVLDLKDAFFCLRLHPTSQPLFAFEWRDPGTGRTGQLTWTRLPQGFKNSPTIFNEALHRDLANFRIQHPQVTLLQYVDDLLLAGATKQDCLEGTKALLLELSDLGYRASAKKAQICRREVTYLGYSLRDGQRWLTEARKKTVVQIPAPTTAKQVREFLGKAGFCRLFIPGFATLAAPLYPLTKPKGEFSWAPEHQKAFDAIKKALLSAPALALPDVTKPFTLYVDERKGVARGVLTQTLGPWRRPVAYLSKKLDPVASGWPVCLKAIAAVAILVKDADKLTLGQNITVIAPHALENIVRQPPDRWMTNARMTHYQSLLLTERVTFAPPAALNPATLLPEETDEPVTHDCHQLLIEETGVRKDLTDIPLTGEVLTWFTDGSSYVVEGKRMAGAAVVDGTRTIWASSLPEGTSAQKAELMALTQALRLAEGKSINIYTDSRYAFATAHVHGAIYKQRGWLTSAGREIKNKEEILSLLEALHLPKRLAIIHCPGHQKAKDPISRGNQMADRVAKQAAQGVNLLPAGKRTADGSEFEKRTADGSEFESPKKKAKVE

SEQ ID NO: 79 - protein, 2083 aa, synthetic construct
MPAAKRVKLDGGDKKYSIGLDIGTNSVGWAVITDEYKVPSKKFKVLGNTDRHSIKKNLIGALLFDSGETAEATRLKRTARRRYTRRKNRICYLQEIFSNEMAKVDDSFFHRLEESFLVEEDKKHERHPIFGNIVDEVAYHEKYPTIYHLRKKLVDSTDKADLRLIYLALAHMIKFRGHFLIEGDLNPDNSDVDKLFIQLVQTYNQLFEENPINASGVDAKAILSARLSKSRRLENLIAQLPGEKKNGLFGNLIALSLGLTPNFKSNFDLAEDAKLQLSKDTYDDDLDNLLAQIGDQYADLFLAAKNLSDAILLSDILRVNTEITKAPLSASMIKRYDEHHQDLTLLKALVRQQLPEKYKEIFFDQSKNGYAGYIDGGASQEEFYKFIKPILEKMDGTEELLVKLNREDLLRKQRTFDNGSIPHQIHLGELHAILRRQEDFYPFLKDNREKIEKILTFRIPYYVGPLARGNSRFAWMTRKSEETITPWNFEEVVDKGASAQSFIERMTNFDKNLPNEKVLPKHSLLYEYFTVYNELTKVKYVTEGMRKPAFLSGEQKKAIVDLLFKTNRKVTVKQLKEDYFKKIECFDSVEISGVEDRFNASLGTYHDLLKIIKDKDFLDNEENEDILEDIVLTLTLFEDREMIEERLKTYAHLFDDKVMKQLKRRRYTGWGRLSRKLINGIRDKQSGKTILDFLKSDGFANRNFMQLIHDDSLTFKEDIQKAQVSGQGDSLHEHIANLAGSPAIKKGILQTVKVVDELVKVMGRHKPENIVIEMARENQTTQKGQKNSRERMKRIEEGIKELGSQILKEHPVENTQLQNEKLYLYYLQNGRDMYVDQELDINRLSDYDVDHIVPQSFLKDDSIDNKVLTRSDKARGKSDNVPSEEVVKKMKNYWRQLLNAKLITQRKFDNLTKAERGGLSELDKAGFIKRQLVETRQITKHVAQILDSRMNTKYDENDKLIREVKVITLKSKLVSDFRKDFQFYKVREINNYHHAHDAYLNAVVGTALIKKYPKLESEFVYGDYKVYDVRKMIAKSEQEIGKATAKYFFYSNIMNFFKTEITLANGEIRKRPLIETNGETGEIVWDKGRDFATVRKVLSMPQVNIVKKTEVQTGGFSKESILPKRNSDKLIARKKDWDPKKYGGFDSPTVAYSVLVVAKVEKGKSKKLKSVKELLGITIMERSSFEKNPIDFLEAKGYKEVKKDLIIKLPKYSLFELENGRKRMLASAGELQKGNELALPSKYVNFLYLASHYEKLKGSPEDNEQKQLFVEQHKHYLDEIIEQISEFSKRVILADANLDKVLSAYNKHRDKPIREQAENIIHLFTLTNLGAPAAFKYFDTTIDRKRYTSTKEVLDATLIHQSITGLYETRIDLSQLGGDGGPAPGGGGGLDDEYRLYSPLVKPDQNIQFWLEQFPQAWAETAGMGLAKQVPPQVIQLKASATPVSVRQYPLSKEAQEGIRPHVQRLIQQGILVPVQSPWNTPLLPVRKPGTNDYRPVQDLREVNKRVQDIHPTVPNPYNLLCALPPQRSWYTVLDLKDAFFCLRLHPTSQPLFAFEWRDPGTGRTGQLTWTRLPQGFKNSPTIFNEALHRDLANFRIQHPQVTLLQYVDDLLLAGATKQDCLEGTKALLLELSDLGYRASAKKAQICRREVTYLGYSLRDGQRWLTEARKKTVVQIPAPTTAKQVREFLGKAGFCRLFIPGFATLAAPLYPLTKPKGEFSWAPEHQKAFDAIKKALLSAPALALPDVTKPFTLYVDERKGVARGVLTQTLGPWRRPVAYLSKKLDPVASGWPVCLKAIAAVAILVKDADKLTLGQNITVIAPHALENIVRQPPDRWMTNARMTHYQSLLLTERVTFAPPAALNPATLLPEETDEPVTHDCHQLLIEETGVRKDLTDIPLTGEVLTWFTDGSSYVVEGKRMAGAAVVDGTRTIWASSLPEGTSAQKAELMALTQALRLAEGKSINIYTDSRYAFATAHVHGAIYKQRGWLTSAGREIKNKEEILSLLEALHLPKRLAIIHCPGHQKAKDPISRGNQMADRVAKQAAQGVNLLPAGKRTADGSEFEKRTADGSEFESPKKKAKVE

SEQ ID NO: 80 - protein, 2088 aa, synthetic construct
MPAAKRVKLDGGDKKYSIGLDIGTNSVGWAVITDEYKVPSKKFKVLGNTDRHSIKKNLIGALLFDSGETAEATRLKRTARRRYTRRKNRICYLQEIFSNEMAKVDDSFFHRLEESFLVEEDKKHERHPIFGNIVDEVAYHEKYPTIYHLRKKLVDSTDKADLRLIYLALAHMIKFRGHFLIEGDLNPDNSDVDKLFIQLVQTYNQLFEENPINASGVDAKAILSARLSKSRRLENLIAQLPGEKKNGLFGNLIALSLGLTPNFKSNFDLAEDAKLQLSKDTYDDDLDNLLAQIGDQYADLFLAAKNLSDAILLSDILRVNTEITKAPLSASMIKRYDEHHQDLTLLKALVRQQLPEKYKEIFFDQSKNGYAGYIDGGASQEEFYKFIKPILEKMDGTEELLVKLNREDLLRKQRTFDNGSIPHQIHLGELHAILRRQEDFYPFLKDNREKIEKILTFRIPYYVGPLARGNSRFAWMTRKSEETITPWNFEEVVDKGASAQSFIERMTNFDKNLPNEKVLPKHSLLYEYFTVYNELTKVKYVTEGMRKPAFLSGEQKKAIVDLLFKTNRKVTVKQLKEDYFKKIECFDSVEISGVEDRFNASLGTYHDLLKIIKDKDFLDNEENEDILEDIVLTLTLFEDREMIEERLKTYAHLFDDKVMKQLKRRRYTGWGRLSRKLINGIRDKQSGKTILDFLKSDGFANRNFMQLIHDDSLTFKEDIQKAQVSGQGDSLHEHIANLAGSPAIKKGILQTVKVVDELVKVMGRHKPENIVIEMARENQTTQKGQKNSRERMKRIEEGIKELGSQILKEHPVENTQLQNEKLYLYYLQNGRDMYVDQELDINRLSDYDVDHIVPQSFLKDDSIDNKVLTRSDKARGKSDNVPSEEVVKKMKNYWRQLLNAKLITQRKFDNLTKAERGGLSELDKAGFIKRQLVETRQITKHVAQILDSRMNTKYDENDKLIREVKVITLKSKLVSDFRKDFQFYKVREINNYHHAHDAYLNAVVGTALIKKYPKLESEFVYGDYKVYDVRKMIAKSEQEIGKATAKYFFYSNIMNFFKTEITLANGEIRKRPLIETNGETGEIVWDKGRDFATVRKVLSMPQVNIVKKTEVQTGGFSKESILPKRNSDKLIARKKDWDPKKYGGFDSPTVAYSVLVVAKVEKGKSKKLKSVKELLGITIMERSSFEKNPIDFLEAKGYKEVKKDLIIKLPKYSLFELENGRKRMLASAGELQKGNELALPSKYVNFLYLASHYEKLKGSPEDNEQKQLFVEQHKHYLDEIIEQISEFSKRVILADANLDKVLSAYNKHRDKPIREQAENIIHLFTLTNLGAPAAFKYFDTTIDRKRYTSTKEVLDATLIHQSITGLYETRIDLSQLGGDGGGGSGSSEAAAKGGLDDEYRLYSPLVKPDQNIQFWLEQFPQAWAETAGMGLAKQVPPQVIQLKASATPVSVRQYPLSKEAQEGIRPHVQRLIQQGILVPVQSPWNTPLLPVRKPGTNDYRPVQDLREVNKRVQDIHPTVPNPYNLLCALPPQRSWYTVLDLKDAFFCLRLHPTSQPLFAFEWRDPGTGRTGQLTWTRLPQGFKNSPTIFNEALHRDLANFRIQHPQVTLLQYVDDLLLAGATKQDCLEGTKALLLELSDLGYRASAKKAQICRREVTYLGYSLRDGQRWLTEARKKTVVQIPAPTTAKQVREFLGKAGFCRLFIPGFATLAAPLYPLTKPKGEFSWAPEHQKAFDAIKKALLSAPALALPDVTKPFTLYVDERKGVARGVLTQTLGPWRRPVAYLSKKLDPVASGWPVCLKAIAAVAILVKDADKLTLGQNITVIAPHALENIVRQPPDRWMTNARMTHYQSLLLTERVTFAPPAALNPATLLPEETDEPVTHDCHQLLIEETGVRKDLTDIPLTGEVLTWFTDGSSYVVEGKRMAGAAVVDGTRTIWASSLPEGTSAQKAELMALTQALRLAEGKSINIYTDSRYAFATAHVHGAIYKQRGWLTSAGREIKNKEEILSLLEALHLPKRLAIIHCPGHQKAKDPISRGNQMADRVAKQAAQGVNLLPAGKRTADGSEFEKRTADGSEFESPKKKAKVE

SEQ ID NO: 81 - protein, 2083 aa, synthetic construct
MPAAKRVKLDGGDKKYSIGLDIGTNSVGWAVITDEYKVPSKKFKVLGNTDRHSIKKNLIGALLFDSGETAEATRLKRTARRRYTRRKNRICYLQEIFSNEMAKVDDSFFHRLEESFLVEEDKKHERHPIFGNIVDEVAYHEKYPTIYHLRKKLVDSTDKADLRLIYLALAHMIKFRGHFLIEGDLNPDNSDVDKLFIQLVQTYNQLFEENPINASGVDAKAILSARLSKSRRLENLIAQLPGEKKNGLFGNLIALSLGLTPNFKSNFDLAEDAKLQLSKDTYDDDLDNLLAQIGDQYADLFLAAKNLSDAILLSDILRVNTEITKAPLSASMIKRYDEHHQDLTLLKALVRQQLPEKYKEIFFDQSKNGYAGYIDGGASQEEFYKFIKPILEKMDGTEELLVKLNREDLLRKQRTFDNGSIPHQIHLGELHAILRRQEDFYPFLKDNREKIEKILTFRIPYYVGPLARGNSRFAWMTRKSEETITPWNFEEVVDKGASAQSFIERMTNFDKNLPNEKVLPKHSLLYEYFTVYNELTKVKYVTEGMRKPAFLSGEQKKAIVDLLFKTNRKVTVKQLKEDYFKKIECFDSVEISGVEDRFNASLGTYHDLLKIIKDKDFLDNEENEDILEDIVLTLTLFEDREMIEERLKTYAHLFDDKVMKQLKRRRYTGWGRLSRKLINGIRDKQSGKTILDFLKSDGFANRNFMQLIHDDSLTFKEDIQKAQVSGQGDSLHEHIANLAGSPAIKKGILQTVKVVDELVKVMGRHKPENIVIEMARENQTTQKGQKNSRERMKRIEEGIKELGSQILKEHPVENTQLQNEKLYLYYLQNGRDMYVDQELDINRLSDYDVDHIVPQSFLKDDSIDNKVLTRSDKARGKSDNVPSEEVVKKMKNYWRQLLNAKLITQRKFDNLTKAERGGLSELDKAGFIKRQLVETRQITKHVAQILDSRMNTKYDENDKLIREVKVITLKSKLVSDFRKDFQFYKVREINNYHHAHDAYLNAVVGTALIKKYPKLESEFVYGDYKVYDVRKMIAKSEQEIGKATAKYFFYSNIMNFFKTEITLANGEIRKRPLIETNGETGEIVWDKGRDFATVRKVLSMPQVNIVKKTEVQTGGFSKESILPKRNSDKLIARKKDWDPKKYGGFDSPTVAYSVLVVAKVEKGKSKKLKSVKELLGITIMERSSFEKNPIDFLEAKGYKEVKKDLIIKLPKYSLFELENGRKRMLASAGELQKGNELALPSKYVNFLYLASHYEKLKGSPEDNEQKQLFVEQHKHYLDEIIEQISEFSKRVILADANLDKVLSAYNKHRDKPIREQAENIIHLFTLTNLGAPAAFKYFDTTIDRKRYTSTKEVLDATLIHQSITGLYETRIDLSQLGGDGGGSSGGGGGLDDEYRLYSPLVKPDQNIQFWLEQFPQAWAETAGMGLAKQVPPQVIQLKASATPVSVRQYPLSKEAQEGIRPHVQRLIQQGILVPVQSPWNTPLLPVRKPGTNDYRPVQDLREVNKRVQDIHPTVPNPYNLLCALPPQRSWYTVLDLKDAFFCLRLHPTSQPLFAFEWRDPGTGRTGQLTWTRLPQGFKNSPTIFNEALHRDLANFRIQHPQVTLLQYVDDLLLAGATKQDCLEGTKALLLELSDLGYRASAKKAQICRREVTYLGYSLRDGQRWLTEARKKTVVQIPAPTTAKQVREFLGKAGFCRLFIPGFATLAAPLYPLTKPKGEFSWAPEHQKAFDAIKKALLSAPALALPDVTKPFTLYVDERKGVARGVLTQTLGPWRRPVAYLSKKLDPVASGWPVCLKAIAAVAILVKDADKLTLGQNITVIAPHALENIVRQPPDRWMTNARMTHYQSLLLTERVTFAPPAALNPATLLPEETDEPVTHDCHQLLIEETGVRKDLTDIPLTGEVLTWFTDGSSYVVEGKRMAGAAVVDGTRTIWASSLPEGTSAQKAELMALTQALRLAEGKSINIYTDSRYAFATAHVHGAIYKQRGWLTSAGREIKNKEEILSLLEALHLPKRLAIIHCPGHQKAKDPISRGNQMADRVAKQAAQGVNLLPAGKRTADGSEFEKRTADGSEFESPKKKAKVE

SEQ ID NO: 82 - protein, 2086 aa, synthetic construct
MPAAKRVKLDGGDKKYSIGLDIGTNSVGWAVITDEYKVPSKKFKVLGNTDRHSIKKNLIGALLFDSGETAEATRLKRTARRRYTRRKNRICYLQEIFSNEMAKVDDSFFHRLEESFLVEEDKKHERHPIFGNIVDEVAYHEKYPTIYHLRKKLVDSTDKADLRLIYLALAHMIKFRGHFLIEGDLNPDNSDVDKLFIQLVQTYNQLFEENPINASGVDAKAILSARLSKSRRLENLIAQLPGEKKNGLFGNLIALSLGLTPNFKSNFDLAEDAKLQLSKDTYDDDLDNLLAQIGDQYADLFLAAKNLSDAILLSDILRVNTEITKAPLSASMIKRYDEHHQDLTLLKALVRQQLPEKYKEIFFDQSKNGYAGYIDGGASQEEFYKFIKPILEKMDGTEELLVKLNREDLLRKQRTFDNGSIPHQIHLGELHAILRRQEDFYPFLKDNREKIEKILTFRIPYYVGPLARGNSRFAWMTRKSEETITPWNFEEVVDKGASAQSFIERMTNFDKNLPNEKVLPKHSLLYEYFTVYNELTKVKYVTEGMRKPAFLSGEQKKAIVDLLFKTNRKVTVKQLKEDYFKKIECFDSVEISGVEDRFNASLGTYHDLLKIIKDKDFLDNEENEDILEDIVLTLTLFEDREMIEERLKTYAHLFDDKVMKQLKRRRYTGWGRLSRKLINGIRDKQSGKTILDFLKSDGFANRNFMQLIHDDSLTFKEDIQKAQVSGQGDSLHEHIANLAGSPAIKKGILQTVKVVDELVKVMGRHKPENIVIEMARENQTTQKGQKNSRERMKRIEEGIKELGSQILKEHPVENTQLQNEKLYLYYLQNGRDMYVDQELDINRLSDYDVDHIVPQSFLKDDSIDNKVLTRSDKARGKSDNVPSEEVVKKMKNYWRQLLNAKLITQRKFDNLTKAERGGLSELDKAGFIKRQLVETRQITKHVAQILDSRMNTKYDENDKLIREVKVITLKSKLVSDFRKDFQFYKVREINNYHHAHDAYLNAVVGTALIKKYPKLESEFVYGDYKVYDVRKMIAKSEQEIGKATAKYFFYSNIMNFFKTEITLANGEIRKRPLIETNGETGEIVWDKGRDFATVRKVLSMPQVNIVKKTEVQTGGFSKESILPKRNSDKLIARKKDWDPKKYGGFDSPTVAYSVLVVAKVEKGKSKKLKSVKELLGITIMERSSFEKNPIDFLEAKGYKEVKKDLIIKLPKYSLFELENGRKRMLASAGELQKGNELALPSKYVNFLYLASHYEKLKGSPEDNEQKQLFVEQHKHYLDEIIEQISEFSKRVILADANLDKVLSAYNKHRDKPIREQAENIIHLFTLTNLGAPAAFKYFDTTIDRKRYTSTKEVLDATLIHQSITGLYETRIDLSQLGGDGGPAPGSSGGSGGLDDEYRLYSPLVKPDQNIQFWLEQFPQAWAETAGMGLAKQVPPQVIQLKASATPVSVRQYPLSKEAQEGIRPHVQRLIQQGILVPVQSPWNTPLLPVRKPGTNDYRPVQDLREVNKRVQDIHPTVPNPYNLLCALPPQRSWYTVLDLKDAFFCLRLHPTSQPLFAFEWRDPGTGRTGQLTWTRLPQGFKNSPTIFNEALHRDLANFRIQHPQVTLLQYVDDLLLAGATKQDCLEGTKALLLELSDLGYRASAKKAQICRREVTYLGYSLRDGQRWLTEARKKTVVQIPAPTTAKQVREFLGKAGFCRLFIPGFATLAAPLYPLTKPKGEFSWAPEHQKAFDAIKKALLSAPALALPDVTKPFTLYVDERKGVARGVLTQTLGPWRRPVAYLSKKLDPVASGWPVCLKAIAAVAILVKDADKLTLGQNITVIAPHALENIVRQPPDRWMTNARMTHYQSLLLTERVTFAPPAALNPATLLPEETDEPVTHDCHQLLIEETGVRKDLTDIPLTGEVLTWFTDGSSYVVEGKRMAGAAVVDGTRTIWASSLPEGTSAQKAELMALTQALRLAEGKSINIYTDSRYAFATAHVHGAIYKQRGWLTSAGREIKNKEEILSLLEALHLPKRLAIIHCPGHQKAKDPISRGNQMADRVAKQAAQGVNLLPAGKRTADGSEFEKRTADGSEFESPKKKAKVE

SEQ ID NO: 83 - protein, 2088 aa, synthetic construct
MPAAKRVKLDGGDKKYSIGLDIGTNSVGWAVITDEYKVPSKKFKVLGNTDRHSIKKNLIGALLFDSGETAEATRLKRTARRRYTRRKNRICYLQEIFSNEMAKVDDSFFHRLEESFLVEEDKKHERHPIFGNIVDEVAYHEKYPTIYHLRKKLVDSTDKADLRLIYLALAHMIKFRGHFLIEGDLNPDNSDVDKLFIQLVQTYNQLFEENPINASGVDAKAILSARLSKSRRLENLIAQLPGEKKNGLFGNLIALSLGLTPNFKSNFDLAEDAKLQLSKDTYDDDLDNLLAQIGDQYADLFLAAKNLSDAILLSDILRVNTEITKAPLSASMIKRYDEHHQDLTLLKALVRQQLPEKYKEIFFDQSKNGYAGYIDGGASQEEFYKFIKPILEKMDGTEELLVKLNREDLLRKQRTFDNGSIPHQIHLGELHAILRRQEDFYPFLKDNREKIEKILTFRIPYYVGPLARGNSRFAWMTRKSEETITPWNFEEVVDKGASAQSFIERMTNFDKNLPNEKVLPKHSLLYEYFTVYNELTKVKYVTEGMRKPAFLSGEQKKAIVDLLFKTNRKVTVKQLKEDYFKKIECFDSVEISGVEDRFNASLGTYHDLLKIIKDKDFLDNEENEDILEDIVLTLTLFEDREMIEERLKTYAHLFDDKVMKQLKRRRYTGWGRLSRKLINGIRDKQSGKTILDFLKSDGFANRNFMQLIHDDSLTFKEDIQKAQVSGQGDSLHEHIANLAGSPAIKKGILQTVKVVDELVKVMGRHKPENIVIEMARENQTTQKGQKNSRERMKRIEEGIKELGSQILKEHPVENTQLQNEKLYLYYLQNGRDMYVDQELDINRLSDYDVDHIVPQSFLKDDSIDNKVLTRSDKARGKSDNVPSEEVVKKMKNYWRQLLNAKLITQRKFDNLTKAERGGLSELDKAGFIKRQLVETRQITKHVAQILDSRMNTKYDENDKLIREVKVITLKSKLVSDFRKDFQFYKVREINNYHHAHDAYLNAVVGTALIKKYPKLESEFVYGDYKVYDVRKMIAKSEQEIGKATAKYFFYSNIMNFFKTEITLANGEIRKRPLIETNGETGEIVWDKGRDFATVRKVLSMPQVNIVKKTEVQTGGFSKESILPKRNSDKLIARKKDWDPKKYGGFDSPTVAYSVLVVAKVEKGKSKKLKSVKELLGITIMERSSFEKNPIDFLEAKGYKEVKKDLIIKLPKYSLFELENGRKRMLASAGELQKGNELALPSKYVNFLYLASHYEKLKGSPEDNEQKQLFVEQHKHYLDEIIEQISEFSKRVILADANLDKVLSAYNKHRDKPIREQAENIIHLFTLTNLGAPAAFKYFDTTIDRKRYTSTKEVLDATLIHQSITGLYETRIDLSQLGGDGGEAAAKGSSGGSGGLDDEYRLYSPLVKPDQNIQFWLEQFPQAWAETAGMGLAKQVPPQVIQLKASATPVSVRQYPLSKEAQEGIRPHVQRLIQQGILVPVQSPWNTPLLPVRKPGTNDYRPVQDLREVNKRVQDIHPTVPNPYNLLCALPPQRSWYTVLDLKDAFFCLRLHPTSQPLFAFEWRDPGTGRTGQLTWTRLPQGFKNSPTIFNEALHRDLANFRIQHPQVTLLQYVDDLLLAGATKQDCLEGTKALLLELSDLGYRASAKKAQICRREVTYLGYSLRDGQRWLTEARKKTVVQIPAPTTAKQVREFLGKAGFCRLFIPGFATLAAPLYPLTKPKGEFSWAPEHQKAFDAIKKALLSAPALALPDVTKPFTLYVDERKGVARGVLTQTLGPWRRPVAYLSKKLDPVASGWPVCLKAIAAVAILVKDADKLTLGQNITVIAPHALENIVRQPPDRWMTNARMTHYQSLLLTERVTFAPPAALNPATLLPEETDEPVTHDCHQLLIEETGVRKDLTDIPLTGEVLTWFTDGSSYVVEGKRMAGAAVVDGTRTIWASSLPEGTSAQKAELMALTQALRLAEGKSINIYTDSRYAFATAHVHGAIYKQRGWLTSAGREIKNKEEILSLLEALHLPKRLAIIHCPGHQKAKDPISRGNQMADRVAKQAAQGVNLLPAGKRTADGSEFEKRTADGSEFESPKKKAKVE

SEQ ID NO: 84 - protein, 2082 aa, synthetic construct
MPAAKRVKLDGGDKKYSIGLDIGTNSVGWAVITDEYKVPSKKFKVLGNTDRHSIKKNLIGALLFDSGETAEATRLKRTARRRYTRRKNRICYLQEIFSNEMAKVDDSFFHRLEESFLVEEDKKHERHPIFGNIVDEVAYHEKYPTIYHLRKKLVDSTDKADLRLIYLALAHMIKFRGHFLIEGDLNPDNSDVDKLFIQLVQTYNQLFEENPINASGVDAKAILSARLSKSRRLENLIAQLPGEKKNGLFGNLIALSLGLTPNFKSNFDLAEDAKLQLSKDTYDDDLDNLLAQIGDQYADLFLAAKNLSDAILLSDILRVNTEITKAPLSASMIKRYDEHHQDLTLLKALVRQQLPEKYKEIFFDQSKNGYAGYIDGGASQEEFYKFIKPILEKMDGTEELLVKLNREDLLRKQRTFDNGSIPHQIHLGELHAILRRQEDFYPFLKDNREKIEKILTFRIPYYVGPLARGNSRFAWMTRKSEETITPWNFEEVVDKGASAQSFIERMTNFDKNLPNEKVLPKHSLLYEYFTVYNELTKVKYVTEGMRKPAFLSGEQKKAIVDLLFKTNRKVTVKQLKEDYFKKIECFDSVEISGVEDRFNASLGTYHDLLKIIKDKDFLDNEENEDILEDIVLTLTLFEDREMIEERLKTYAHLFDDKVMKQLKRRRYTGWGRLSRKLINGIRDKQSGKTILDFLKSDGFANRNFMQLIHDDSLTFKEDIQKAQVSGQGDSLHEHIANLAGSPAIKKGILQTVKVVDELVKVMGRHKPENIVIEMARENQTTQKGQKNSRERMKRIEEGIKELGSQILKEHPVENTQLQNEKLYLYYLQNGRDMYVDQELDINRLSDYDVDHIVPQSFLKDDSIDNKVLTRSDKARGKSDNVPSEEVVKKMKNYWRQLLNAKLITQRKFDNLTKAERGGLSELDKAGFIKRQLVETRQITKHVAQILDSRMNTKYDENDKLIREVKVITLKSKLVSDFRKDFQFYKVREINNYHHAHDAYLNAVVGTALIKKYPKLESEFVYGDYKVYDVRKMIAKSEQEIGKATAKYFFYSNIMNFFKTEITLANGEIRKRPLIETNGETGEIVWDKGRDFATVRKVLSMPQVNIVKKTEVQTGGFSKESILPKRNSDKLIARKKDWDPKKYGGFDSPTVAYSVLVVAKVEKGKSKKLKSVKELLGITIMERSSFEKNPIDFLEAKGYKEVKKDLIIKLPKYSLFELENGRKRMLASAGELQKGNELALPSKYVNFLYLASHYEKLKGSPEDNEQKQLFVEQHKHYLDEIIEQISEFSKRVILADANLDKVLSAYNKHRDKPIREQAENIIHLFTLTNLGAPAAFKYFDTTIDRKRYTSTKEVLDATLIHQSITGLYETRIDLSQLGGDGGGGGGSGGLDDEYRLYSPLVKPDQNIQFWLEQFPQAWAETAGMGLAKQVPPQVIQLKASATPVSVRQYPLSKEAQEGIRPHVQRLIQQGILVPVQSPWNTPLLPVRKPGTNDYRPVQDLREVNKRVQDIHPTVPNPYNLLCALPPQRSWYTVLDLKDAFFCLRLHPTSQPLFAFEWRDPGTGRTGQLTWTRLPQGFKNSPTIFNEALHRDLANFRIQHPQVTLLQYVDDLLLAGATKQDCLEGTKALLLELSDLGYRASAKKAQICRREVTYLGYSLRDGQRWLTEARKKTVVQIPAPTTAKQVREFLGKAGFCRLFIPGFATLAAPLYPLTKPKGEFSWAPEHQKAFDAIKKALLSAPALALPDVTKPFTLYVDERKGVARGVLTQTLGPWRRPVAYLSKKLDPVASGWPVCLKAIAAVAILVKDADKLTLGQNITVIAPHALENIVRQPPDRWMTNARMTHYQSLLLTERVTFAPPAALNPATLLPEETDEPVTHDCHQLLIEETGVRKDLTDIPLTGEVLTWFTDGSSYVVEGKRMAGAAVVDGTRTIWASSLPEGTSAQKAELMALTQALRLAEGKSINIYTDSRYAFATAHVHGAIYKQRGWLTSAGREIKNKEEILSLLEALHLPKRLAIIHCPGHQKAKDPISRGNQMADRVAKQAAQGVNLLPAGKRTADGSEFEKRTADGSEFESPKKKAKVE

SEQ ID NO: 85 - protein, 2086 aa, synthetic construct
MPAAKRVKLDGGDKKYSIGLDIGTNSVGWAVITDEYKVPSKKFKVLGNTDRHSIKKNLIGALLFDSGETAEATRLKRTARRRYTRRKNRICYLQEIFSNEMAKVDDSFFHRLEESFLVEEDKKHERHPIFGNIVDEVAYHEKYPTIYHLRKKLVDSTDKADLRLIYLALAHMIKFRGHFLIEGDLNPDNSDVDKLFIQLVQTYNQLFEENPINASGVDAKAILSARLSKSRRLENLIAQLPGEKKNGLFGNLIALSLGLTPNFKSNFDLAEDAKLQLSKDTYDDDLDNLLAQIGDQYADLFLAAKNLSDAILLSDILRVNTEITKAPLSASMIKRYDEHHQDLTLLKALVRQQLPEKYKEIFFDQSKNGYAGYIDGGASQEEFYKFIKPILEKMDGTEELLVKLNREDLLRKQRTFDNGSIPHQIHLGELHAILRRQEDFYPFLKDNREKIEKILTFRIPYYVGPLARGNSRFAWMTRKSEETITPWNFEEVVDKGASAQSFIERMTNFDKNLPNEKVLPKHSLLYEYFTVYNELTKVKYVTEGMRKPAFLSGEQKKAIVDLLFKTNRKVTVKQLKEDYFKKIECFDSVEISGVEDRFNASLGTYHDLLKIIKDKDFLDNEENEDILEDIVLTLTLFEDREMIEERLKTYAHLFDDKVMKQLKRRRYTGWGRLSRKLINGIRDKQSGKTILDFLKSDGFANRNFMQLIHDDSLTFKEDIQKAQVSGQGDSLHEHIANLAGSPAIKKGILQTVKVVDELVKVMGRHKPENIVIEMARENQTTQKGQKNSRERMKRIEEGIKELGSQILKEHPVENTQLQNEKLYLYYLQNGRDMYVDQELDINRLSDYDVDHIVPQSFLKDDSIDNKVLTRSDKARGKSDNVPSEEVVKKMKNYWRQLLNAKLITQRKFDNLTKAERGGLSELDKAGFIKRQLVETRQITKHVAQILDSRMNTKYDENDKLIREVKVITLKSKLVSDFRKDFQFYKVREINNYHHAHDAYLNAVVGTALIKKYPKLESEFVYGDYKVYDVRKMIAKSEQEIGKATAKYFFYSNIMNFFKTEITLANGEIRKRPLIETNGETGEIVWDKGRDFATVRKVLSMPQVNIVKKTEVQTGGFSKESILPKRNSDKLIARKKDWDPKKYGGFDSPTVAYSVLVVAKVEKGKSKKLKSVKELLGITIMERSSFEKNPIDFLEAKGYKEVKKDLIIKLPKYSLFELENGRKRMLASAGELQKGNELALPSKYVNFLYLASHYEKLKGSPEDNEQKQLFVEQHKHYLDEIIEQISEFSKRVILADANLDKVLSAYNKHRDKPIREQAENIIHLFTLTNLGAPAAFKYFDTTIDRKRYTSTKEVLDATLIHQSITGLYETRIDLSQLGGDGGGSSGGSGGGGGLDDEYRLYSPLVKPDQNIQFWLEQFPQAWAETAGMGLAKQVPPQVIQLKASATPVSVRQYPLSKEAQEGIRPHVQRLIQQGILVPVQSPWNTPLLPVRKPGTNDYRPVQDLREVNKRVQDIHPTVPNPYNLLCALPPQRSWYTVLDLKDAFFCLRLHPTSQPLFAFEWRDPGTGRTGQLTWTRLPQGFKNSPTIFNEALHRDLANFRIQHPQVTLLQYVDDLLLAGATKQDCLEGTKALLLELSDLGYRASAKKAQICRREVTYLGYSLRDGQRWLTEARKKTVVQIPAPTTAKQVREFLGKAGFCRLFIPGFATLAAPLYPLTKPKGEFSWAPEHQKAFDAIKKALLSAPALALPDVTKPFTLYVDERKGVARGVLTQTLGPWRRPVAYLSKKLDPVASGWPVCLKAIAAVAILVKDADKLTLGQNITVIAPHALENIVRQPPDRWMTNARMTHYQSLLLTERVTFAPPAALNPATLLPEETDEPVTHDCHQLLIEETGVRKDLTDIPLTGEVLTWFTDGSSYVVEGKRMAGAAVVDGTRTIWASSLPEGTSAQKAELMALTQALRLAEGKSINIYTDSRYAFATAHVHGAIYKQRGWLTSAGREIKNKEEILSLLEALHLPKRLAIIHCPGHQKAKDPISRGNQMADRVAKQAAQGVNLLPAGKRTADGSEFEKRTADGSEFESPKKKAKVE

SEQ ID NO: 86 - protein, 2088 aa, synthetic construct
MPAAKRVKLDGGDKKYSIGLDIGTNSVGWAVITDEYKVPSKKFKVLGNTDRHSIKKNLIGALLFDSGETAEATRLKRTARRRYTRRKNRICYLQEIFSNEMAKVDDSFFHRLEESFLVEEDKKHERHPIFGNIVDEVAYHEKYPTIYHLRKKLVDSTDKADLRLIYLALAHMIKFRGHFLIEGDLNPDNSDVDKLFIQLVQTYNQLFEENPINASGVDAKAILSARLSKSRRLENLIAQLPGEKKNGLFGNLIALSLGLTPNFKSNFDLAEDAKLQLSKDTYDDDLDNLLAQIGDQYADLFLAAKNLSDAILLSDILRVNTEITKAPLSASMIKRYDEHHQDLTLLKALVRQQLPEKYKEIFFDQSKNGYAGYIDGGASQEEFYKFIKPILEKMDGTEELLVKLNREDLLRKQRTFDNGSIPHQIHLGELHAILRRQEDFYPFLKDNREKIEKILTFRIPYYVGPLARGNSRFAWMTRKSEETITPWNFEEVVDKGASAQSFIERMTNFDKNLPNEKVLPKHSLLYEYFTVYNELTKVKYVTEGMRKPAFLSGEQKKAIVDLLFKTNRKVTVKQLKEDYFKKIECFDSVEISGVEDRFNASLGTYHDLLKIIKDKDFLDNEENEDILEDIVLTLTLFEDREMIEERLKTYAHLFDDKVMKQLKRRRYTGWGRLSRKLINGIRDKQSGKTILDFLKSDGFANRNFMQLIHDDSLTFKEDIQKAQVSGQGDSLHEHIANLAGSPAIKKGILQTVKVVDELVKVMGRHKPENIVIEMARENQTTQKGQKNSRERMKRIEEGIKELGSQILKEHPVENTQLQNEKLYLYYLQNGRDMYVDQELDINRLSDYDVDHIVPQSFLKDDSIDNKVLTRSDKARGKSDNVPSEEVVKKMKNYWRQLLNAKLITQRKFDNLTKAERGGLSELDKAGFIKRQLVETRQITKHVAQILDSRMNTKYDENDKLIREVKVITLKSKLVSDFRKDFQFYKVREINNYHHAHDAYLNAVVGTALIKKYPKLESEFVYGDYKVYDVRKMIAKSEQEIGKATAKYFFYSNIMNFFKTEITLANGEIRKRPLIETNGETGEIVWDKGRDFATVRKVLSMPQVNIVKKTEVQTGGFSKESILPKRNSDKLIARKKDWDPKKYGGFDSPTVAYSVLVVAKVEKGKSKKLKSVKELLGITIMERSSFEKNPIDFLEAKGYKEVKKDLIIKLPKYSLFELENGRKRMLASAGELQKGNELALPSKYVNFLYLASHYEKLKGSPEDNEQKQLFVEQHKHYLDEIIEQISEFSKRVILADANLDKVLSAYNKHRDKPIREQAENIIHLFTLTNLGAPAAFKYFDTTIDRKRYTSTKEVLDATLIHQSITGLYETRIDLSQLGGDGGGSSPAPEAAAKGGLDDEYRLYSPLVKPDQNIQFWLEQFPQAWAETAGMGLAKQVPPQVIQLKASATPVSVRQYPLSKEAQEGIRPHVQRLIQQGILVPVQSPWNTPLLPVRKPGTNDYRPVQDLREVNKRVQDIHPTVPNPYNLLCALPPQRSWYTVLDLKDAFFCLRLHPTSQPLFAFEWRDPGTGRTGQLTWTRLPQGFKNSPTIFNEALHRDLANFRIQHPQVTLLQYVDDLLLAGATKQDCLEGTKALLLELSDLGYRASAKKAQICRREVTYLGYSLRDGQRWLTEARKKTVVQIPAPTTAKQVREFLGKAGFCRLFIPGFATLAAPLYPLTKPKGEFSWAPEHQKAFDAIKKALLSAPALALPDVTKPFTLYVDERKGVARGVLTQTLGPWRRPVAYLSKKLDPVASGWPVCLKAIAAVAILVKDADKLTLGQNITVIAPHALENIVRQPPDRWMTNARMTHYQSLLLTERVTFAPPAALNPATLLPEETDEPVTHDCHQLLIEETGVRKDLTDIPLTGEVLTWFTDGSSYVVEGKRMAGAAVVDGTRTIWASSLPEGTSAQKAELMALTQALRLAEGKSINIYTDSRYAFATAHVHGAIYKQRGWLTSAGREIKNKEEILSLLEALHLPKRLAIIHCPGHQKAKDPISRGNQMADRVAKQAAQGVNLLPAGKRTADGSEFEKRTADGSEFESPKKKAKVE

SEQ ID NO: 87 - protein, 2083 aa, synthetic construct
MPAAKRVKLDGGDKKYSIGLDIGTNSVGWAVITDEYKVPSKKFKVLGNTDRHSIKKNLIGALLFDSGETAEATRLKRTARRRYTRRKNRICYLQEIFSNEMAKVDDSFFHRLEESFLVEEDKKHERHPIFGNIVDEVAYHEKYPTIYHLRKKLVDSTDKADLRLIYLALAHMIKFRGHFLIEGDLNPDNSDVDKLFIQLVQTYNQLFEENPINASGVDAKAILSARLSKSRRLENLIAQLPGEKKNGLFGNLIALSLGLTPNFKSNFDLAEDAKLQLSKDTYDDDLDNLLAQIGDQYADLFLAAKNLSDAILLSDILRVNTEITKAPLSASMIKRYDEHHQDLTLLKALVRQQLPEKYKEIFFDQSKNGYAGYIDGGASQEEFYKFIKPILEKMDGTEELLVKLNREDLLRKQRTFDNGSIPHQIHLGELHAILRRQEDFYPFLKDNREKIEKILTFRIPYYVGPLARGNSRFAWMTRKSEETITPWNFEEVVDKGASAQSFIERMTNFDKNLPNEKVLPKHSLLYEYFTVYNELTKVKYVTEGMRKPAFLSGEQKKAIVDLLFKTNRKVTVKQLKEDYFKKIECFDSVEISGVEDRFNASLGTYHDLLKIIKDKDFLDNEENEDILEDIVLTLTLFEDREMIEERLKTYAHLFDDKVMKQLKRRRYTGWGRLSRKLINGIRDKQSGKTILDFLKSDGFANRNFMQLIHDDSLTFKEDIQKAQVSGQGDSLHEHIANLAGSPAIKKGILQTVKVVDELVKVMGRHKPENIVIEMARENQTTQKGQKNSRERMKRIEEGIKELGSQILKEHPVENTQLQNEKLYLYYLQNGRDMYVDQELDINRLSDYDVDHIVPQSFLKDDSIDNKVLTRSDKARGKSDNVPSEEVVKKMKNYWRQLLNAKLITQRKFDNLTKAERGGLSELDKAGFIKRQLVETRQITKHVAQILDSRMNTKYDENDKLIREVKVITLKSKLVSDFRKDFQFYKVREINNYHHAHDAYLNAVVGTALIKKYPKLESEFVYGDYKVYDVRKMIAKSEQEIGKATAKYFFYSNIMNFFKTEITLANGEIRKRPLIETNGETGEIVWDKGRDFATVRKVLSMPQVNIVKKTEVQTGGFSKESILPKRNSDKLIARKKDWDPKKYGGFDSPTVAYSVLVVAKVEKGKSKKLKSVKELLGITIMERSSFEKNPIDFLEAKGYKEVKKDLIIKLPKYSLFELENGRKRMLASAGELQKGNELALPSKYVNFLYLASHYEKLKGSPEDNEQKQLFVEQHKHYLDEIIEQISEFSKRVILADANLDKVLSAYNKHRDKPIREQAENIIHLFTLTNLGAPAAFKYFDTTIDRKRYTSTKEVLDATLIHQSITGLYETRIDLSQLGGDGGGGGGGSGGLDDEYRLYSPLVKPDQNIQFWLEQFPQAWAETAGMGLAKQVPPQVIQLKASATPVSVRQYPLSKEAQEGIRPHVQRLIQQGILVPVQSPWNTPLLPVRKPGTNDYRPVQDLREVNKRVQDIHPTVPNPYNLLCALPPQRSWYTVLDLKDAFFCLRLHPTSQPLFAFEWRDPGTGRTGQLTWTRLPQGFKNSPTIFNEALHRDLANFRIQHPQVTLLQYVDDLLLAGATKQDCLEGTKALLLELSDLGYRASAKKAQICRREVTYLGYSLRDGQRWLTEARKKTVVQIPAPTTAKQVREFLGKAGFCRLFIPGFATLAAPLYPLTKPKGEFSWAPEHQKAFDAIKKALLSAPALALPDVTKPFTLYVDERKGVARGVLTQTLGPWRRPVAYLSKKLDPVASGWPVCLKAIAAVAILVKDADKLTLGQNITVIAPHALENIVRQPPDRWMTNARMTHYQSLLLTERVTFAPPAALNPATLLPEETDEPVTHDCHQLLIEETGVRKDLTDIPLTGEVLTWFTDGSSYVVEGKRMAGAAVVDGTRTIWASSLPEGTSAQKAELMALTQALRLAEGKSINIYTDSRYAFATAHVHGAIYKQRGWLTSAGREIKNKEEILSLLEALHLPKRLAIIHCPGHQKAKDPISRGNQMADRVAKQAAQGVNLLPAGKRTADGSEFEKRTADGSEFESPKKKAKVE

SEQ ID NO: 88 - protein, 2083 aa, synthetic construct
MPAAKRVKLDGGDKKYSIGLDIGTNSVGWAVITDEYKVPSKKFKVLGNTDRHSIKKNLIGALLFDSGETAEATRLKRTARRRYTRRKNRICYLQEIFSNEMAKVDDSFFHRLEESFLVEEDKKHERHPIFGNIVDEVAYHEKYPTIYHLRKKLVDSTDKADLRLIYLALAHMIKFRGHFLIEGDLNPDNSDVDKLFIQLVQTYNQLFEENPINASGVDAKAILSARLSKSRRLENLIAQLPGEKKNGLFGNLIALSLGLTPNFKSNFDLAEDAKLQLSKDTYDDDLDNLLAQIGDQYADLFLAAKNLSDAILLSDILRVNTEITKAPLSASMIKRYDEHHQDLTLLKALVRQQLPEKYKEIFFDQSKNGYAGYIDGGASQEEFYKFIKPILEKMDGTEELLVKLNREDLLRKQRTFDNGSIPHQIHLGELHAILRRQEDFYPFLKDNREKIEKILTFRIPYYVGPLARGNSRFAWMTRKSEETITPWNFEEVVDKGASAQSFIERMTNFDKNLPNEKVLPKHSLLYEYFTVYNELTKVKYVTEGMRKPAFLSGEQKKAIVDLLFKTNRKVTVKQLKEDYFKKIECFDSVEISGVEDRFNASLGTYHDLLKIIKDKDFLDNEENEDILEDIVLTLTLFEDREMIEERLKTYAHLFDDKVMKQLKRRRYTGWGRLSRKLINGIRDKQSGKTILDFLKSDGFANRNFMQLIHDDSLTFKEDIQKAQVSGQGDSLHEHIANLAGSPAIKKGILQTVKVVDELVKVMGRHKPENIVIEMARENQTTQKGQKNSRERMKRIEEGIKELGSQILKEHPVENTQLQNEKLYLYYLQNGRDMYVDQELDINRLSDYDVDHIVPQSFLKDDSIDNKVLTRSDKARGKSDNVPSEEVVKKMKNYWRQLLNAKLITQRKFDNLTKAERGGLSELDKAGFIKRQLVETRQITKHVAQILDSRMNTKYDENDKLIREVKVITLKSKLVSDFRKDFQFYKVREINNYHHAHDAYLNAVVGTALIKKYPKLESEFVYGDYKVYDVRKMIAKSEQEIGKATAKYFFYSNIMNFFKTEITLANGEIRKRPLIETNGETGEIVWDKGRDFATVRKVLSMPQVNIVKKTEVQTGGFSKESILPKRNSDKLIARKKDWDPKKYGGFDSPTVAYSVLVVAKVEKGKSKKLKSVKELLGITIMERSSFEKNPIDFLEAKGYKEVKKDLIIKLPKYSLFELENGRKRMLASAGELQKGNELALPSKYVNFLYLASHYEKLKGSPEDNEQKQLFVEQHKHYLDEIIEQISEFSKRVILADANLDKVLSAYNKHRDKPIREQAENIIHLFTLTNLGAPAAFKYFDTTIDRKRYTSTKEVLDATLIHQSITGLYETRIDLSQLGGDGGGSSGGSGGLDDEYRLYSPLVKPDQNIQFWLEQFPQAWAETAGMGLAKQVPPQVIQLKASATPVSVRQYPLSKEAQEGIRPHVQRLIQQGILVPVQSPWNTPLLPVRKPGTNDYRPVQDLREVNKRVQDIHPTVPNPYNLLCALPPQRSWYTVLDLKDAFFCLRLHPTSQPLFAFEWRDPGTGRTGQLTWTRLPQGFKNSPTIFNEALHRDLANFRIQHPQVTLLQYVDDLLLAGATKQDCLEGTKALLLELSDLGYRASAKKAQICRREVTYLGYSLRDGQRWLTEARKKTVVQIPAPTTAKQVREFLGKAGFCRLFIPGFATLAAPLYPLTKPKGEFSWAPEHQKAFDAIKKALLSAPALALPDVTKPFTLYVDERKGVARGVLTQTLGPWRRPVAYLSKKLDPVASGWPVCLKAIAAVAILVKDADKLTLGQNITVIAPHALENIVRQPPDRWMTNARMTHYQSLLLTERVTFAPPAALNPATLLPEETDEPVTHDCHQLLIEETGVRKDLTDIPLTGEVLTWFTDGSSYVVEGKRMAGAAVVDGTRTIWASSLPEGTSAQKAELMALTQALRLAEGKSINIYTDSRYAFATAHVHGAIYKQRGWLTSAGREIKNKEEILSLLEALHLPKRLAIIHCPGHQKAKDPISRGNQMADRVAKQAAQGVNLLPAGKRTADGSEFEKRTADGSEFESPKKKAKVE

SEQ ID NO: 89 - protein, 2086 aa, synthetic construct
MPAAKRVKLDGGDKKYSIGLDIGTNSVGWAVITDEYKVPSKKFKVLGNTDRHSIKKNLIGALLFDSGETAEATRLKRTARRRYTRRKNRICYLQEIFSNEMAKVDDSFFHRLEESFLVEEDKKHERHPIFGNIVDEVAYHEKYPTIYHLRKKLVDSTDKADLRLIYLALAHMIKFRGHFLIEGDLNPDNSDVDKLFIQLVQTYNQLFEENPINASGVDAKAILSARLSKSRRLENLIAQLPGEKKNGLFGNLIALSLGLTPNFKSNFDLAEDAKLQLSKDTYDDDLDNLLAQIGDQYADLFLAAKNLSDAILLSDILRVNTEITKAPLSASMIKRYDEHHQDLTLLKALVRQQLPEKYKEIFFDQSKNGYAGYIDGGASQEEFYKFIKPILEKMDGTEELLVKLNREDLLRKQRTFDNGSIPHQIHLGELHAILRRQEDFYPFLKDNREKIEKILTFRIPYYVGPLARGNSRFAWMTRKSEETITPWNFEEVVDKGASAQSFIERMTNFDKNLPNEKVLPKHSLLYEYFTVYNELTKVKYVTEGMRKPAFLSGEQKKAIVDLLFKTNRKVTVKQLKEDYFKKIECFDSVEISGVEDRFNASLGTYHDLLKIIKDKDFLDNEENEDILEDIVLTLTLFEDREMIEERLKTYAHLFDDKVMKQLKRRRYTGWGRLSRKLINGIRDKQSGKTILDFLKSDGFANRNFMQLIHDDSLTFKEDIQKAQVSGQGDSLHEHIANLAGSPAIKKGILQTVKVVDELVKVMGRHKPENIVIEMARENQTTQKGQKNSRERMKRIEEGIKELGSQILKEHPVENTQLQNEKLYLYYLQNGRDMYVDQELDINRLSDYDVDHIVPQSFLKDDSIDNKVLTRSDKARGKSDNVPSEEVVKKMKNYWRQLLNAKLITQRKFDNLTKAERGGLSELDKAGFIKRQLVETRQITKHVAQILDSRMNTKYDENDKLIREVKVITLKSKLVSDFRKDFQFYKVREINNYHHAHDAYLNAVVGTALIKKYPKLESEFVYGDYKVYDVRKMIAKSEQEIGKATAKYFFYSNIMNFFKTEITLANGEIRKRPLIETNGETGEIVWDKGRDFATVRKVLSMPQVNIVKKTEVQTGGFSKESILPKRNSDKLIARKKDWDPKKYGGFDSPTVAYSVLVVAKVEKGKSKKLKSVKELLGITIMERSSFEKNPIDFLEAKGYKEVKKDLIIKLPKYSLFELENGRKRMLASAGELQKGNELALPSKYVNFLYLASHYEKLKGSPEDNEQKQLFVEQHKHYLDEIIEQISEFSKRVILADANLDKVLSAYNKHRDKPIREQAENIIHLFTLTNLGAPAAFKYFDTTIDRKRYTSTKEVLDATLIHQSITGLYETRIDLSQLGGDGGPAPGSSGGGGGLDDEYRLYSPLVKPDQNIQFWLEQFPQAWAETAGMGLAKQVPPQVIQLKASATPVSVRQYPLSKEAQEGIRPHVQRLIQQGILVPVQSPWNTPLLPVRKPGTNDYRPVQDLREVNKRVQDIHPTVPNPYNLLCALPPQRSWYTVLDLKDAFFCLRLHPTSQPLFAFEWRDPGTGRTGQLTWTRLPQGFKNSPTIFNEALHRDLANFRIQHPQVTLLQYVDDLLLAGATKQDCLEGTKALLLELSDLGYRASAKKAQICRREVTYLGYSLRDGQRWLTEARKKTVVQIPAPTTAKQVREFLGKAGFCRLFIPGFATLAAPLYPLTKPKGEFSWAPEHQKAFDAIKKALLSAPALALPDVTKPFTLYVDERKGVARGVLTQTLGPWRRPVAYLSKKLDPVASGWPVCLKAIAAVAILVKDADKLTLGQNITVIAPHALENIVRQPPDRWMTNARMTHYQSLLLTERVTFAPPAALNPATLLPEETDEPVTHDCHQLLIEETGVRKDLTDIPLTGEVLTWFTDGSSYVVEGKRMAGAAVVDGTRTIWASSLPEGTSAQKAELMALTQALRLAEGKSINIYTDSRYAFATAHVHGAIYKQRGWLTSAGREIKNKEEILSLLEALHLPKRLAIIHCPGHQKAKDPISRGNQMADRVAKQAAQGVNLLPAGKRTADGSEFEKRTADGSEFESPKKKAKVE

SEQ ID NO: 90 - protein, 2093 aa, synthetic construct
MPAAKRVKLDGGDKKYSIGLDIGTNSVGWAVITDEYKVPSKKFKVLGNTDRHSIKKNLIGALLFDSGETAEATRLKRTARRRYTRRKNRICYLQEIFSNEMAKVDDSFFHRLEESFLVEEDKKHERHPIFGNIVDEVAYHEKYPTIYHLRKKLVDSTDKADLRLIYLALAHMIKFRGHFLIEGDLNPDNSDVDKLFIQLVQTYNQLFEENPINASGVDAKAILSARLSKSRRLENLIAQLPGEKKNGLFGNLIALSLGLTPNFKSNFDLAEDAKLQLSKDTYDDDLDNLLAQIGDQYADLFLAAKNLSDAILLSDILRVNTEITKAPLSASMIKRYDEHHQDLTLLKALVRQQLPEKYKEIFFDQSKNGYAGYIDGGASQEEFYKFIKPILEKMDGTEELLVKLNREDLLRKQRTFDNGSIPHQIHLGELHAILRRQEDFYPFLKDNREKIEKILTFRIPYYVGPLARGNSRFAWMTRKSEETITPWNFEEVVDKGASAQSFIERMTNFDKNLPNEKVLPKHSLLYEYFTVYNELTKVKYVTEGMRKPAFLSGEQKKAIVDLLFKTNRKVTVKQLKEDYFKKIECFDSVEISGVEDRFNASLGTYHDLLKIIKDKDFLDNEENEDILEDIVLTLTLFEDREMIEERLKTYAHLFDDKVMKQLKRRRYTGWGRLSRKLINGIRDKQSGKTILDFLKSDGFANRNFMQLIHDDSLTFKEDIQKAQVSGQGDSLHEHIANLAGSPAIKKGILQTVKVVDELVKVMGRHKPENIVIEMARENQTTQKGQKNSRERMKRIEEGIKELGSQILKEHPVENTQLQNEKLYLYYLQNGRDMYVDQELDINRLSDYDVDHIVPQSFLKDDSIDNKVLTRSDKARGKSDNVPSEEVVKKMKNYWRQLLNAKLITQRKFDNLTKAERGGLSELDKAGFIKRQLVETRQITKHVAQILDSRMNTKYDENDKLIREVKVITLKSKLVSDFRKDFQFYKVREINNYHHAHDAYLNAVVGTALIKKYPKLESEFVYGDYKVYDVRKMIAKSEQEIGKATAKYFFYSNIMNFFKTEITLANGEIRKRPLIETNGETGEIVWDKGRDFATVRKVLSMPQVNIVKKTEVQTGGFSKESILPKRNSDKLIARKKDWDPKKYGGFDSPTVAYSVLVVAKVEKGKSKKLKSVKELLGITIMERSSFEKNPIDFLEAKGYKEVKKDLIIKLPKYSLFELENGRKRMLASAGELQKGNELALPSKYVNFLYLASHYEKLKGSPEDNEQKQLFVEQHKHYLDEIIEQISEFSKRVILADANLDKVLSAYNKHRDKPIREQAENIIHLFTLTNLGAPAAFKYFDTTIDRKRYTSTKEVLDATLIHQSITGLYETRIDLSQLGGDGGSGSETPGTSESATPESGGLDDEYRLYSPLVKPDQNIQFWLEQFPQAWAETAGMGLAKQVPPQVIQLKASATPVSVRQYPLSKEAQEGIRPHVQRLIQQGILVPVQSPWNTPLLPVRKPGTNDYRPVQDLREVNKRVQDIHPTVPNPYNLLCALPPQRSWYTVLDLKDAFFCLRLHPTSQPLFAFEWRDPGTGRTGQLTWTRLPQGFKNSPTIFNEALHRDLANFRIQHPQVTLLQYVDDLLLAGATKQDCLEGTKALLLELSDLGYRASAKKAQICRREVTYLGYSLRDGQRWLTEARKKTVVQIPAPTTAKQVREFLGKAGFCRLFIPGFATLAAPLYPLTKPKGEFSWAPEHQKAFDAIKKALLSAPALALPDVTKPFTLYVDERKGVARGVLTQTLGPWRRPVAYLSKKLDPVASGWPVCLKAIAAVAILVKDADKLTLGQNITVIAPHALENIVRQPPDRWMTNARMTHYQSLLLTERVTFAPPAALNPATLLPEETDEPVTHDCHQLLIEETGVRKDLTDIPLTGEVLTWFTDGSSYVVEGKRMAGAAVVDGTRTIWASSLPEGTSAQKAELMALTQALRLAEGKSINIYTDSRYAFATAHVHGAIYKQRGWLTSAGREIKNKEEILSLLEALHLPKRLAIIHCPGHQKAKDPISRGNQMADRVAKQAAQGVNLLPAGKRTADGSEFEKRTADGSEFESPKKKAKVE

SEQ ID NO: 91 - protein, 2086 aa, synthetic construct
MPAAKRVKLDGGDKKYSIGLDIGTNSVGWAVITDEYKVPSKKFKVLGNTDRHSIKKNLIGALLFDSGETAEATRLKRTARRRYTRRKNRICYLQEIFSNEMAKVDDSFFHRLEESFLVEEDKKHERHPIFGNIVDEVAYHEKYPTIYHLRKKLVDSTDKADLRLIYLALAHMIKFRGHFLIEGDLNPDNSDVDKLFIQLVQTYNQLFEENPINASGVDAKAILSARLSKSRRLENLIAQLPGEKKNGLFGNLIALSLGLTPNFKSNFDLAEDAKLQLSKDTYDDDLDNLLAQIGDQYADLFLAAKNLSDAILLSDILRVNTEITKAPLSASMIKRYDEHHQDLTLLKALVRQQLPEKYKEIFFDQSKNGYAGYIDGGASQEEFYKFIKPILEKMDGTEELLVKLNREDLLRKQRTFDNGSIPHQIHLGELHAILRRQEDFYPFLKDNREKIEKILTFRIPYYVGPLARGNSRFAWMTRKSEETITPWNFEEVVDKGASAQSFIERMTNFDKNLPNEKVLPKHSLLYEYFTVYNELTKVKYVTEGMRKPAFLSGEQKKAIVDLLFKTNRKVTVKQLKEDYFKKIECFDSVEISGVEDRFNASLGTYHDLLKIIKDKDFLDNEENEDILEDIVLTLTLFEDREMIEERLKTYAHLFDDKVMKQLKRRRYTGWGRLSRKLINGIRDKQSGKTILDFLKSDGFANRNFMQLIHDDSLTFKEDIQKAQVSGQGDSLHEHIANLAGSPAIKKGILQTVKVVDELVKVMGRHKPENIVIEMARENQTTQKGQKNSRERMKRIEEGIKELGSQILKEHPVENTQLQNEKLYLYYLQNGRDMYVDQELDINRLSDYDVDHIVPQSFLKDDSIDNKVLTRSDKARGKSDNVPSEEVVKKMKNYWRQLLNAKLITQRKFDNLTKAERGGLSELDKAGFIKRQLVETRQITKHVAQILDSRMNTKYDENDKLIREVKVITLKSKLVSDFRKDFQFYKVREINNYHHAHDAYLNAVVGTALIKKYPKLESEFVYGDYKVYDVRKMIAKSEQEIGKATAKYFFYSNIMNFFKTEITLANGEIRKRPLIETNGETGEIVWDKGRDFATVRKVLSMPQVNIVKKTEVQTGGFSKESILPKRNSDKLIARKKDWDPKKYGGFDSPTVAYSVLVVAKVEKGKSKKLKSVKELLGITIMERSSFEKNPIDFLEAKGYKEVKKDLIIKLPKYSLFELENGRKRMLASAGELQKGNELALPSKYVNFLYLASHYEKLKGSPEDNEQKQLFVEQHKHYLDEIIEQISEFSKRVILADANLDKVLSAYNKHRDKPIREQAENIIHLFTLTNLGAPAAFKYFDTTIDRKRYTSTKEVLDATLIHQSITGLYETRIDLSQLGGDGGGSSGGGPAPGGLDDEYRLYSPLVKPDQNIQFWLEQFPQAWAETAGMGLAKQVPPQVIQLKASATPVSVRQYPLSKEAQEGIRPHVQRLIQQGILVPVQSPWNTPLLPVRKPGTNDYRPVQDLREVNKRVQDIHPTVPNPYNLLCALPPQRSWYTVLDLKDAFFCLRLHPTSQPLFAFEWRDPGTGRTGQLTWTRLPQGFKNSPTIFNEALHRDLANFRIQHPQVTLLQYVDDLLLAGATKQDCLEGTKALLLELSDLGYRASAKKAQICRREVTYLGYSLRDGQRWLTEARKKTVVQIPAPTTAKQVREFLGKAGFCRLFIPGFATLAAPLYPLTKPKGEFSWAPEHQKAFDAIKKALLSAPALALPDVTKPFTLYVDERKGVARGVLTQTLGPWRRPVAYLSKKLDPVASGWPVCLKAIAAVAILVKDADKLTLGQNITVIAPHALENIVRQPPDRWMTNARMTHYQSLLLTERVTFAPPAALNPATLLPEETDEPVTHDCHQLLIEETGVRKDLTDIPLTGEVLTWFTDGSSYVVEGKRMAGAAVVDGTRTIWASSLPEGTSAQKAELMALTQALRLAEGKSINIYTDSRYAFATAHVHGAIYKQRGWLTSAGREIKNKEEILSLLEALHLPKRLAIIHCPGHQKAKDPISRGNQMADRVAKQAAQGVNLLPAGKRTADGSEFEKRTADGSEFESPKKKAKVE

SEQ ID NO: 92 - protein, 2088 aa, synthetic construct
MPAAKRVKLDGGDKKYSIGLDIGTNSVGWAVITDEYKVPSKKFKVLGNTDRHSIKKNLIGALLFDSGETAEATRLKRTARRRYTRRKNRICYLQEIFSNEMAKVDDSFFHRLEESFLVEEDKKHERHPIFGNIVDEVAYHEKYPTIYHLRKKLVDSTDKADLRLIYLALAHMIKFRGHFLIEGDLNPDNSDVDKLFIQLVQTYNQLFEENPINASGVDAKAILSARLSKSRRLENLIAQLPGEKKNGLFGNLIALSLGLTPNFKSNFDLAEDAKLQLSKDTYDDDLDNLLAQIGDQYADLFLAAKNLSDAILLSDILRVNTEITKAPLSASMIKRYDEHHQDLTLLKALVRQQLPEKYKEIFFDQSKNGYAGYIDGGASQEEFYKFIKPILEKMDGTEELLVKLNREDLLRKQRTFDNGSIPHQIHLGELHAILRRQEDFYPFLKDNREKIEKILTFRIPYYVGPLARGNSRFAWMTRKSEETITPWNFEEVVDKGASAQSFIERMTNFDKNLPNEKVLPKHSLLYEYFTVYNELTKVKYVTEGMRKPAFLSGEQKKAIVDLLFKTNRKVTVKQLKEDYFKKIECFDSVEISGVEDRFNASLGTYHDLLKIIKDKDFLDNEENEDILEDIVLTLTLFEDREMIEERLKTYAHLFDDKVMKQLKRRRYTGWGRLSRKLINGIRDKQSGKTILDFLKSDGFANRNFMQLIHDDSLTFKEDIQKAQVSGQGDSLHEHIANLAGSPAIKKGILQTVKVVDELVKVMGRHKPENIVIEMARENQTTQKGQKNSRERMKRIEEGIKELGSQILKEHPVENTQLQNEKLYLYYLQNGRDMYVDQELDINRLSDYDVDHIVPQSFLKDDSIDNKVLTRSDKARGKSDNVPSEEVVKKMKNYWRQLLNAKLITQRKFDNLTKAERGGLSELDKAGFIKRQLVETRQITKHVAQILDSRMNTKYDENDKLIREVKVITLKSKLVSDFRKDFQFYKVREINNYHHAHDAYLNAVVGTALIKKYPKLESEFVYGDYKVYDVRKMIAKSEQEIGKATAKYFFYSNIMNFFKTEITLANGEIRKRPLIETNGETGEIVWDKGRDFATVRKVLSMPQVNIVKKTEVQTGGFSKESILPKRNSDKLIARKKDWDPKKYGGFDSPTVAYSVLVVAKVEKGKSKKLKSVKELLGITIMERSSFEKNPIDFLEAKGYKEVKKDLIIKLPKYSLFELENGRKRMLASAGELQKGNELALPSKYVNFLYLASHYEKLKGSPEDNEQKQLFVEQHKHYLDEIIEQISEFSKRVILADANLDKVLSAYNKHRDKPIREQAENIIHLFTLTNLGAPAAFKYFDTTIDRKRYTSTKEVLDATLIHQSITGLYETRIDLSQLGGDGGGGSEAAAKGSSGGLDDEYRLYSPLVKPDQNIQFWLEQFPQAWAETAGMGLAKQVPPQVIQLKASATPVSVRQYPLSKEAQEGIRPHVQRLIQQGILVPVQSPWNTPLLPVRKPGTNDYRPVQDLREVNKRVQDIHPTVPNPYNLLCALPPQRSWYTVLDLKDAFFCLRLHPTSQPLFAFEWRDPGTGRTGQLTWTRLPQGFKNSPTIFNEALHRDLANFRIQHPQVTLLQYVDDLLLAGATKQDCLEGTKALLLELSDLGYRASAKKAQICRREVTYLGYSLRDGQRWLTEARKKTVVQIPAPTTAKQVREFLGKAGFCRLFIPGFATLAAPLYPLTKPKGEFSWAPEHQKAFDAIKKALLSAPALALPDVTKPFTLYVDERKGVARGVLTQTLGPWRRPVAYLSKKLDPVASGWPVCLKAIAAVAILVKDADKLTLGQNITVIAPHALENIVRQPPDRWMTNARMTHYQSLLLTERVTFAPPAALNPATLLPEETDEPVTHDCHQLLIEETGVRKDLTDIPLTGEVLTWFTDGSSYVVEGKRMAGAAVVDGTRTIWASSLPEGTSAQKAELMALTQALRLAEGKSINIYTDSRYAFATAHVHGAIYKQRGWLTSAGREIKNKEEILSLLEALHLPKRLAIIHCPGHQKAKDPISRGNQMADRVAKQAAQGVNLLPAGKRTADGSEFEKRTADGSEFESPKKKAKVE

SEQ ID NO: 93 - protein, 2088 aa, synthetic construct
MPAAKRVKLDGGDKKYSIGLDIGTNSVGWAVITDEYKVPSKKFKVLGNTDRHSIKKNLIGALLFDSGETAEATRLKRTARRRYTRRKNRICYLQEIFSNEMAKVDDSFFHRLEESFLVEEDKKHERHPIFGNIVDEVAYHEKYPTIYHLRKKLVDSTDKADLRLIYLALAHMIKFRGHFLIEGDLNPDNSDVDKLFIQLVQTYNQLFEENPINASGVDAKAILSARLSKSRRLENLIAQLPGEKKNGLFGNLIALSLGLTPNFKSNFDLAEDAKLQLSKDTYDDDLDNLLAQIGDQYADLFLAAKNLSDAILLSDILRVNTEITKAPLSASMIKRYDEHHQDLTLLKALVRQQLPEKYKEIFFDQSKNGYAGYIDGGASQEEFYKFIKPILEKMDGTEELLVKLNREDLLRKQRTFDNGSIPHQIHLGELHAILRRQEDFYPFLKDNREKIEKILTFRIPYYVGPLARGNSRFAWMTRKSEETITPWNFEEVVDKGASAQSFIERMTNFDKNLPNEKVLPKHSLLYEYFTVYNELTKVKYVTEGMRKPAFLSGEQKKAIVDLLFKTNRKVTVKQLKEDYFKKIECFDSVEISGVEDRFNASLGTYHDLLKIIKDKDFLDNEENEDILEDIVLTLTLFEDREMIEERLKTYAHLFDDKVMKQLKRRRYTGWGRLSRKLINGIRDKQSGKTILDFLKSDGFANRNFMQLIHDDSLTFKEDIQKAQVSGQGDSLHEHIANLAGSPAIKKGILQTVKVVDELVKVMGRHKPENIVIEMARENQTTQKGQKNSRERMKRIEEGIKELGSQILKEHPVENTQLQNEKLYLYYLQNGRDMYVDQELDINRLSDYDVDHIVPQSFLKDDSIDNKVLTRSDKARGKSDNVPSEEVVKKMKNYWRQLLNAKLITQRKFDNLTKAERGGLSELDKAGFIKRQLVETRQITKHVAQILDSRMNTKYDENDKLIREVKVITLKSKLVSDFRKDFQFYKVREINNYHHAHDAYLNAVVGTALIKKYPKLESEFVYGDYKVYDVRKMIAKSEQEIGKATAKYFFYSNIMNFFKTEITLANGEIRKRPLIETNGETGEIVWDKGRDFATVRKVLSMPQVNIVKKTEVQTGGFSKESILPKRNSDKLIARKKDWDPKKYGGFDSPTVAYSVLVVAKVEKGKSKKLKSVKELLGITIMERSSFEKNPIDFLEAKGYKEVKKDLIIKLPKYSLFELENGRKRMLASAGELQKGNELALPSKYVNFLYLASHYEKLKGSPEDNEQKQLFVEQHKHYLDEIIEQISEFSKRVILADANLDKVLSAYNKHRDKPIREQAENIIHLFTLTNLGAPAAFKYFDTTIDRKRYTSTKEVLDATLIHQSITGLYETRIDLSQLGGDGGPAPEAAAKGSSGGLDDEYRLYSPLVKPDQNIQFWLEQFPQAWAETAGMGLAKQVPPQVIQLKASATPVSVRQYPLSKEAQEGIRPHVQRLIQQGILVPVQSPWNTPLLPVRKPGTNDYRPVQDLREVNKRVQDIHPTVPNPYNLLCALPPQRSWYTVLDLKDAFFCLRLHPTSQPLFAFEWRDPGTGRTGQLTWTRLPQGFKNSPTIFNEALHRDLANFRIQHPQVTLLQYVDDLLLAGATKQDCLEGTKALLLELSDLGYRASAKKAQICRREVTYLGYSLRDGQRWLTEARKKTVVQIPAPTTAKQVREFLGKAGFCRLFIPGFATLAAPLYPLTKPKGEFSWAPEHQKAFDAIKKALLSAPALALPDVTKPFTLYVDERKGVARGVLTQTLGPWRRPVAYLSKKLDPVASGWPVCLKAIAAVAILVKDADKLTLGQNITVIAPHALENIVRQPPDRWMTNARMTHYQSLLLTERVTFAPPAALNPATLLPEETDEPVTHDCHQLLIEETGVRKDLTDIPLTGEVLTWFTDGSSYVVEGKRMAGAAVVDGTRTIWASSLPEGTSAQKAELMALTQALRLAEGKSINIYTDSRYAFATAHVHGAIYKQRGWLTSAGREIKNKEEILSLLEALHLPKRLAIIHCPGHQKAKDPISRGNQMADRVAKQAAQGVNLLPAGKRTADGSEFEKRTADGSEFESPKKKAKVE

SEQ ID NO: 94 - protein, 2088 aa, synthetic construct
MPAAKRVKLDGGDKKYSIGLDIGTNSVGWAVITDEYKVPSKKFKVLGNTDRHSIKKNLIGALLFDSGETAEATRLKRTARRRYTRRKNRICYLQEIFSNEMAKVDDSFFHRLEESFLVEEDKKHERHPIFGNIVDEVAYHEKYPTIYHLRKKLVDSTDKADLRLIYLALAHMIKFRGHFLIEGDLNPDNSDVDKLFIQLVQTYNQLFEENPINASGVDAKAILSARLSKSRRLENLIAQLPGEKKNGLFGNLIALSLGLTPNFKSNFDLAEDAKLQLSKDTYDDDLDNLLAQIGDQYADLFLAAKNLSDAILLSDILRVNTEITKAPLSASMIKRYDEHHQDLTLLKALVRQQLPEKYKEIFFDQSKNGYAGYIDGGASQEEFYKFIKPILEKMDGTEELLVKLNREDLLRKQRTFDNGSIPHQIHLGELHAILRRQEDFYPFLKDNREKIEKILTFRIPYYVGPLARGNSRFAWMTRKSEETITPWNFEEVVDKGASAQSFIERMTNFDKNLPNEKVLPKHSLLYEYFTVYNELTKVKYVTEGMRKPAFLSGEQKKAIVDLLFKTNRKVTVKQLKEDYFKKIECFDSVEISGVEDRFNASLGTYHDLLKIIKDKDFLDNEENEDILEDIVLTLTLFEDREMIEERLKTYAHLFDDKVMKQLKRRRYTGWGRLSRKLINGIRDKQSGKTILDFLKSDGFANRNFMQLIHDDSLTFKEDIQKAQVSGQGDSLHEHIANLAGSPAIKKGILQTVKVVDELVKVMGRHKPENIVIEMARENQTTQKGQKNSRERMKRIEEGIKELGSQILKEHPVENTQLQNEKLYLYYLQNGRDMYVDQELDINRLSDYDVDHIVPQSFLKDDSIDNKVLTRSDKARGKSDNVPSEEVVKKMKNYWRQLLNAKLITQRKFDNLTKAERGGLSELDKAGFIKRQLVETRQITKHVAQILDSRMNTKYDENDKLIREVKVITLKSKLVSDFRKDFQFYKVREINNYHHAHDAYLNAVVGTALIKKYPKLESEFVYGDYKVYDVRKMIAKSEQEIGKATAKYFFYSNIMNFFKTEITLANGEIRKRPLIETNGETGEIVWDKGRDFATVRKVLSMPQVNIVKKTEVQTGGFSKESILPKRNSDKLIARKKDWDPKKYGGFDSPTVAYSVLVVAKVEKGKSKKLKSVKELLGITIMERSSFEKNPIDFLEAKGYKEVKKDLIIKLPKYSLFELENGRKRMLASAGELQKGNELALPSKYVNFLYLASHYEKLKGSPEDNEQKQLFVEQHKHYLDEIIEQISEFSKRVILADANLDKVLSAYNKHRDKPIREQAENIIHLFTLTNLGAPAAFKYFDTTIDRKRYTSTKEVLDATLIHQSITGLYETRIDLSQLGGDGGGGSGGGEAAAKGGLDDEYRLYSPLVKPDQNIQFWLEQFPQAWAETAGMGLAKQVPPQVIQLKASATPVSVRQYPLSKEAQEGIRPHVQRLIQQGILVPVQSPWNTPLLPVRKPGTNDYRPVQDLREVNKRVQDIHPTVPNPYNLLCALPPQRSWYTVLDLKDAFFCLRLHPTSQPLFAFEWRDPGTGRTGQLTWTRLPQGFKNSPTIFNEALHRDLANFRIQHPQVTLLQYVDDLLLAGATKQDCLEGTKALLLELSDLGYRASAKKAQICRREVTYLGYSLRDGQRWLTEARKKTVVQIPAPTTAKQVREFLGKAGFCRLFIPGFATLAAPLYPLTKPKGEFSWAPEHQKAFDAIKKALLSAPALALPDVTKPFTLYVDERKGVARGVLTQTLGPWRRPVAYLSKKLDPVASGWPVCLKAIAAVAILVKDADKLTLGQNITVIAPHALENIVRQPPDRWMTNARMTHYQSLLLTERVTFAPPAALNPATLLPEETDEPVTHDCHQLLIEETGVRKDLTDIPLTGEVLTWFTDGSSYVVEGKRMAGAAVVDGTRTIWASSLPEGTSAQKAELMALTQALRLAEGKSINIYTDSRYAFATAHVHGAIYKQRGWLTSAGREIKNKEEILSLLEALHLPKRLAIIHCPGHQKAKDPISRGNQMADRVAKQAAQGVNLLPAGKRTADGSEFEKRTADGSEFESPKKKAKVE

SEQ ID NO: 95 - protein, 2086 aa, synthetic construct
MPAAKRVKLDGGDKKYSIGLDIGTNSVGWAVITDEYKVPSKKFKVLGNTDRHSIKKNLIGALLFDSGETAEATRLKRTARRRYTRRKNRICYLQEIFSNEMAKVDDSFFHRLEESFLVEEDKKHERHPIFGNIVDEVAYHEKYPTIYHLRKKLVDSTDKADLRLIYLALAHMIKFRGHFLIEGDLNPDNSDVDKLFIQLVQTYNQLFEENPINASGVDAKAILSARLSKSRRLENLIAQLPGEKKNGLFGNLIALSLGLTPNFKSNFDLAEDAKLQLSKDTYDDDLDNLLAQIGDQYADLFLAAKNLSDAILLSDILRVNTEITKAPLSASMIKRYDEHHQDLTLLKALVRQQLPEKYKEIFFDQSKNGYAGYIDGGASQEEFYKFIKPILEKMDGTEELLVKLNREDLLRKQRTFDNGSIPHQIHLGELHAILRRQEDFYPFLKDNREKIEKILTFRIPYYVGPLARGNSRFAWMTRKSEETITPWNFEEVVDKGASAQSFIERMTNFDKNLPNEKVLPKHSLLYEYFTVYNELTKVKYVTEGMRKPAFLSGEQKKAIVDLLFKTNRKVTVKQLKEDYFKKIECFDSVEISGVEDRFNASLGTYHDLLKIIKDKDFLDNEENEDILEDIVLTLTLFEDREMIEERLKTYAHLFDDKVMKQLKRRRYTGWGRLSRKLINGIRDKQSGKTILDFLKSDGFANRNFMQLIHDDSLTFKEDIQKAQVSGQGDSLHEHIANLAGSPAIKKGILQTVKVVDELVKVMGRHKPENIVIEMARENQTTQKGQKNSRERMKRIEEGIKELGSQILKEHPVENTQLQNEKLYLYYLQNGRDMYVDQELDINRLSDYDVDHIVPQSFLKDDSIDNKVLTRSDKARGKSDNVPSEEVVKKMKNYWRQLLNAKLITQRKFDNLTKAERGGLSELDKAGFIKRQLVETRQITKHVAQILDSRMNTKYDENDKLIREVKVITLKSKLVSDFRKDFQFYKVREINNYHHAHDAYLNAVVGTALIKKYPKLESEFVYGDYKVYDVRKMIAKSEQEIGKATAKYFFYSNIMNFFKTEITLANGEIRKRPLIETNGETGEIVWDKGRDFATVRKVLSMPQVNIVKKTEVQTGGFSKESILPKRNSDKLIARKKDWDPKKYGGFDSPTVAYSVLVVAKVEKGKSKKLKSVKELLGITIMERSSFEKNPIDFLEAKGYKEVKKDLIIKLPKYSLFELENGRKRMLASAGELQKGNELALPSKYVNFLYLASHYEKLKGSPEDNEQKQLFVEQHKHYLDEIIEQISEFSKRVILADANLDKVLSAYNKHRDKPIREQAENIIHLFTLTNLGAPAAFKYFDTTIDRKRYTSTKEVLDATLIHQSITGLYETRIDLSQLGGDGGGGGGSSGGSGGLDDEYRLYSPLVKPDQNIQFWLEQFPQAWAETAGMGLAKQVPPQVIQLKASATPVSVRQYPLSKEAQEGIRPHVQRLIQQGILVPVQSPWNTPLLPVRKPGTNDYRPVQDLREVNKRVQDIHPTVPNPYNLLCALPPQRSWYTVLDLKDAFFCLRLHPTSQPLFAFEWRDPGTGRTGQLTWTRLPQGFKNSPTIFNEALHRDLANFRIQHPQVTLLQYVDDLLLAGATKQDCLEGTKALLLELSDLGYRASAKKAQICRREVTYLGYSLRDGQRWLTEARKKTVVQIPAPTTAKQVREFLGKAGFCRLFIPGFATLAAPLYPLTKPKGEFSWAPEHQKAFDAIKKALLSAPALALPDVTKPFTLYVDERKGVARGVLTQTLGPWRRPVAYLSKKLDPVASGWPVCLKAIAAVAILVKDADKLTLGQNITVIAPHALENIVRQPPDRWMTNARMTHYQSLLLTERVTFAPPAALNPATLLPEETDEPVTHDCHQLLIEETGVRKDLTDIPLTGEVLTWFTDGSSYVVEGKRMAGAAVVDGTRTIWASSLPEGTSAQKAELMALTQALRLAEGKSINIYTDSRYAFATAHVHGAIYKQRGWLTSAGREIKNKEEILSLLEALHLPKRLAIIHCPGHQKAKDPISRGNQMADRVAKQAAQGVNLLPAGKRTADGSEFEKRTADGSEFESPKKKAKVE

SEQ ID NO: 96 - protein, 2104 aa, synthetic construct
MPAAKRVKLDGGDKKYSIGLDIGTNSVGWAVITDEYKVPSKKFKVLGNTDRHSIKKNLIGALLFDSGETAEATRLKRTARRRYTRRKNRICYLQEIFSNEMAKVDDSFFHRLEESFLVEEDKKHERHPIFGNIVDEVAYHEKYPTIYHLRKKLVDSTDKADLRLIYLALAHMIKFRGHFLIEGDLNPDNSDVDKLFIQLVQTYNQLFEENPINASGVDAKAILSARLSKSRRLENLIAQLPGEKKNGLFGNLIALSLGLTPNFKSNFDLAEDAKLQLSKDTYDDDLDNLLAQIGDQYADLFLAAKNLSDAILLSDILRVNTEITKAPLSASMIKRYDEHHQDLTLLKALVRQQLPEKYKEIFFDQSKNGYAGYIDGGASQEEFYKFIKPILEKMDGTEELLVKLNREDLLRKQRTFDNGSIPHQIHLGELHAILRRQEDFYPFLKDNREKIEKILTFRIPYYVGPLARGNSRFAWMTRKSEETITPWNFEEVVDKGASAQSFIERMTNFDKNLPNEKVLPKHSLLYEYFTVYNELTKVKYVTEGMRKPAFLSGEQKKAIVDLLFKTNRKVTVKQLKEDYFKKIECFDSVEISGVEDRFNASLGTYHDLLKIIKDKDFLDNEENEDILEDIVLTLTLFEDREMIEERLKTYAHLFDDKVMKQLKRRRYTGWGRLSRKLINGIRDKQSGKTILDFLKSDGFANRNFMQLIHDDSLTFKEDIQKAQVSGQGDSLHEHIANLAGSPAIKKGILQTVKVVDELVKVMGRHKPENIVIEMARENQTTQKGQKNSRERMKRIEEGIKELGSQILKEHPVENTQLQNEKLYLYYLQNGRDMYVDQELDINRLSDYDVDHIVPQSFLKDDSIDNKVLTRSDKARGKSDNVPSEEVVKKMKNYWRQLLNAKLITQRKFDNLTKAERGGLSELDKAGFIKRQLVETRQITKHVAQILDSRMNTKYDENDKLIREVKVITLKSKLVSDFRKDFQFYKVREINNYHHAHDAYLNAVVGTALIKKYPKLESEFVYGDYKVYDVRKMIAKSEQEIGKATAKYFFYSNIMNFFKTEITLANGEIRKRPLIETNGETGEIVWDKGRDFATVRKVLSMPQVNIVKKTEVQTGGFSKESILPKRNSDKLIARKKDWDPKKYGGFDSPTVAYSVLVVAKVEKGKSKKLKSVKELLGITIMERSSFEKNPIDFLEAKGYKEVKKDLIIKLPKYSLFELENGRKRMLASAGELQKGNELALPSKYVNFLYLASHYEKLKGSPEDNEQKQLFVEQHKHYLDEIIEQISEFSKRVILADANLDKVLSAYNKHRDKPIREQAENIIHLFTLTNLGAPAAFKYFDTTIDRKRYTSTKEVLDATLIHQSITGLYETRIDLSQLGGDGGEAAAKEAAAKEAAAKEAAAKEAAAKGGTLQLDDEYRLYSPLVKPDQNIQFWLEQFPQAWAETAGMGLAKQVPPQVIQLKASATPVSVRQYPLSKEAQEGIRPHVQRLIQQGILVPVQSPWNTPLLPVRKPGTNDYRPVQDLREVNKRVQDIHPTVPNPYNLLCALPPQRSWYTVLDLKDAFFCLRLHPTSQPLFAFEWRDPGTGRTGQLTWTRLPQGFKNSPTIFDEALHRDLANFRIQHPQVTLLQYVDDLLLAGATKQDCLEGTKALLLELSDLGYRASAKKAQICRREVTYLGYSLRDGQRWLTEARKKTVVQIPAPTTAKQVREFLGTAGFCRLWIPGFATLAAPLYPLTKEKGEFSWAPEHQKAFDAIKKALLSAPALALPDVTKPFTLYVDERKGVARGVLTQTLGPWRRPVAYLSKKLDPVASGWPVCLKAIAAVAILVKDADKLTLGQNITVIAPHALENIVRQPPDRWMTNARMTHYQSLLLTERVTFAPPAALNPATLLPEETDEPVTHDCHQLLIEETGVRKDLTDIPLTGEVLTWFTDGSSYVVEGKRMAGAAVVDGTRTIWASSLPEGTSAQKAELMALTQALRLAEGKSINIYTDSRYAFATAHVHGAIYKQRGLLTSAGREIKNKEEILSLLEALHLPKRLAIIHCPGHQKAKDPISRGNQMADRVAKQAAQGVNLLAGKRTADGSEFEKRTADGSEFESPKKKAKVE

SEQ ID NO: 97 - protein, 2094 aa, synthetic construct
MPAAKRVKLDGGDKKYSIGLDIGTNSVGWAVITDEYKVPSKKFKVLGNTDRHSIKKNLIGALLFDSGETAEATRLKRTARRRYTRRKNRICYLQEIFSNEMAKVDDSFFHRLEESFLVEEDKKHERHPIFGNIVDEVAYHEKYPTIYHLRKKLVDSTDKADLRLIYLALAHMIKFRGHFLIEGDLNPDNSDVDKLFIQLVQTYNQLFEENPINASGVDAKAILSARLSKSRRLENLIAQLPGEKKNGLFGNLIALSLGLTPNFKSNFDLAEDAKLQLSKDTYDDDLDNLLAQIGDQYADLFLAAKNLSDAILLSDILRVNTEITKAPLSASMIKRYDEHHQDLTLLKALVRQQLPEKYKEIFFDQSKNGYAGYIDGGASQEEFYKFIKPILEKMDGTEELLVKLNREDLLRKQRTFDNGSIPHQIHLGELHAILRRQEDFYPFLKDNREKIEKILTFRIPYYVGPLARGNSRFAWMTRKSEETITPWNFEEVVDKGASAQSFIERMTNFDKNLPNEKVLPKHSLLYEYFTVYNELTKVKYVTEGMRKPAFLSGEQKKAIVDLLFKTNRKVTVKQLKEDYFKKIECFDSVEISGVEDRFNASLGTYHDLLKIIKDKDFLDNEENEDILEDIVLTLTLFEDREMIEERLKTYAHLFDDKVMKQLKRRRYTGWGRLSRKLINGIRDKQSGKTILDFLKSDGFANRNFMQLIHDDSLTFKEDIQKAQVSGQGDSLHEHIANLAGSPAIKKGILQTVKVVDELVKVMGRHKPENIVIEMARENQTTQKGQKNSRERMKRIEEGIKELGSQILKEHPVENTQLQNEKLYLYYLQNGRDMYVDQELDINRLSDYDVDHIVPQSFLKDDSIDNKVLTRSDKARGKSDNVPSEEVVKKMKNYWRQLLNAKLITQRKFDNLTKAERGGLSELDKAGFIKRQLVETRQITKHVAQILDSRMNTKYDENDKLIREVKVITLKSKLVSDFRKDFQFYKVREINNYHHAHDAYLNAVVGTALIKKYPKLESEFVYGDYKVYDVRKMIAKSEQEIGKATAKYFFYSNIMNFFKTEITLANGEIRKRPLIETNGETGEIVWDKGRDFATVRKVLSMPQVNIVKKTEVQTGGFSKESILPKRNSDKLIARKKDWDPKKYGGFDSPTVAYSVLVVAKVEKGKSKKLKSVKELLGITIMERSSFEKNPIDFLEAKGYKEVKKDLIIKLPKYSLFELENGRKRMLASAGELQKGNELALPSKYVNFLYLASHYEKLKGSPEDNEQKQLFVEQHKHYLDEIIEQISEFSKRVILADANLDKVLSAYNKHRDKPIREQAENIIHLFTLTNLGAPAAFKYFDTTIDRKRYTSTKEVLDATLIHQSITGLYETRIDLSQLGGDGGEAAAKGGGGSEAAAKGGTLQLDDEYRLYSPLVKPDQNIQFWLEQFPQAWAETAGMGLAKQVPPQVIQLKASATPVSVRQYPLSKEAQEGIRPHVQRLIQQGILVPVQSPWNTPLLPVRKPGTNDYRPVQDLREVNKRVQDIHPTVPNPYNLLCALPPQRSWYTVLDLKDAFFCLRLHPTSQPLFAFEWRDPGTGRTGQLTWTRLPQGFKNSPTIFDEALHRDLANFRIQHPQVTLLQYVDDLLLAGATKQDCLEGTKALLLELSDLGYRASAKKAQICRREVTYLGYSLRDGQRWLTEARKKTVVQIPAPTTAKQVREFLGTAGFCRLWIPGFATLAAPLYPLTKEKGEFSWAPEHQKAFDAIKKALLSAPALALPDVTKPFTLYVDERKGVARGVLTQTLGPWRRPVAYLSKKLDPVASGWPVCLKAIAAVAILVKDADKLTLGQNITVIAPHALENIVRQPPDRWMTNARMTHYQSLLLTERVTFAPPAALNPATLLPEETDEPVTHDCHQLLIEETGVRKDLTDIPLTGEVLTWFTDGSSYVVEGKRMAGAAVVDGTRTIWASSLPEGTSAQKAELMALTQALRLAEGKSINIYTDSRYAFATAHVHGAIYKQRGLLTSAGREIKNKEEILSLLEALHLPKRLAIIHCPGHQKAKDPISRGNQMADRVAKQAAQGVNLLAGKRTADGSEFEKRTADGSEFESPKKKAKVE

SEQ ID NO: 98 - protein, 2125 aa, synthetic construct
MPAAKRVKLDGGDKKYSIGLDIGTNSVGWAVITDEYKVPSKKFKVLGNTDRHSIKKNLIGALLFDSGETAEATRLKRTARRRYTRRKNRICYLQEIFSNEMAKVDDSFFHRLEESFLVEEDKKHERHPIFGNIVDEVAYHEKYPTIYHLRKKLVDSTDKADLRLIYLALAHMIKFRGHFLIEGDLNPDNSDVDKLFIQLVQTYNQLFEENPINASGVDAKAILSARLSKSRRLENLIAQLPGEKKNGLFGNLIALSLGLTPNFKSNFDLAEDAKLQLSKDTYDDDLDNLLAQIGDQYADLFLAAKNLSDAILLSDILRVNTEITKAPLSASMIKRYDEHHQDLTLLKALVRQQLPEKYKEIFFDQSKNGYAGYIDGGASQEEFYKFIKPILEKMDGTEELLVKLNREDLLRKQRTFDNGSIPHQIHLGELHAILRRQEDFYPFLKDNREKIEKILTFRIPYYVGPLARGNSRFAWMTRKSEETITPWNFEEVVDKGASAQSFIERMTNFDKNLPNEKVLPKHSLLYEYFTVYNELTKVKYVTEGMRKPAFLSGEQKKAIVDLLFKTNRKVTVKQLKEDYFKKIECFDSVEISGVEDRFNASLGTYHDLLKIIKDKDFLDNEENEDILEDIVLTLTLFEDREMIEERLKTYAHLFDDKVMKQLKRRRYTGWGRLSRKLINGIRDKQSGKTILDFLKSDGFANRNFMQLIHDDSLTFKEDIQKAQVSGQGDSLHEHIANLAGSPAIKKGILQTVKVVDELVKVMGRHKPENIVIEMARENQTTQKGQKNSRERMKRIEEGIKELGSQILKEHPVENTQLQNEKLYLYYLQNGRDMYVDQELDINRLSDYDVDHIVPQSFLKDDSIDNKVLTRSDKARGKSDNVPSEEVVKKMKNYWRQLLNAKLITQRKFDNLTKAERGGLSELDKAGFIKRQLVETRQITKHVAQILDSRMNTKYDENDKLIREVKVITLKSKLVSDFRKDFQFYKVREINNYHHAHDAYLNAVVGTALIKKYPKLESEFVYGDYKVYDVRKMIAKSEQEIGKATAKYFFYSNIMNFFKTEITLANGEIRKRPLIETNGETGEIVWDKGRDFATVRKVLSMPQVNIVKKTEVQTGGFSKESILPKRNSDKLIARKKDWDPKKYGGFDSPTVAYSVLVVAKVEKGKSKKLKSVKELLGITIMERSSFEKNPIDFLEAKGYKEVKKDLIIKLPKYSLFELENGRKRMLASAGELQKGNELALPSKYVNFLYLASHYEKLKGSPEDNEQKQLFVEQHKHYLDEIIEQISEFSKRVILADANLDKVLSAYNKHRDKPIREQAENIIHLFTLTNLGAPAAFKYFDTTIDRKRYTSTKEVLDATLIHQSITGLYETRIDLSQLGGDGGAEAAAKEAAAKEAAAKEAAAKALEAEAAAKEAAAKEAAAKEAAAKAGGTLQLDDEYRLYSPLVKPDQNIQFWLEQFPQAWAETAGMGLAKQVPPQVIQLKASATPVSVRQYPLSKEAQEGIRPHVQRLIQQGILVPVQSPWNTPLLPVRKPGTNDYRPVQDLREVNKRVQDIHPTVPNPYNLLCALPPQRSWYTVLDLKDAFFCLRLHPTSQPLFAFEWRDPGTGRTGQLTWTRLPQGFKNSPTIFDEALHRDLANFRIQHPQVTLLQYVDDLLLAGATKQDCLEGTKALLLELSDLGYRASAKKAQICRREVTYLGYSLRDGQRWLTEARKKTVVQIPAPTTAKQVREFLGTAGFCRLWIPGFATLAAPLYPLTKEKGEFSWAPEHQKAFDAIKKALLSAPALALPDVTKPFTLYVDERKGVARGVLTQTLGPWRRPVAYLSKKLDPVASGWPVCLKAIAAVAILVKDADKLTLGQNITVIAPHALENIVRQPPDRWMTNARMTHYQSLLLTERVTFAPPAALNPATLLPEETDEPVTHDCHQLLIEETGVRKDLTDIPLTGEVLTWFTDGSSYVVEGKRMAGAAVVDGTRTIWASSLPEGTSAQKAELMALTQALRLAEGKSINIYTDSRYAFATAHVHGAIYKQRGLLTSAGREIKNKEEILSLLEALHLPKRLAIIHCPGHQKAKDPISRGNQMADRVAKQAAQGVNLLAGKRTADGSEFEKRTADGSEFESPKKKAKVE

SEQ ID NO: 99 - protein, 2094 aa, synthetic construct
MPAAKRVKLDGGDKKYSIGLDIGTNSVGWAVITDEYKVPSKKFKVLGNTDRHSIKKNLIGALLFDSGETAEATRLKRTARRRYTRRKNRICYLQEIFSNEMAKVDDSFFHRLEESFLVEEDKKHERHPIFGNIVDEVAYHEKYPTIYHLRKKLVDSTDKADLRLIYLALAHMIKFRGHFLIEGDLNPDNSDVDKLFIQLVQTYNQLFEENPINASGVDAKAILSARLSKSRRLENLIAQLPGEKKNGLFGNLIALSLGLTPNFKSNFDLAEDAKLQLSKDTYDDDLDNLLAQIGDQYADLFLAAKNLSDAILLSDILRVNTEITKAPLSASMIKRYDEHHQDLTLLKALVRQQLPEKYKEIFFDQSKNGYAGYIDGGASQEEFYKFIKPILEKMDGTEELLVKLNREDLLRKQRTFDNGSIPHQIHLGELHAILRRQEDFYPFLKDNREKIEKILTFRIPYYVGPLARGNSRFAWMTRKSEETITPWNFEEVVDKGASAQSFIERMTNFDKNLPNEKVLPKHSLLYEYFTVYNELTKVKYVTEGMRKPAFLSGEQKKAIVDLLFKTNRKVTVKQLKEDYFKKIECFDSVEISGVEDRFNASLGTYHDLLKIIKDKDFLDNEENEDILEDIVLTLTLFEDREMIEERLKTYAHLFDDKVMKQLKRRRYTGWGRLSRKLINGIRDKQSGKTILDFLKSDGFANRNFMQLIHDDSLTFKEDIQKAQVSGQGDSLHEHIANLAGSPAIKKGILQTVKVVDELVKVMGRHKPENIVIEMARENQTTQKGQKNSRERMKRIEEGIKELGSQILKEHPVENTQLQNEKLYLYYLQNGRDMYVDQELDINRLSDYDVDHIVPQSFLKDDSIDNKVLTRSDKARGKSDNVPSEEVVKKMKNYWRQLLNAKLITQRKFDNLTKAERGGLSELDKAGFIKRQLVETRQITKHVAQILDSRMNTKYDENDKLIREVKVITLKSKLVSDFRKDFQFYKVREINNYHHAHDAYLNAVVGTALIKKYPKLESEFVYGDYKVYDVRKMIAKSEQEIGKATAKYFFYSNIMNFFKTEITLANGEIRKRPLIETNGETGEIVWDKGRDFATVRKVLSMPQVNIVKKTEVQTGGFSKESILPKRNSDKLIARKKDWDPKKYGGFDSPTVAYSVLVVAKVEKGKSKKLKSVKELLGITIMERSSFEKNPIDFLEAKGYKEVKKDLIIKLPKYSLFELENGRKRMLASAGELQKGNELALPSKYVNFLYLASHYEKLKGSPEDNEQKQLFVEQHKHYLDEIIEQISEFSKRVILADANLDKVLSAYNKHRDKPIREQAENIIHLFTLTNLGAPAAFKYFDTTIDRKRYTSTKEVLDATLIHQSITGLYETRIDLSQLGGDGGGSSGSSGSSGSSGSSGGTLQLDDEYRLYSPLVKPDQNIQFWLEQFPQAWAETAGMGLAKQVPPQVIQLKASATPVSVRQYPLSKEAQEGIRPHVQRLIQQGILVPVQSPWNTPLLPVRKPGTNDYRPVQDLREVNKRVQDIHPTVPNPYNLLCALPPQRSWYTVLDLKDAFFCLRLHPTSQPLFAFEWRDPGTGRTGQLTWTRLPQGFKNSPTIFDEALHRDLANFRIQHPQVTLLQYVDDLLLAGATKQDCLEGTKALLLELSDLGYRASAKKAQICRREVTYLGYSLRDGQRWLTEARKKTVVQIPAPTTAKQVREFLGTAGFCRLWIPGFATLAAPLYPLTKEKGEFSWAPEHQKAFDAIKKALLSAPALALPDVTKPFTLYVDERKGVARGVLTQTLGPWRRPVAYLSKKLDPVASGWPVCLKAIAAVAILVKDADKLTLGQNITVIAPHALENIVRQPPDRWMTNARMTHYQSLLLTERVTFAPPAALNPATLLPEETDEPVTHDCHQLLIEETGVRKDLTDIPLTGEVLTWFTDGSSYVVEGKRMAGAAVVDGTRTIWASSLPEGTSAQKAELMALTQALRLAEGKSINIYTDSRYAFATAHVHGAIYKQRGLLTSAGREIKNKEEILSLLEALHLPKRLAIIHCPGHQKAKDPISRGNQMADRVAKQAAQGVNLLAGKRTADGSEFEKRTADGSEFESPKKKAKVE

SEQ ID NO: 100 - protein, 2085 aa, synthetic construct
MPAAKRVKLDGGDKKYSIGLDIGTNSVGWAVITDEYKVPSKKFKVLGNTDRHSIKKNLIGALLFDSGETAEATRLKRTARRRYTRRKNRICYLQEIFSNEMAKVDDSFFHRLEESFLVEEDKKHERHPIFGNIVDEVAYHEKYPTIYHLRKKLVDSTDKADLRLIYLALAHMIKFRGHFLIEGDLNPDNSDVDKLFIQLVQTYNQLFEENPINASGVDAKAILSARLSKSRRLENLIAQLPGEKKNGLFGNLIALSLGLTPNFKSNFDLAEDAKLQLSKDTYDDDLDNLLAQIGDQYADLFLAAKNLSDAILLSDILRVNTEITKAPLSASMIKRYDEHHQDLTLLKALVRQQLPEKYKEIFFDQSKNGYAGYIDGGASQEEFYKFIKPILEKMDGTEELLVKLNREDLLRKQRTFDNGSIPHQIHLGELHAILRRQEDFYPFLKDNREKIEKILTFRIPYYVGPLARGNSRFAWMTRKSEETITPWNFEEVVDKGASAQSFIERMTNFDKNLPNEKVLPKHSLLYEYFTVYNELTKVKYVTEGMRKPAFLSGEQKKAIVDLLFKTNRKVTVKQLKEDYFKKIECFDSVEISGVEDRFNASLGTYHDLLKIIKDKDFLDNEENEDILEDIVLTLTLFEDREMIEERLKTYAHLFDDKVMKQLKRRRYTGWGRLSRKLINGIRDKQSGKTILDFLKSDGFANRNFMQLIHDDSLTFKEDIQKAQVSGQGDSLHEHIANLAGSPAIKKGILQTVKVVDELVKVMGRHKPENIVIEMARENQTTQKGQKNSRERMKRIEEGIKELGSQILKEHPVENTQLQNEKLYLYYLQNGRDMYVDQELDINRLSDYDVDHIVPQSFLKDDSIDNKVLTRSDKARGKSDNVPSEEVVKKMKNYWRQLLNAKLITQRKFDNLTKAERGGLSELDKAGFIKRQLVETRQITKHVAQILDSRMNTKYDENDKLIREVKVITLKSKLVSDFRKDFQFYKVREINNYHHAHDAYLNAVVGTALIKKYPKLESEFVYGDYKVYDVRKMIAKSEQEIGKATAKYFFYSNIMNFFKTEITLANGEIRKRPLIETNGETGEIVWDKGRDFATVRKVLSMPQVNIVKKTEVQTGGFSKESILPKRNSDKLIARKKDWDPKKYGGFDSPTVAYSVLVVAKVEKGKSKKLKSVKELLGITIMERSSFEKNPIDFLEAKGYKEVKKDLIIKLPKYSLFELENGRKRMLASAGELQKGNELALPSKYVNFLYLASHYEKLKGSPEDNEQKQLFVEQHKHYLDEIIEQISEFSKRVILADANLDKVLSAYNKHRDKPIREQAENIIHLFTLTNLGAPAAFKYFDTTIDRKRYTSTKEVLDATLIHQSITGLYETRIDLSQLGGDGGGGGGSSGGTLQLDDEYRLYSPLVKPDQNIQFWLEQFPQAWAETAGMGLAKQVPPQVIQLKASATPVSVRQYPLSKEAQEGIRPHVQRLIQQGILVPVQSPWNTPLLPVRKPGTNDYRPVQDLREVNKRVQDIHPTVPNPYNLLCALPPQRSWYTVLDLKDAFFCLRLHPTSQPLFAFEWRDPGTGRTGQLTWTRLPQGFKNSPTIFDEALHRDLANFRIQHPQVTLLQYVDDLLLAGATKQDCLEGTKALLLELSDLGYRASAKKAQICRREVTYLGYSLRDGQRWLTEARKKTVVQIPAPTTAKQVREFLGTAGFCRLWIPGFATLAAPLYPLTKEKGEFSWAPEHQKAFDAIKKALLSAPALALPDVTKPFTLYVDERKGVARGVLTQTLGPWRRPVAYLSKKLDPVASGWPVCLKAIAAVAILVKDADKLTLGQNITVIAPHALENIVRQPPDRWMTNARMTHYQSLLLTERVTFAPPAALNPATLLPEETDEPVTHDCHQLLIEETGVRKDLTDIPLTGEVLTWFTDGSSYVVEGKRMAGAAVVDGTRTIWASSLPEGTSAQKAELMALTQALRLAEGKSINIYTDSRYAFATAHVHGAIYKQRGLLTSAGREIKNKEEILSLLEALHLPKRLAIIHCPGHQKAKDPISRGNQMADRVAKQAAQGVNLLAGKRTADGSEFEKRTADGSEFESPKKKAKVE

SEQ ID NO: 101 - protein, 2088 aa, synthetic construct
MPAAKRVKLDGGDKKYSIGLDIGTNSVGWAVITDEYKVPSKKFKVLGNTDRHSIKKNLIGALLFDSGETAEATRLKRTARRRYTRRKNRICYLQEIFSNEMAKVDDSFFHRLEESFLVEEDKKHERHPIFGNIVDEVAYHEKYPTIYHLRKKLVDSTDKADLRLIYLALAHMIKFRGHFLIEGDLNPDNSDVDKLFIQLVQTYNQLFEENPINASGVDAKAILSARLSKSRRLENLIAQLPGEKKNGLFGNLIALSLGLTPNFKSNFDLAEDAKLQLSKDTYDDDLDNLLAQIGDQYADLFLAAKNLSDAILLSDILRVNTEITKAPLSASMIKRYDEHHQDLTLLKALVRQQLPEKYKEIFFDQSKNGYAGYIDGGASQEEFYKFIKPILEKMDGTEELLVKLNREDLLRKQRTFDNGSIPHQIHLGELHAILRRQEDFYPFLKDNREKIEKILTFRIPYYVGPLARGNSRFAWMTRKSEETITPWNFEEVVDKGASAQSFIERMTNFDKNLPNEKVLPKHSLLYEYFTVYNELTKVKYVTEGMRKPAFLSGEQKKAIVDLLFKTNRKVTVKQLKEDYFKKIECFDSVEISGVEDRFNASLGTYHDLLKIIKDKDFLDNEENEDILEDIVLTLTLFEDREMIEERLKTYAHLFDDKVMKQLKRRRYTGWGRLSRKLINGIRDKQSGKTILDFLKSDGFANRNFMQLIHDDSLTFKEDIQKAQVSGQGDSLHEHIANLAGSPAIKKGILQTVKVVDELVKVMGRHKPENIVIEMARENQTTQKGQKNSRERMKRIEEGIKELGSQILKEHPVENTQLQNEKLYLYYLQNGRDMYVDQELDINRLSDYDVDHIVPQSFLKDDSIDNKVLTRSDKARGKSDNVPSEEVVKKMKNYWRQLLNAKLITQRKFDNLTKAERGGLSELDKAGFIKRQLVETRQITKHVAQILDSRMNTKYDENDKLIREVKVITLKSKLVSDFRKDFQFYKVREINNYHHAHDAYLNAVVGTALIKKYPKLESEFVYGDYKVYDVRKMIAKSEQEIGKATAKYFFYSNIMNFFKTEITLANGEIRKRPLIETNGETGEIVWDKGRDFATVRKVLSMPQVNIVKKTEVQTGGFSKESILPKRNSDKLIARKKDWDPKKYGGFDSPTVAYSVLVVAKVEKGKSKKLKSVKELLGITIMERSSFEKNPIDFLEAKGYKEVKKDLIIKLPKYSLFELENGRKRMLASAGELQKGNELALPSKYVNFLYLASHYEKLKGSPEDNEQKQLFVEQHKHYLDEIIEQISEFSKRVILADANLDKVLSAYNKHRDKPIREQAENIIHLFTLTNLGAPAAFKYFDTTIDRKRYTSTKEVLDATLIHQSITGLYETRIDLSQLGGDGGGSSGGSPAPGGTLQLDDEYRLYSPLVKPDQNIQFWLEQFPQAWAETAGMGLAKQVPPQVIQLKASATPVSVRQYPLSKEAQEGIRPHVQRLIQQGILVPVQSPWNTPLLPVRKPGTNDYRPVQDLREVNKRVQDIHPTVPNPYNLLCALPPQRSWYTVLDLKDAFFCLRLHPTSQPLFAFEWRDPGTGRTGQLTWTRLPQGFKNSPTIFDEALHRDLANFRIQHPQVTLLQYVDDLLLAGATKQDCLEGTKALLLELSDLGYRASAKKAQICRREVTYLGYSLRDGQRWLTEARKKTVVQIPAPTTAKQVREFLGTAGFCRLWIPGFATLAAPLYPLTKEKGEFSWAPEHQKAFDAIKKALLSAPALALPDVTKPFTLYVDERKGVARGVLTQTLGPWRRPVAYLSKKLDPVASGWPVCLKAIAAVAILVKDADKLTLGQNITVIAPHALENIVRQPPDRWMTNARMTHYQSLLLTERVTFAPPAALNPATLLPEETDEPVTHDCHQLLIEETGVRKDLTDIPLTGEVLTWFTDGSSYVVEGKRMAGAAVVDGTRTIWASSLPEGTSAQKAELMALTQALRLAEGKSINIYTDSRYAFATAHVHGAIYKQRGLLTSAGREIKNKEEILSLLEALHLPKRLAIIHCPGHQKAKDPISRGNQMADRVAKQAAQGVNLLAGKRTADGSEFEKRTADGSEFESPKKKAKVE

SEQ ID NO: 102 - protein, 2089 aa, synthetic construct
MPAAKRVKLDGGDKKYSIGLDIGTNSVGWAVITDEYKVPSKKFKVLGNTDRHSIKKNLIGALLFDSGETAEATRLKRTARRRYTRRKNRICYLQEIFSNEMAKVDDSFFHRLEESFLVEEDKKHERHPIFGNIVDEVAYHEKYPTIYHLRKKLVDSTDKADLRLIYLALAHMIKFRGHFLIEGDLNPDNSDVDKLFIQLVQTYNQLFEENPINASGVDAKAILSARLSKSRRLENLIAQLPGEKKNGLFGNLIALSLGLTPNFKSNFDLAEDAKLQLSKDTYDDDLDNLLAQIGDQYADLFLAAKNLSDAILLSDILRVNTEITKAPLSASMIKRYDEHHQDLTLLKALVRQQLPEKYKEIFFDQSKNGYAGYIDGGASQEEFYKFIKPILEKMDGTEELLVKLNREDLLRKQRTFDNGSIPHQIHLGELHAILRRQEDFYPFLKDNREKIEKILTFRIPYYVGPLARGNSRFAWMTRKSEETITPWNFEEVVDKGASAQSFIERMTNFDKNLPNEKVLPKHSLLYEYFTVYNELTKVKYVTEGMRKPAFLSGEQKKAIVDLLFKTNRKVTVKQLKEDYFKKIECFDSVEISGVEDRFNASLGTYHDLLKIIKDKDFLDNEENEDILEDIVLTLTLFEDREMIEERLKTYAHLFDDKVMKQLKRRRYTGWGRLSRKLINGIRDKQSGKTILDFLKSDGFANRNFMQLIHDDSLTFKEDIQKAQVSGQGDSLHEHIANLAGSPAIKKGILQTVKVVDELVKVMGRHKPENIVIEMARENQTTQKGQKNSRERMKRIEEGIKELGSQILKEHPVENTQLQNEKLYLYYLQNGRDMYVDQELDINRLSDYDVDHIVPQSFLKDDSIDNKVLTRSDKARGKSDNVPSEEVVKKMKNYWRQLLNAKLITQRKFDNLTKAERGGLSELDKAGFIKRQLVETRQITKHVAQILDSRMNTKYDENDKLIREVKVITLKSKLVSDFRKDFQFYKVREINNYHHAHDAYLNAVVGTALIKKYPKLESEFVYGDYKVYDVRKMIAKSEQEIGKATAKYFFYSNIMNFFKTEITLANGEIRKRPLIETNGETGEIVWDKGRDFATVRKVLSMPQVNIVKKTEVQTGGFSKESILPKRNSDKLIARKKDWDPKKYGGFDSPTVAYSVLVVAKVEKGKSKKLKSVKELLGITIMERSSFEKNPIDFLEAKGYKEVKKDLIIKLPKYSLFELENGRKRMLASAGELQKGNELALPSKYVNFLYLASHYEKLKGSPEDNEQKQLFVEQHKHYLDEIIEQISEFSKRVILADANLDKVLSAYNKHRDKPIREQAENIIHLFTLTNLGAPAAFKYFDTTIDRKRYTSTKEVLDATLIHQSITGLYETRIDLSQLGGDGGGGGGSGGGGSGGTLQLDDEYRLYSPLVKPDQNIQFWLEQFPQAWAETAGMGLAKQVPPQVIQLKASATPVSVRQYPLSKEAQEGIRPHVQRLIQQGILVPVQSPWNTPLLPVRKPGTNDYRPVQDLREVNKRVQDIHPTVPNPYNLLCALPPQRSWYTVLDLKDAFFCLRLHPTSQPLFAFEWRDPGTGRTGQLTWTRLPQGFKNSPTIFDEALHRDLANFRIQHPQVTLLQYVDDLLLAGATKQDCLEGTKALLLELSDLGYRASAKKAQICRREVTYLGYSLRDGQRWLTEARKKTVVQIPAPTTAKQVREFLGTAGFCRLWIPGFATLAAPLYPLTKEKGEFSWAPEHQKAFDAIKKALLSAPALALPDVTKPFTLYVDERKGVARGVLTQTLGPWRRPVAYLSKKLDPVASGWPVCLKAIAAVAILVKDADKLTLGQNITVIAPHALENIVRQPPDRWMTNARMTHYQSLLLTERVTFAPPAALNPATLLPEETDEPVTHDCHQLLIEETGVRKDLTDIPLTGEVLTWFTDGSSYVVEGKRMAGAAVVDGTRTIWASSLPEGTSAQKAELMALTQALRLAEGKSINIYTDSRYAFATAHVHGAIYKQRGLLTSAGREIKNKEEILSLLEALHLPKRLAIIHCPGHQKAKDPISRGNQMADRVAKQAAQGVNLLAGKRTADGSEFEKRTADGSEFESPKKKAKVE

SEQ ID NO: 103 - protein, 2091 aa, synthetic construct
MPAAKRVKLDGGDKKYSIGLDIGTNSVGWAVITDEYKVPSKKFKVLGNTDRHSIKKNLIGALLFDSGETAEATRLKRTARRRYTRRKNRICYLQEIFSNEMAKVDDSFFHRLEESFLVEEDKKHERHPIFGNIVDEVAYHEKYPTIYHLRKKLVDSTDKADLRLIYLALAHMIKFRGHFLIEGDLNPDNSDVDKLFIQLVQTYNQLFEENPINASGVDAKAILSARLSKSRRLENLIAQLPGEKKNGLFGNLIALSLGLTPNFKSNFDLAEDAKLQLSKDTYDDDLDNLLAQIGDQYADLFLAAKNLSDAILLSDILRVNTEITKAPLSASMIKRYDEHHQDLTLLKALVRQQLPEKYKEIFFDQSKNGYAGYIDGGASQEEFYKFIKPILEKMDGTEELLVKLNREDLLRKQRTFDNGSIPHQIHLGELHAILRRQEDFYPFLKDNREKIEKILTFRIPYYVGPLARGNSRFAWMTRKSEETITPWNFEEVVDKGASAQSFIERMTNFDKNLPNEKVLPKHSLLYEYFTVYNELTKVKYVTEGMRKPAFLSGEQKKAIVDLLFKTNRKVTVKQLKEDYFKKIECFDSVEISGVEDRFNASLGTYHDLLKIIKDKDFLDNEENEDILEDIVLTLTLFEDREMIEERLKTYAHLFDDKVMKQLKRRRYTGWGRLSRKLINGIRDKQSGKTILDFLKSDGFANRNFMQLIHDDSLTFKEDIQKAQVSGQGDSLHEHIANLAGSPAIKKGILQTVKVVDELVKVMGRHKPENIVIEMARENQTTQKGQKNSRERMKRIEEGIKELGSQILKEHPVENTQLQNEKLYLYYLQNGRDMYVDQELDINRLSDYDVDHIVPQSFLKDDSIDNKVLTRSDKARGKSDNVPSEEVVKKMKNYWRQLLNAKLITQRKFDNLTKAERGGLSELDKAGFIKRQLVETRQITKHVAQILDSRMNTKYDENDKLIREVKVITLKSKLVSDFRKDFQFYKVREINNYHHAHDAYLNAVVGTALIKKYPKLESEFVYGDYKVYDVRKMIAKSEQEIGKATAKYFFYSNIMNFFKTEITLANGEIRKRPLIETNGETGEIVWDKGRDFATVRKVLSMPQVNIVKKTEVQTGGFSKESILPKRNSDKLIARKKDWDPKKYGGFDSPTVAYSVLVVAKVEKGKSKKLKSVKELLGITIMERSSFEKNPIDFLEAKGYKEVKKDLIIKLPKYSLFELENGRKRMLASAGELQKGNELALPSKYVNFLYLASHYEKLKGSPEDNEQKQLFVEQHKHYLDEIIEQISEFSKRVILADANLDKVLSAYNKHRDKPIREQAENIIHLFTLTNLGAPAAFKYFDTTIDRKRYTSTKEVLDATLIHQSITGLYETRIDLSQLGGDGGGSSGSSGSSGSSGGTLQLDDEYRLYSPLVKPDQNIQFWLEQFPQAWAETAGMGLAKQVPPQVIQLKASATPVSVRQYPLSKEAQEGIRPHVQRLIQQGILVPVQSPWNTPLLPVRKPGTNDYRPVQDLREVNKRVQDIHPTVPNPYNLLCALPPQRSWYTVLDLKDAFFCLRLHPTSQPLFAFEWRDPGTGRTGQLTWTRLPQGFKNSPTIFDEALHRDLANFRIQHPQVTLLQYVDDLLLAGATKQDCLEGTKALLLELSDLGYRASAKKAQICRREVTYLGYSLRDGQRWLTEARKKTVVQIPAPTTAKQVREFLGTAGFCRLWIPGFATLAAPLYPLTKEKGEFSWAPEHQKAFDAIKKALLSAPALALPDVTKPFTLYVDERKGVARGVLTQTLGPWRRPVAYLSKKLDPVASGWPVCLKAIAAVAILVKDADKLTLGQNITVIAPHALENIVRQPPDRWMTNARMTHYQSLLLTERVTFAPPAALNPATLLPEETDEPVTHDCHQLLIEETGVRKDLTDIPLTGEVLTWFTDGSSYVVEGKRMAGAAVVDGTRTIWASSLPEGTSAQKAELMALTQALRLAEGKSINIYTDSRYAFATAHVHGAIYKQRGLLTSAGREIKNKEEILSLLEALHLPKRLAIIHCPGHQKAKDPISRGNQMADRVAKQAAQGVNLLAGKRTADGSEFEKRTADGSEFESPKKKAKVE

SEQ ID NO: 104 - protein, 2090 aa, synthetic construct
MPAAKRVKLDGGDKKYSIGLDIGTNSVGWAVITDEYKVPSKKFKVLGNTDRHSIKKNLIGALLFDSGETAEATRLKRTARRRYTRRKNRICYLQEIFSNEMAKVDDSFFHRLEESFLVEEDKKHERHPIFGNIVDEVAYHEKYPTIYHLRKKLVDSTDKADLRLIYLALAHMIKFRGHFLIEGDLNPDNSDVDKLFIQLVQTYNQLFEENPINASGVDAKAILSARLSKSRRLENLIAQLPGEKKNGLFGNLIALSLGLTPNFKSNFDLAEDAKLQLSKDTYDDDLDNLLAQIGDQYADLFLAAKNLSDAILLSDILRVNTEITKAPLSASMIKRYDEHHQDLTLLKALVRQQLPEKYKEIFFDQSKNGYAGYIDGGASQEEFYKFIKPILEKMDGTEELLVKLNREDLLRKQRTFDNGSIPHQIHLGELHAILRRQEDFYPFLKDNREKIEKILTFRIPYYVGPLARGNSRFAWMTRKSEETITPWNFEEVVDKGASAQSFIERMTNFDKNLPNEKVLPKHSLLYEYFTVYNELTKVKYVTEGMRKPAFLSGEQKKAIVDLLFKTNRKVTVKQLKEDYFKKIECFDSVEISGVEDRFNASLGTYHDLLKIIKDKDFLDNEENEDILEDIVLTLTLFEDREMIEERLKTYAHLFDDKVMKQLKRRRYTGWGRLSRKLINGIRDKQSGKTILDFLKSDGFANRNFMQLIHDDSLTFKEDIQKAQVSGQGDSLHEHIANLAGSPAIKKGILQTVKVVDELVKVMGRHKPENIVIEMARENQTTQKGQKNSRERMKRIEEGIKELGSQILKEHPVENTQLQNEKLYLYYLQNGRDMYVDQELDINRLSDYDVDHIVPQSFLKDDSIDNKVLTRSDKARGKSDNVPSEEVVKKMKNYWRQLLNAKLITQRKFDNLTKAERGGLSELDKAGFIKRQLVETRQITKHVAQILDSRMNTKYDENDKLIREVKVITLKSKLVSDFRKDFQFYKVREINNYHHAHDAYLNAVVGTALIKKYPKLESEFVYGDYKVYDVRKMIAKSEQEIGKATAKYFFYSNIMNFFKTEITLANGEIRKRPLIETNGETGEIVWDKGRDFATVRKVLSMPQVNIVKKTEVQTGGFSKESILPKRNSDKLIARKKDWDPKKYGGFDSPTVAYSVLVVAKVEKGKSKKLKSVKELLGITIMERSSFEKNPIDFLEAKGYKEVKKDLIIKLPKYSLFELENGRKRMLASAGELQKGNELALPSKYVNFLYLASHYEKLKGSPEDNEQKQLFVEQHKHYLDEIIEQISEFSKRVILADANLDKVLSAYNKHRDKPIREQAENIIHLFTLTNLGAPAAFKYFDTTIDRKRYTSTKEVLDATLIHQSITGLYETRIDLSQLGGDGGPAPGSSEAAAKGGTLQLDDEYRLYSPLVKPDQNIQFWLEQFPQAWAETAGMGLAKQVPPQVIQLKASATPVSVRQYPLSKEAQEGIRPHVQRLIQQGILVPVQSPWNTPLLPVRKPGTNDYRPVQDLREVNKRVQDIHPTVPNPYNLLCALPPQRSWYTVLDLKDAFFCLRLHPTSQPLFAFEWRDPGTGRTGQLTWTRLPQGFKNSPTIFDEALHRDLANFRIQHPQVTLLQYVDDLLLAGATKQDCLEGTKALLLELSDLGYRASAKKAQICRREVTYLGYSLRDGQRWLTEARKKTVVQIPAPTTAKQVREFLGTAGFCRLWIPGFATLAAPLYPLTKEKGEFSWAPEHQKAFDAIKKALLSAPALALPDVTKPFTLYVDERKGVARGVLTQTLGPWRRPVAYLSKKLDPVASGWPVCLKAIAAVAILVKDADKLTLGQNITVIAPHALENIVRQPPDRWMTNARMTHYQSLLLTERVTFAPPAALNPATLLPEETDEPVTHDCHQLLIEETGVRKDLTDIPLTGEVLTWFTDGSSYVVEGKRMAGAAVVDGTRTIWASSLPEGTSAQKAELMALTQALRLAEGKSINIYTDSRYAFATAHVHGAIYKQRGLLTSAGREIKNKEEILSLLEALHLPKRLAIIHCPGHQKAKDPISRGNQMADRVAKQAAQGVNLLAGKRTADGSEFEKRTADGSEFESPKKKAKVE

SEQ ID NO: 105 - protein, 2085 aa, synthetic construct
MPAAKRVKLDGGDKKYSIGLDIGTNSVGWAVITDEYKVPSKKFKVLGNTDRHSIKKNLIGALLFDSGETAEATRLKRTARRRYTRRKNRICYLQEIFSNEMAKVDDSFFHRLEESFLVEEDKKHERHPIFGNIVDEVAYHEKYPTIYHLRKKLVDSTDKADLRLIYLALAHMIKFRGHFLIEGDLNPDNSDVDKLFIQLVQTYNQLFEENPINASGVDAKAILSARLSKSRRLENLIAQLPGEKKNGLFGNLIALSLGLTPNFKSNFDLAEDAKLQLSKDTYDDDLDNLLAQIGDQYADLFLAAKNLSDAILLSDILRVNTEITKAPLSASMIKRYDEHHQDLTLLKALVRQQLPEKYKEIFFDQSKNGYAGYIDGGASQEEFYKFIKPILEKMDGTEELLVKLNREDLLRKQRTFDNGSIPHQIHLGELHAILRRQEDFYPFLKDNREKIEKILTFRIPYYVGPLARGNSRFAWMTRKSEETITPWNFEEVVDKGASAQSFIERMTNFDKNLPNEKVLPKHSLLYEYFTVYNELTKVKYVTEGMRKPAFLSGEQKKAIVDLLFKTNRKVTVKQLKEDYFKKIECFDSVEISGVEDRFNASLGTYHDLLKIIKDKDFLDNEENEDILEDIVLTLTLFEDREMIEERLKTYAHLFDDKVMKQLKRRRYTGWGRLSRKLINGIRDKQSGKTILDFLKSDGFANRNFMQLIHDDSLTFKEDIQKAQVSGQGDSLHEHIANLAGSPAIKKGILQTVKVVDELVKVMGRHKPENIVIEMARENQTTQKGQKNSRERMKRIEEGIKELGSQILKEHPVENTQLQNEKLYLYYLQNGRDMYVDQELDINRLSDYDVDHIVPQSFLKDDSIDNKVLTRSDKARGKSDNVPSEEVVKKMKNYWRQLLNAKLITQRKFDNLTKAERGGLSELDKAGFIKRQLVETRQITKHVAQILDSRMNTKYDENDKLIREVKVITLKSKLVSDFRKDFQFYKVREINNYHHAHDAYLNAVVGTALIKKYPKLESEFVYGDYKVYDVRKMIAKSEQEIGKATAKYFFYSNIMNFFKTEITLANGEIRKRPLIETNGETGEIVWDKGRDFATVRKVLSMPQVNIVKKTEVQTGGFSKESILPKRNSDKLIARKKDWDPKKYGGFDSPTVAYSVLVVAKVEKGKSKKLKSVKELLGITIMERSSFEKNPIDFLEAKGYKEVKKDLIIKLPKYSLFELENGRKRMLASAGELQKGNELALPSKYVNFLYLASHYEKLKGSPEDNEQKQLFVEQHKHYLDEIIEQISEFSKRVILADANLDKVLSAYNKHRDKPIREQAENIIHLFTLTNLGAPAAFKYFDTTIDRKRYTSTKEVLDATLIHQSITGLYETRIDLSQLGGDGGGGSGSSGGTLQLDDEYRLYSPLVKPDQNIQFWLEQFPQAWAETAGMGLAKQVPPQVIQLKASATPVSVRQYPLSKEAQEGIRPHVQRLIQQGILVPVQSPWNTPLLPVRKPGTNDYRPVQDLREVNKRVQDIHPTVPNPYNLLCALPPQRSWYTVLDLKDAFFCLRLHPTSQPLFAFEWRDPGTGRTGQLTWTRLPQGFKNSPTIFDEALHRDLANFRIQHPQVTLLQYVDDLLLAGATKQDCLEGTKALLLELSDLGYRASAKKAQICRREVTYLGYSLRDGQRWLTEARKKTVVQIPAPTTAKQVREFLGTAGFCRLWIPGFATLAAPLYPLTKEKGEFSWAPEHQKAFDAIKKALLSAPALALPDVTKPFTLYVDERKGVARGVLTQTLGPWRRPVAYLSKKLDPVASGWPVCLKAIAAVAILVKDADKLTLGQNITVIAPHALENIVRQPPDRWMTNARMTHYQSLLLTERVTFAPPAALNPATLLPEETDEPVTHDCHQLLIEETGVRKDLTDIPLTGEVLTWFTDGSSYVVEGKRMAGAAVVDGTRTIWASSLPEGTSAQKAELMALTQALRLAEGKSINIYTDSRYAFATAHVHGAIYKQRGLLTSAGREIKNKEEILSLLEALHLPKRLAIIHCPGHQKAKDPISRGNQMADRVAKQAAQGVNLLAGKRTADGSEFEKRTADGSEFESPKKKAKVE

SEQ ID NO: 106 - protein, 2088 aa, synthetic construct
MPAAKRVKLDGGDKKYSIGLDIGTNSVGWAVITDEYKVPSKKFKVLGNTDRHSIKKNLIGALLFDSGETAEATRLKRTARRRYTRRKNRICYLQEIFSNEMAKVDDSFFHRLEESFLVEEDKKHERHPIFGNIVDEVAYHEKYPTIYHLRKKLVDSTDKADLRLIYLALAHMIKFRGHFLIEGDLNPDNSDVDKLFIQLVQTYNQLFEENPINASGVDAKAILSARLSKSRRLENLIAQLPGEKKNGLFGNLIALSLGLTPNFKSNFDLAEDAKLQLSKDTYDDDLDNLLAQIGDQYADLFLAAKNLSDAILLSDILRVNTEITKAPLSASMIKRYDEHHQDLTLLKALVRQQLPEKYKEIFFDQSKNGYAGYIDGGASQEEFYKFIKPILEKMDGTEELLVKLNREDLLRKQRTFDNGSIPHQIHLGELHAILRRQEDFYPFLKDNREKIEKILTFRIPYYVGPLARGNSRFAWMTRKSEETITPWNFEEVVDKGASAQSFIERMTNFDKNLPNEKVLPKHSLLYEYFTVYNELTKVKYVTEGMRKPAFLSGEQKKAIVDLLFKTNRKVTVKQLKEDYFKKIECFDSVEISGVEDRFNASLGTYHDLLKIIKDKDFLDNEENEDILEDIVLTLTLFEDREMIEERLKTYAHLFDDKVMKQLKRRRYTGWGRLSRKLINGIRDKQSGKTILDFLKSDGFANRNFMQLIHDDSLTFKEDIQKAQVSGQGDSLHEHIANLAGSPAIKKGILQTVKVVDELVKVMGRHKPENIVIEMARENQTTQKGQKNSRERMKRIEEGIKELGSQILKEHPVENTQLQNEKLYLYYLQNGRDMYVDQELDINRLSDYDVDHIVPQSFLKDDSIDNKVLTRSDKARGKSDNVPSEEVVKKMKNYWRQLLNAKLITQRKFDNLTKAERGGLSELDKAGFIKRQLVETRQITKHVAQILDSRMNTKYDENDKLIREVKVITLKSKLVSDFRKDFQFYKVREINNYHHAHDAYLNAVVGTALIKKYPKLESEFVYGDYKVYDVRKMIAKSEQEIGKATAKYFFYSNIMNFFKTEITLANGEIRKRPLIETNGETGEIVWDKGRDFATVRKVLSMPQVNIVKKTEVQTGGFSKESILPKRNSDKLIARKKDWDPKKYGGFDSPTVAYSVLVVAKVEKGKSKKLKSVKELLGITIMERSSFEKNPIDFLEAKGYKEVKKDLIIKLPKYSLFELENGRKRMLASAGELQKGNELALPSKYVNFLYLASHYEKLKGSPEDNEQKQLFVEQHKHYLDEIIEQISEFSKRVILADANLDKVLSAYNKHRDKPIREQAENIIHLFTLTNLGAPAAFKYFDTTIDRKRYTSTKEVLDATLIHQSITGLYETRIDLSQLGGDGGPAPGSSGGGGGTLQLDDEYRLYSPLVKPDQNIQFWLEQFPQAWAETAGMGLAKQVPPQVIQLKASATPVSVRQYPLSKEAQEGIRPHVQRLIQQGILVPVQSPWNTPLLPVRKPGTNDYRPVQDLREVNKRVQDIHPTVPNPYNLLCALPPQRSWYTVLDLKDAFFCLRLHPTSQPLFAFEWRDPGTGRTGQLTWTRLPQGFKNSPTIFDEALHRDLANFRIQHPQVTLLQYVDDLLLAGATKQDCLEGTKALLLELSDLGYRASAKKAQICRREVTYLGYSLRDGQRWLTEARKKTVVQIPAPTTAKQVREFLGTAGFCRLWIPGFATLAAPLYPLTKEKGEFSWAPEHQKAFDAIKKALLSAPALALPDVTKPFTLYVDERKGVARGVLTQTLGPWRRPVAYLSKKLDPVASGWPVCLKAIAAVAILVKDADKLTLGQNITVIAPHALENIVRQPPDRWMTNARMTHYQSLLLTERVTFAPPAALNPATLLPEETDEPVTHDCHQLLIEETGVRKDLTDIPLTGEVLTWFTDGSSYVVEGKRMAGAAVVDGTRTIWASSLPEGTSAQKAELMALTQALRLAEGKSINIYTDSRYAFATAHVHGAIYKQRGLLTSAGREIKNKEEILSLLEALHLPKRLAIIHCPGHQKAKDPISRGNQMADRVAKQAAQGVNLLAGKRTADGSEFEKRTADGSEFESPKKKAKVE

SEQ ID NO: 107 - protein, 2088 aa, synthetic construct
MPAAKRVKLDGGDKKYSIGLDIGTNSVGWAVITDEYKVPSKKFKVLGNTDRHSIKKNLIGALLFDSGETAEATRLKRTARRRYTRRKNRICYLQEIFSNEMAKVDDSFFHRLEESFLVEEDKKHERHPIFGNIVDEVAYHEKYPTIYHLRKKLVDSTDKADLRLIYLALAHMIKFRGHFLIEGDLNPDNSDVDKLFIQLVQTYNQLFEENPINASGVDAKAILSARLSKSRRLENLIAQLPGEKKNGLFGNLIALSLGLTPNFKSNFDLAEDAKLQLSKDTYDDDLDNLLAQIGDQYADLFLAAKNLSDAILLSDILRVNTEITKAPLSASMIKRYDEHHQDLTLLKALVRQQLPEKYKEIFFDQSKNGYAGYIDGGASQEEFYKFIKPILEKMDGTEELLVKLNREDLLRKQRTFDNGSIPHQIHLGELHAILRRQEDFYPFLKDNREKIEKILTFRIPYYVGPLARGNSRFAWMTRKSEETITPWNFEEVVDKGASAQSFIERMTNFDKNLPNEKVLPKHSLLYEYFTVYNELTKVKYVTEGMRKPAFLSGEQKKAIVDLLFKTNRKVTVKQLKEDYFKKIECFDSVEISGVEDRFNASLGTYHDLLKIIKDKDFLDNEENEDILEDIVLTLTLFEDREMIEERLKTYAHLFDDKVMKQLKRRRYTGWGRLSRKLINGIRDKQSGKTILDFLKSDGFANRNFMQLIHDDSLTFKEDIQKAQVSGQGDSLHEHIANLAGSPAIKKGILQTVKVVDELVKVMGRHKPENIVIEMARENQTTQKGQKNSRERMKRIEEGIKELGSQILKEHPVENTQLQNEKLYLYYLQNGRDMYVDQELDINRLSDYDVDHIVPQSFLKDDSIDNKVLTRSDKARGKSDNVPSEEVVKKMKNYWRQLLNAKLITQRKFDNLTKAERGGLSELDKAGFIKRQLVETRQITKHVAQILDSRMNTKYDENDKLIREVKVITLKSKLVSDFRKDFQFYKVREINNYHHAHDAYLNAVVGTALIKKYPKLESEFVYGDYKVYDVRKMIAKSEQEIGKATAKYFFYSNIMNFFKTEITLANGEIRKRPLIETNGETGEIVWDKGRDFATVRKVLSMPQVNIVKKTEVQTGGFSKESILPKRNSDKLIARKKDWDPKKYGGFDSPTVAYSVLVVAKVEKGKSKKLKSVKELLGITIMERSSFEKNPIDFLEAKGYKEVKKDLIIKLPKYSLFELENGRKRMLASAGELQKGNELALPSKYVNFLYLASHYEKLKGSPEDNEQKQLFVEQHKHYLDEIIEQISEFSKRVILADANLDKVLSAYNKHRDKPIREQAENIIHLFTLTNLGAPAAFKYFDTTIDRKRYTSTKEVLDATLIHQSITGLYETRIDLSQLGGDGGGGGPAPGSSGGTLQLDDEYRLYSPLVKPDQNIQFWLEQFPQAWAETAGMGLAKQVPPQVIQLKASATPVSVRQYPLSKEAQEGIRPHVQRLIQQGILVPVQSPWNTPLLPVRKPGTNDYRPVQDLREVNKRVQDIHPTVPNPYNLLCALPPQRSWYTVLDLKDAFFCLRLHPTSQPLFAFEWRDPGTGRTGQLTWTRLPQGFKNSPTIFDEALHRDLANFRIQHPQVTLLQYVDDLLLAGATKQDCLEGTKALLLELSDLGYRASAKKAQICRREVTYLGYSLRDGQRWLTEARKKTVVQIPAPTTAKQVREFLGTAGFCRLWIPGFATLAAPLYPLTKEKGEFSWAPEHQKAFDAIKKALLSAPALALPDVTKPFTLYVDERKGVARGVLTQTLGPWRRPVAYLSKKLDPVASGWPVCLKAIAAVAILVKDADKLTLGQNITVIAPHALENIVRQPPDRWMTNARMTHYQSLLLTERVTFAPPAALNPATLLPEETDEPVTHDCHQLLIEETGVRKDLTDIPLTGEVLTWFTDGSSYVVEGKRMAGAAVVDGTRTIWASSLPEGTSAQKAELMALTQALRLAEGKSINIYTDSRYAFATAHVHGAIYKQRGLLTSAGREIKNKEEILSLLEALHLPKRLAIIHCPGHQKAKDPISRGNQMADRVAKQAAQGVNLLAGKRTADGSEFEKRTADGSEFESPKKKAKVE

SEQ ID NO: 108 - protein, 2090 aa, synthetic construct
MPAAKRVKLDGGDKKYSIGLDIGTNSVGWAVITDEYKVPSKKFKVLGNTDRHSIKKNLIGALLFDSGETAEATRLKRTARRRYTRRKNRICYLQEIFSNEMAKVDDSFFHRLEESFLVEEDKKHERHPIFGNIVDEVAYHEKYPTIYHLRKKLVDSTDKADLRLIYLALAHMIKFRGHFLIEGDLNPDNSDVDKLFIQLVQTYNQLFEENPINASGVDAKAILSARLSKSRRLENLIAQLPGEKKNGLFGNLIALSLGLTPNFKSNFDLAEDAKLQLSKDTYDDDLDNLLAQIGDQYADLFLAAKNLSDAILLSDILRVNTEITKAPLSASMIKRYDEHHQDLTLLKALVRQQLPEKYKEIFFDQSKNGYAGYIDGGASQEEFYKFIKPILEKMDGTEELLVKLNREDLLRKQRTFDNGSIPHQIHLGELHAILRRQEDFYPFLKDNREKIEKILTFRIPYYVGPLARGNSRFAWMTRKSEETITPWNFEEVVDKGASAQSFIERMTNFDKNLPNEKVLPKHSLLYEYFTVYNELTKVKYVTEGMRKPAFLSGEQKKAIVDLLFKTNRKVTVKQLKEDYFKKIECFDSVEISGVEDRFNASLGTYHDLLKIIKDKDFLDNEENEDILEDIVLTLTLFEDREMIEERLKTYAHLFDDKVMKQLKRRRYTGWGRLSRKLINGIRDKQSGKTILDFLKSDGFANRNFMQLIHDDSLTFKEDIQKAQVSGQGDSLHEHIANLAGSPAIKKGILQTVKVVDELVKVMGRHKPENIVIEMARENQTTQKGQKNSRERMKRIEEGIKELGSQILKEHPVENTQLQNEKLYLYYLQNGRDMYVDQELDINRLSDYDVDHIVPQSFLKDDSIDNKVLTRSDKARGKSDNVPSEEVVKKMKNYWRQLLNAKLITQRKFDNLTKAERGGLSELDKAGFIKRQLVETRQITKHVAQILDSRMNTKYDENDKLIREVKVITLKSKLVSDFRKDFQFYKVREINNYHHAHDAYLNAVVGTALIKKYPKLESEFVYGDYKVYDVRKMIAKSEQEIGKATAKYFFYSNIMNFFKTEITLANGEIRKRPLIETNGETGEIVWDKGRDFATVRKVLSMPQVNIVKKTEVQTGGFSKESILPKRNSDKLIARKKDWDPKKYGGFDSPTVAYSVLVVAKVEKGKSKKLKSVKELLGITIMERSSFEKNPIDFLEAKGYKEVKKDLIIKLPKYSLFELENGRKRMLASAGELQKGNELALPSKYVNFLYLASHYEKLKGSPEDNEQKQLFVEQHKHYLDEIIEQISEFSKRVILADANLDKVLSAYNKHRDKPIREQAENIIHLFTLTNLGAPAAFKYFDTTIDRKRYTSTKEVLDATLIHQSITGLYETRIDLSQLGGDGGGGGEAAAKPAPGGTLQLDDEYRLYSPLVKPDQNIQFWLEQFPQAWAETAGMGLAKQVPPQVIQLKASATPVSVRQYPLSKEAQEGIRPHVQRLIQQGILVPVQSPWNTPLLPVRKPGTNDYRPVQDLREVNKRVQDIHPTVPNPYNLLCALPPQRSWYTVLDLKDAFFCLRLHPTSQPLFAFEWRDPGTGRTGQLTWTRLPQGFKNSPTIFDEALHRDLANFRIQHPQVTLLQYVDDLLLAGATKQDCLEGTKALLLELSDLGYRASAKKAQICRREVTYLGYSLRDGQRWLTEARKKTVVQIPAPTTAKQVREFLGTAGFCRLWIPGFATLAAPLYPLTKEKGEFSWAPEHQKAFDAIKKALLSAPALALPDVTKPFTLYVDERKGVARGVLTQTLGPWRRPVAYLSKKLDPVASGWPVCLKAIAAVAILVKDADKLTLGQNITVIAPHALENIVRQPPDRWMTNARMTHYQSLLLTERVTFAPPAALNPATLLPEETDEPVTHDCHQLLIEETGVRKDLTDIPLTGEVLTWFTDGSSYVVEGKRMAGAAVVDGTRTIWASSLPEGTSAQKAELMALTQALRLAEGKSINIYTDSRYAFATAHVHGAIYKQRGLLTSAGREIKNKEEILSLLEALHLPKRLAIIHCPGHQKAKDPISRGNQMADRVAKQAAQGVNLLAGKRTADGSEFEKRTADGSEFESPKKKAKVE

SEQ ID NO: 109 - protein, 2085 aa, synthetic construct
MPAAKRVKLDGGDKKYSIGLDIGTNSVGWAVITDEYKVPSKKFKVLGNTDRHSIKKNLIGALLFDSGETAEATRLKRTARRRYTRRKNRICYLQEIFSNEMAKVDDSFFHRLEESFLVEEDKKHERHPIFGNIVDEVAYHEKYPTIYHLRKKLVDSTDKADLRLIYLALAHMIKFRGHFLIEGDLNPDNSDVDKLFIQLVQTYNQLFEENPINASGVDAKAILSARLSKSRRLENLIAQLPGEKKNGLFGNLIALSLGLTPNFKSNFDLAEDAKLQLSKDTYDDDLDNLLAQIGDQYADLFLAAKNLSDAILLSDILRVNTEITKAPLSASMIKRYDEHHQDLTLLKALVRQQLPEKYKEIFFDQSKNGYAGYIDGGASQEEFYKFIKPILEKMDGTEELLVKLNREDLLRKQRTFDNGSIPHQIHLGELHAILRRQEDFYPFLKDNREKIEKILTFRIPYYVGPLARGNSRFAWMTRKSEETITPWNFEEVVDKGASAQSFIERMTNFDKNLPNEKVLPKHSLLYEYFTVYNELTKVKYVTEGMRKPAFLSGEQKKAIVDLLFKTNRKVTVKQLKEDYFKKIECFDSVEISGVEDRFNASLGTYHDLLKIIKDKDFLDNEENEDILEDIVLTLTLFEDREMIEERLKTYAHLFDDKVMKQLKRRRYTGWGRLSRKLINGIRDKQSGKTILDFLKSDGFANRNFMQLIHDDSLTFKEDIQKAQVSGQGDSLHEHIANLAGSPAIKKGILQTVKVVDELVKVMGRHKPENIVIEMARENQTTQKGQKNSRERMKRIEEGIKELGSQILKEHPVENTQLQNEKLYLYYLQNGRDMYVDQELDINRLSDYDVDHIVPQSFLKDDSIDNKVLTRSDKARGKSDNVPSEEVVKKMKNYWRQLLNAKLITQRKFDNLTKAERGGLSELDKAGFIKRQLVETRQITKHVAQILDSRMNTKYDENDKLIREVKVITLKSKLVSDFRKDFQFYKVREINNYHHAHDAYLNAVVGTALIKKYPKLESEFVYGDYKVYDVRKMIAKSEQEIGKATAKYFFYSNIMNFFKTEITLANGEIRKRPLIETNGETGEIVWDKGRDFATVRKVLSMPQVNIVKKTEVQTGGFSKESILPKRNSDKLIARKKDWDPKKYGGFDSPTVAYSVLVVAKVEKGKSKKLKSVKELLGITIMERSSFEKNPIDFLEAKGYKEVKKDLIIKLPKYSLFELENGRKRMLASAGELQKGNELALPSKYVNFLYLASHYEKLKGSPEDNEQKQLFVEQHKHYLDEIIEQISEFSKRVILADANLDKVLSAYNKHRDKPIREQAENIIHLFTLTNLGAPAAFKYFDTTIDRKRYTSTKEVLDATLIHQSITGLYETRIDLSQLGGDGGGGSPAPGGTLQLDDEYRLYSPLVKPDQNIQFWLEQFPQAWAETAGMGLAKQVPPQVIQLKASATPVSVRQYPLSKEAQEGIRPHVQRLIQQGILVPVQSPWNTPLLPVRKPGTNDYRPVQDLREVNKRVQDIHPTVPNPYNLLCALPPQRSWYTVLDLKDAFFCLRLHPTSQPLFAFEWRDPGTGRTGQLTWTRLPQGFKNSPTIFDEALHRDLANFRIQHPQVTLLQYVDDLLLAGATKQDCLEGTKALLLELSDLGYRASAKKAQICRREVTYLGYSLRDGQRWLTEARKKTVVQIPAPTTAKQVREFLGTAGFCRLWIPGFATLAAPLYPLTKEKGEFSWAPEHQKAFDAIKKALLSAPALALPDVTKPFTLYVDERKGVARGVLTQTLGPWRRPVAYLSKKLDPVASGWPVCLKAIAAVAILVKDADKLTLGQNITVIAPHALENIVRQPPDRWMTNARMTHYQSLLLTERVTFAPPAALNPATLLPEETDEPVTHDCHQLLIEETGVRKDLTDIPLTGEVLTWFTDGSSYVVEGKRMAGAAVVDGTRTIWASSLPEGTSAQKAELMALTQALRLAEGKSINIYTDSRYAFATAHVHGAIYKQRGLLTSAGREIKNKEEILSLLEALHLPKRLAIIHCPGHQKAKDPISRGNQMADRVAKQAAQGVNLLAGKRTADGSEFEKRTADGSEFESPKKKAKVE

SEQ ID NO: 110 - protein, 2085 aa, synthetic construct
MPAAKRVKLDGGDKKYSIGLDIGTNSVGWAVITDEYKVPSKKFKVLGNTDRHSIKKNLIGALLFDSGETAEATRLKRTARRRYTRRKNRICYLQEIFSNEMAKVDDSFFHRLEESFLVEEDKKHERHPIFGNIVDEVAYHEKYPTIYHLRKKLVDSTDKADLRLIYLALAHMIKFRGHFLIEGDLNPDNSDVDKLFIQLVQTYNQLFEENPINASGVDAKAILSARLSKSRRLENLIAQLPGEKKNGLFGNLIALSLGLTPNFKSNFDLAEDAKLQLSKDTYDDDLDNLLAQIGDQYADLFLAAKNLSDAILLSDILRVNTEITKAPLSASMIKRYDEHHQDLTLLKALVRQQLPEKYKEIFFDQSKNGYAGYIDGGASQEEFYKFIKPILEKMDGTEELLVKLNREDLLRKQRTFDNGSIPHQIHLGELHAILRRQEDFYPFLKDNREKIEKILTFRIPYYVGPLARGNSRFAWMTRKSEETITPWNFEEVVDKGASAQSFIERMTNFDKNLPNEKVLPKHSLLYEYFTVYNELTKVKYVTEGMRKPAFLSGEQKKAIVDLLFKTNRKVTVKQLKEDYFKKIECFDSVEISGVEDRFNASLGTYHDLLKIIKDKDFLDNEENEDILEDIVLTLTLFEDREMIEERLKTYAHLFDDKVMKQLKRRRYTGWGRLSRKLINGIRDKQSGKTILDFLKSDGFANRNFMQLIHDDSLTFKEDIQKAQVSGQGDSLHEHIANLAGSPAIKKGILQTVKVVDELVKVMGRHKPENIVIEMARENQTTQKGQKNSRERMKRIEEGIKELGSQILKEHPVENTQLQNEKLYLYYLQNGRDMYVDQELDINRLSDYDVDHIVPQSFLKDDSIDNKVLTRSDKARGKSDNVPSEEVVKKMKNYWRQLLNAKLITQRKFDNLTKAERGGLSELDKAGFIKRQLVETRQITKHVAQILDSRMNTKYDENDKLIREVKVITLKSKLVSDFRKDFQFYKVREINNYHHAHDAYLNAVVGTALIKKYPKLESEFVYGDYKVYDVRKMIAKSEQEIGKATAKYFFYSNIMNFFKTEITLANGEIRKRPLIETNGETGEIVWDKGRDFATVRKVLSMPQVNIVKKTEVQTGGFSKESILPKRNSDKLIARKKDWDPKKYGGFDSPTVAYSVLVVAKVEKGKSKKLKSVKELLGITIMERSSFEKNPIDFLEAKGYKEVKKDLIIKLPKYSLFELENGRKRMLASAGELQKGNELALPSKYVNFLYLASHYEKLKGSPEDNEQKQLFVEQHKHYLDEIIEQISEFSKRVILADANLDKVLSAYNKHRDKPIREQAENIIHLFTLTNLGAPAAFKYFDTTIDRKRYTSTKEVLDATLIHQSITGLYETRIDLSQLGGDGGGSSGSSGGTLQLDDEYRLYSPLVKPDQNIQFWLEQFPQAWAETAGMGLAKQVPPQVIQLKASATPVSVRQYPLSKEAQEGIRPHVQRLIQQGILVPVQSPWNTPLLPVRKPGTNDYRPVQDLREVNKRVQDIHPTVPNPYNLLCALPPQRSWYTVLDLKDAFFCLRLHPTSQPLFAFEWRDPGTGRTGQLTWTRLPQGFKNSPTIFDEALHRDLANFRIQHPQVTLLQYVDDLLLAGATKQDCLEGTKALLLELSDLGYRASAKKAQICRREVTYLGYSLRDGQRWLTEARKKTVVQIPAPTTAKQVREFLGTAGFCRLWIPGFATLAAPLYPLTKEKGEFSWAPEHQKAFDAIKKALLSAPALALPDVTKPFTLYVDERKGVARGVLTQTLGPWRRPVAYLSKKLDPVASGWPVCLKAIAAVAILVKDADKLTLGQNITVIAPHALENIVRQPPDRWMTNARMTHYQSLLLTERVTFAPPAALNPATLLPEETDEPVTHDCHQLLIEETGVRKDLTDIPLTGEVLTWFTDGSSYVVEGKRMAGAAVVDGTRTIWASSLPEGTSAQKAELMALTQALRLAEGKSINIYTDSRYAFATAHVHGAIYKQRGLLTSAGREIKNKEEILSLLEALHLPKRLAIIHCPGHQKAKDPISRGNQMADRVAKQAAQGVNLLAGKRTADGSEFEKRTADGSEFESPKKKAKVE

SEQ ID NO: 111 - protein, 2091 aa, synthetic construct
MPAAKRVKLDGGDKKYSIGLDIGTNSVGWAVITDEYKVPSKKFKVLGNTDRHSIKKNLIGALLFDSGETAEATRLKRTARRRYTRRKNRICYLQEIFSNEMAKVDDSFFHRLEESFLVEEDKKHERHPIFGNIVDEVAYHEKYPTIYHLRKKLVDSTDKADLRLIYLALAHMIKFRGHFLIEGDLNPDNSDVDKLFIQLVQTYNQLFEENPINASGVDAKAILSARLSKSRRLENLIAQLPGEKKNGLFGNLIALSLGLTPNFKSNFDLAEDAKLQLSKDTYDDDLDNLLAQIGDQYADLFLAAKNLSDAILLSDILRVNTEITKAPLSASMIKRYDEHHQDLTLLKALVRQQLPEKYKEIFFDQSKNGYAGYIDGGASQEEFYKFIKPILEKMDGTEELLVKLNREDLLRKQRTFDNGSIPHQIHLGELHAILRRQEDFYPFLKDNREKIEKILTFRIPYYVGPLARGNSRFAWMTRKSEETITPWNFEEVVDKGASAQSFIERMTNFDKNLPNEKVLPKHSLLYEYFTVYNELTKVKYVTEGMRKPAFLSGEQKKAIVDLLFKTNRKVTVKQLKEDYFKKIECFDSVEISGVEDRFNASLGTYHDLLKIIKDKDFLDNEENEDILEDIVLTLTLFEDREMIEERLKTYAHLFDDKVMKQLKRRRYTGWGRLSRKLINGIRDKQSGKTILDFLKSDGFANRNFMQLIHDDSLTFKEDIQKAQVSGQGDSLHEHIANLAGSPAIKKGILQTVKVVDELVKVMGRHKPENIVIEMARENQTTQKGQKNSRERMKRIEEGIKELGSQILKEHPVENTQLQNEKLYLYYLQNGRDMYVDQELDINRLSDYDVDHIVPQSFLKDDSIDNKVLTRSDKARGKSDNVPSEEVVKKMKNYWRQLLNAKLITQRKFDNLTKAERGGLSELDKAGFIKRQLVETRQITKHVAQILDSRMNTKYDENDKLIREVKVITLKSKLVSDFRKDFQFYKVREINNYHHAHDAYLNAVVGTALIKKYPKLESEFVYGDYKVYDVRKMIAKSEQEIGKATAKYFFYSNIMNFFKTEITLANGEIRKRPLIETNGETGEIVWDKGRDFATVRKVLSMPQVNIVKKTEVQTGGFSKESILPKRNSDKLIARKKDWDPKKYGGFDSPTVAYSVLVVAKVEKGKSKKLKSVKELLGITIMERSSFEKNPIDFLEAKGYKEVKKDLIIKLPKYSLFELENGRKRMLASAGELQKGNELALPSKYVNFLYLASHYEKLKGSPEDNEQKQLFVEQHKHYLDEIIEQISEFSKRVILADANLDKVLSAYNKHRDKPIREQAENIIHLFTLTNLGAPAAFKYFDTTIDRKRYTSTKEVLDATLIHQSITGLYETRIDLSQLGGDGGGGSGGSGGSGGSGGTLQLDDEYRLYSPLVKPDQNIQFWLEQFPQAWAETAGMGLAKQVPPQVIQLKASATPVSVRQYPLSKEAQEGIRPHVQRLIQQGILVPVQSPWNTPLLPVRKPGTNDYRPVQDLREVNKRVQDIHPTVPNPYNLLCALPPQRSWYTVLDLKDAFFCLRLHPTSQPLFAFEWRDPGTGRTGQLTWTRLPQGFKNSPTIFDEALHRDLANFRIQHPQVTLLQYVDDLLLAGATKQDCLEGTKALLLELSDLGYRASAKKAQICRREVTYLGYSLRDGQRWLTEARKKTVVQIPAPTTAKQVREFLGTAGFCRLWIPGFATLAAPLYPLTKEKGEFSWAPEHQKAFDAIKKALLSAPALALPDVTKPFTLYVDERKGVARGVLTQTLGPWRRPVAYLSKKLDPVASGWPVCLKAIAAVAILVKDADKLTLGQNITVIAPHALENIVRQPPDRWMTNARMTHYQSLLLTERVTFAPPAALNPATLLPEETDEPVTHDCHQLLIEETGVRKDLTDIPLTGEVLTWFTDGSSYVVEGKRMAGAAVVDGTRTIWASSLPEGTSAQKAELMALTQALRLAEGKSINIYTDSRYAFATAHVHGAIYKQRGLLTSAGREIKNKEEILSLLEALHLPKRLAIIHCPGHQKAKDPISRGNQMADRVAKQAAQGVNLLAGKRTADGSEFEKRTADGSEFESPKKKAKVE

SEQ ID NO: 112 - protein, 2090 aa, synthetic construct
MPAAKRVKLDGGDKKYSIGLDIGTNSVGWAVITDEYKVPSKKFKVLGNTDRHSIKKNLIGALLFDSGETAEATRLKRTARRRYTRRKNRICYLQEIFSNEMAKVDDSFFHRLEESFLVEEDKKHERHPIFGNIVDEVAYHEKYPTIYHLRKKLVDSTDKADLRLIYLALAHMIKFRGHFLIEGDLNPDNSDVDKLFIQLVQTYNQLFEENPINASGVDAKAILSARLSKSRRLENLIAQLPGEKKNGLFGNLIALSLGLTPNFKSNFDLAEDAKLQLSKDTYDDDLDNLLAQIGDQYADLFLAAKNLSDAILLSDILRVNTEITKAPLSASMIKRYDEHHQDLTLLKALVRQQLPEKYKEIFFDQSKNGYAGYIDGGASQEEFYKFIKPILEKMDGTEELLVKLNREDLLRKQRTFDNGSIPHQIHLGELHAILRRQEDFYPFLKDNREKIEKILTFRIPYYVGPLARGNSRFAWMTRKSEETITPWNFEEVVDKGASAQSFIERMTNFDKNLPNEKVLPKHSLLYEYFTVYNELTKVKYVTEGMRKPAFLSGEQKKAIVDLLFKTNRKVTVKQLKEDYFKKIECFDSVEISGVEDRFNASLGTYHDLLKIIKDKDFLDNEENEDILEDIVLTLTLFEDREMIEERLKTYAHLFDDKVMKQLKRRRYTGWGRLSRKLINGIRDKQSGKTILDFLKSDGFANRNFMQLIHDDSLTFKEDIQKAQVSGQGDSLHEHIANLAGSPAIKKGILQTVKVVDELVKVMGRHKPENIVIEMARENQTTQKGQKNSRERMKRIEEGIKELGSQILKEHPVENTQLQNEKLYLYYLQNGRDMYVDQELDINRLSDYDVDHIVPQSFLKDDSIDNKVLTRSDKARGKSDNVPSEEVVKKMKNYWRQLLNAKLITQRKFDNLTKAERGGLSELDKAGFIKRQLVETRQITKHVAQILDSRMNTKYDENDKLIREVKVITLKSKLVSDFRKDFQFYKVREINNYHHAHDAYLNAVVGTALIKKYPKLESEFVYGDYKVYDVRKMIAKSEQEIGKATAKYFFYSNIMNFFKTEITLANGEIRKRPLIETNGETGEIVWDKGRDFATVRKVLSMPQVNIVKKTEVQTGGFSKESILPKRNSDKLIARKKDWDPKKYGGFDSPTVAYSVLVVAKVEKGKSKKLKSVKELLGITIMERSSFEKNPIDFLEAKGYKEVKKDLIIKLPKYSLFELENGRKRMLASAGELQKGNELALPSKYVNFLYLASHYEKLKGSPEDNEQKQLFVEQHKHYLDEIIEQISEFSKRVILADANLDKVLSAYNKHRDKPIREQAENIIHLFTLTNLGAPAAFKYFDTTIDRKRYTSTKEVLDATLIHQSITGLYETRIDLSQLGGDGGEAAAKGGGPAPGGTLQLDDEYRLYSPLVKPDQNIQFWLEQFPQAWAETAGMGLAKQVPPQVIQLKASATPVSVRQYPLSKEAQEGIRPHVQRLIQQGILVPVQSPWNTPLLPVRKPGTNDYRPVQDLREVNKRVQDIHPTVPNPYNLLCALPPQRSWYTVLDLKDAFFCLRLHPTSQPLFAFEWRDPGTGRTGQLTWTRLPQGFKNSPTIFDEALHRDLANFRIQHPQVTLLQYVDDLLLAGATKQDCLEGTKALLLELSDLGYRASAKKAQICRREVTYLGYSLRDGQRWLTEARKKTVVQIPAPTTAKQVREFLGTAGFCRLWIPGFATLAAPLYPLTKEKGEFSWAPEHQKAFDAIKKALLSAPALALPDVTKPFTLYVDERKGVARGVLTQTLGPWRRPVAYLSKKLDPVASGWPVCLKAIAAVAILVKDADKLTLGQNITVIAPHALENIVRQPPDRWMTNARMTHYQSLLLTERVTFAPPAALNPATLLPEETDEPVTHDCHQLLIEETGVRKDLTDIPLTGEVLTWFTDGSSYVVEGKRMAGAAVVDGTRTIWASSLPEGTSAQKAELMALTQALRLAEGKSINIYTDSRYAFATAHVHGAIYKQRGLLTSAGREIKNKEEILSLLEALHLPKRLAIIHCPGHQKAKDPISRGNQMADRVAKQAAQGVNLLAGKRTADGSEFEKRTADGSEFESPKKKAKVE

SEQ ID NO: 113 - protein, 2097 aa, synthetic construct
MPAAKRVKLDGGDKKYSIGLDIGTNSVGWAVITDEYKVPSKKFKVLGNTDRHSIKKNLIGALLFDSGETAEATRLKRTARRRYTRRKNRICYLQEIFSNEMAKVDDSFFHRLEESFLVEEDKKHERHPIFGNIVDEVAYHEKYPTIYHLRKKLVDSTDKADLRLIYLALAHMIKFRGHFLIEGDLNPDNSDVDKLFIQLVQTYNQLFEENPINASGVDAKAILSARLSKSRRLENLIAQLPGEKKNGLFGNLIALSLGLTPNFKSNFDLAEDAKLQLSKDTYDDDLDNLLAQIGDQYADLFLAAKNLSDAILLSDILRVNTEITKAPLSASMIKRYDEHHQDLTLLKALVRQQLPEKYKEIFFDQSKNGYAGYIDGGASQEEFYKFIKPILEKMDGTEELLVKLNREDLLRKQRTFDNGSIPHQIHLGELHAILRRQEDFYPFLKDNREKIEKILTFRIPYYVGPLARGNSRFAWMTRKSEETITPWNFEEVVDKGASAQSFIERMTNFDKNLPNEKVLPKHSLLYEYFTVYNELTKVKYVTEGMRKPAFLSGEQKKAIVDLLFKTNRKVTVKQLKEDYFKKIECFDSVEISGVEDRFNASLGTYHDLLKIIKDKDFLDNEENEDILEDIVLTLTLFEDREMIEERLKTYAHLFDDKVMKQLKRRRYTGWGRLSRKLINGIRDKQSGKTILDFLKSDGFANRNFMQLIHDDSLTFKEDIQKAQVSGQGDSLHEHIANLAGSPAIKKGILQTVKVVDELVKVMGRHKPENIVIEMARENQTTQKGQKNSRERMKRIEEGIKELGSQILKEHPVENTQLQNEKLYLYYLQNGRDMYVDQELDINRLSDYDVDHIVPQSFLKDDSIDNKVLTRSDKARGKSDNVPSEEVVKKMKNYWRQLLNAKLITQRKFDNLTKAERGGLSELDKAGFIKRQLVETRQITKHVAQILDSRMNTKYDENDKLIREVKVITLKSKLVSDFRKDFQFYKVREINNYHHAHDAYLNAVVGTALIKKYPKLESEFVYGDYKVYDVRKMIAKSEQEIGKATAKYFFYSNIMNFFKTEITLANGEIRKRPLIETNGETGEIVWDKGRDFATVRKVLSMPQVNIVKKTEVQTGGFSKESILPKRNSDKLIARKKDWDPKKYGGFDSPTVAYSVLVVAKVEKGKSKKLKSVKELLGITIMERSSFEKNPIDFLEAKGYKEVKKDLIIKLPKYSLFELENGRKRMLASAGELQKGNELALPSKYVNFLYLASHYEKLKGSPEDNEQKQLFVEQHKHYLDEIIEQISEFSKRVILADANLDKVLSAYNKHRDKPIREQAENIIHLFTLTNLGAPAAFKYFDTTIDRKRYTSTKEVLDATLIHQSITGLYETRIDLSQLGGDGGGSSGSSGSSGSSGSSGSSGGTLQLDDEYRLYSPLVKPDQNIQFWLEQFPQAWAETAGMGLAKQVPPQVIQLKASATPVSVRQYPLSKEAQEGIRPHVQRLIQQGILVPVQSPWNTPLLPVRKPGTNDYRPVQDLREVNKRVQDIHPTVPNPYNLLCALPPQRSWYTVLDLKDAFFCLRLHPTSQPLFAFEWRDPGTGRTGQLTWTRLPQGFKNSPTIFNEALHRDLANFRIQHPQVTLLQYVDDLLLAGATKQDCLEGTKALLLELSDLGYRASAKKAQICRREVTYLGYSLRDGQRWLTEARKKTVVQIPAPTTAKQVREFLGTAGFCRLWIPGFATLAAPLYPLTKPKGEFSWAPEHQKAFDAIKKALLSAPALALPDVTKPFTLYVDERKGVARGVLTQTLGPWRRPVAYLSKKLDPVASGWPVCLKAIAAVAILVKDADKLTLGQNITVIAPHALENIVRQPPDRWMTNARMTHYQSLLLTERVTFAPPAALNPATLLPEETDEPVTHDCHQLLIEETGVRKDLTDIPLTGEVLTWFTDGSSYVVEGKRMAGAAVVDGTRTIWASSLPEGTSAQKAELMALTQALRLAEGKSINIYTDSRYAFATAHVHGAIYKQRGWLTSAGREIKNKEEILSLLEALHLPKRLAIIHCPGHQKAKDPISRGNQMADRVAKQAAQGVNLLAGKRTADGSEFEKRTADGSEFESPKKKAKVE

SEQ ID NO: 114 - protein, 2087 aa, synthetic construct
MPAAKRVKLDGGDKKYSIGLDIGTNSVGWAVITDEYKVPSKKFKVLGNTDRHSIKKNLIGALLFDSGETAEATRLKRTARRRYTRRKNRICYLQEIFSNEMAKVDDSFFHRLEESFLVEEDKKHERHPIFGNIVDEVAYHEKYPTIYHLRKKLVDSTDKADLRLIYLALAHMIKFRGHFLIEGDLNPDNSDVDKLFIQLVQTYNQLFEENPINASGVDAKAILSARLSKSRRLENLIAQLPGEKKNGLFGNLIALSLGLTPNFKSNFDLAEDAKLQLSKDTYDDDLDNLLAQIGDQYADLFLAAKNLSDAILLSDILRVNTEITKAPLSASMIKRYDEHHQDLTLLKALVRQQLPEKYKEIFFDQSKNGYAGYIDGGASQEEFYKFIKPILEKMDGTEELLVKLNREDLLRKQRTFDNGSIPHQIHLGELHAILRRQEDFYPFLKDNREKIEKILTFRIPYYVGPLARGNSRFAWMTRKSEETITPWNFEEVVDKGASAQSFIERMTNFDKNLPNEKVLPKHSLLYEYFTVYNELTKVKYVTEGMRKPAFLSGEQKKAIVDLLFKTNRKVTVKQLKEDYFKKIECFDSVEISGVEDRFNASLGTYHDLLKIIKDKDFLDNEENEDILEDIVLTLTLFEDREMIEERLKTYAHLFDDKVMKQLKRRRYTGWGRLSRKLINGIRDKQSGKTILDFLKSDGFANRNFMQLIHDDSLTFKEDIQKAQVSGQGDSLHEHIANLAGSPAIKKGILQTVKVVDELVKVMGRHKPENIVIEMARENQTTQKGQKNSRERMKRIEEGIKELGSQILKEHPVENTQLQNEKLYLYYLQNGRDMYVDQELDINRLSDYDVDHIVPQSFLKDDSIDNKVLTRSDKARGKSDNVPSEEVVKKMKNYWRQLLNAKLITQRKFDNLTKAERGGLSELDKAGFIKRQLVETRQITKHVAQILDSRMNTKYDENDKLIREVKVITLKSKLVSDFRKDFQFYKVREINNYHHAHDAYLNAVVGTALIKKYPKLESEFVYGDYKVYDVRKMIAKSEQEIGKATAKYFFYSNIMNFFKTEITLANGEIRKRPLIETNGETGEIVWDKGRDFATVRKVLSMPQVNIVKKTEVQTGGFSKESILPKRNSDKLIARKKDWDPKKYGGFDSPTVAYSVLVVAKVEKGKSKKLKSVKELLGITIMERSSFEKNPIDFLEAKGYKEVKKDLIIKLPKYSLFELENGRKRMLASAGELQKGNELALPSKYVNFLYLASHYEKLKGSPEDNEQKQLFVEQHKHYLDEIIEQISEFSKRVILADANLDKVLSAYNKHRDKPIREQAENIIHLFTLTNLGAPAAFKYFDTTIDRKRYTSTKEVLDATLIHQSITGLYETRIDLSQLGGDGGGGGGGGGGGGTLQLDDEYRLYSPLVKPDQNIQFWLEQFPQAWAETAGMGLAKQVPPQVIQLKASATPVSVRQYPLSKEAQEGIRPHVQRLIQQGILVPVQSPWNTPLLPVRKPGTNDYRPVQDLREVNKRVQDIHPTVPNPYNLLCALPPQRSWYTVLDLKDAFFCLRLHPTSQPLFAFEWRDPGTGRTGQLTWTRLPQGFKNSPTIFNEALHRDLANFRIQHPQVTLLQYVDDLLLAGATKQDCLEGTKALLLELSDLGYRASAKKAQICRREVTYLGYSLRDGQRWLTEARKKTVVQIPAPTTAKQVREFLGTAGFCRLWIPGFATLAAPLYPLTKPKGEFSWAPEHQKAFDAIKKALLSAPALALPDVTKPFTLYVDERKGVARGVLTQTLGPWRRPVAYLSKKLDPVASGWPVCLKAIAAVAILVKDADKLTLGQNITVIAPHALENIVRQPPDRWMTNARMTHYQSLLLTERVTFAPPAALNPATLLPEETDEPVTHDCHQLLIEETGVRKDLTDIPLTGEVLTWFTDGSSYVVEGKRMAGAAVVDGTRTIWASSLPEGTSAQKAELMALTQALRLAEGKSINIYTDSRYAFATAHVHGAIYKQRGWLTSAGREIKNKEEILSLLEALHLPKRLAIIHCPGHQKAKDPISRGNQMADRVAKQAAQGVNLLAGKRTADGSEFEKRTADGSEFESPKKKAKVE

SEQ ID NO: 115 - protein, 2090 aa, synthetic construct
MPAAKRVKLDGGDKKYSIGLDIGTNSVGWAVITDEYKVPSKKFKVLGNTDRHSIKKNLIGALLFDSGETAEATRLKRTARRRYTRRKNRICYLQEIFSNEMAKVDDSFFHRLEESFLVEEDKKHERHPIFGNIVDEVAYHEKYPTIYHLRKKLVDSTDKADLRLIYLALAHMIKFRGHFLIEGDLNPDNSDVDKLFIQLVQTYNQLFEENPINASGVDAKAILSARLSKSRRLENLIAQLPGEKKNGLFGNLIALSLGLTPNFKSNFDLAEDAKLQLSKDTYDDDLDNLLAQIGDQYADLFLAAKNLSDAILLSDILRVNTEITKAPLSASMIKRYDEHHQDLTLLKALVRQQLPEKYKEIFFDQSKNGYAGYIDGGASQEEFYKFIKPILEKMDGTEELLVKLNREDLLRKQRTFDNGSIPHQIHLGELHAILRRQEDFYPFLKDNREKIEKILTFRIPYYVGPLARGNSRFAWMTRKSEETITPWNFEEVVDKGASAQSFIERMTNFDKNLPNEKVLPKHSLLYEYFTVYNELTKVKYVTEGMRKPAFLSGEQKKAIVDLLFKTNRKVTVKQLKEDYFKKIECFDSVEISGVEDRFNASLGTYHDLLKIIKDKDFLDNEENEDILEDIVLTLTLFEDREMIEERLKTYAHLFDDKVMKQLKRRRYTGWGRLSRKLINGIRDKQSGKTILDFLKSDGFANRNFMQLIHDDSLTFKEDIQKAQVSGQGDSLHEHIANLAGSPAIKKGILQTVKVVDELVKVMGRHKPENIVIEMARENQTTQKGQKNSRERMKRIEEGIKELGSQILKEHPVENTQLQNEKLYLYYLQNGRDMYVDQELDINRLSDYDVDHIVPQSFLKDDSIDNKVLTRSDKARGKSDNVPSEEVVKKMKNYWRQLLNAKLITQRKFDNLTKAERGGLSELDKAGFIKRQLVETRQITKHVAQILDSRMNTKYDENDKLIREVKVITLKSKLVSDFRKDFQFYKVREINNYHHAHDAYLNAVVGTALIKKYPKLESEFVYGDYKVYDVRKMIAKSEQEIGKATAKYFFYSNIMNFFKTEITLANGEIRKRPLIETNGETGEIVWDKGRDFATVRKVLSMPQVNIVKKTEVQTGGFSKESILPKRNSDKLIARKKDWDPKKYGGFDSPTVAYSVLVVAKVEKGKSKKLKSVKELLGITIMERSSFEKNPIDFLEAKGYKEVKKDLIIKLPKYSLFELENGRKRMLASAGELQKGNELALPSKYVNFLYLASHYEKLKGSPEDNEQKQLFVEQHKHYLDEIIEQISEFSKRVILADANLDKVLSAYNKHRDKPIREQAENIIHLFTLTNLGAPAAFKYFDTTIDRKRYTSTKEVLDATLIHQSITGLYETRIDLSQLGGDGGPAPAPAPAPAPGGTLQLDDEYRLYSPLVKPDQNIQFWLEQFPQAWAETAGMGLAKQVPPQVIQLKASATPVSVRQYPLSKEAQEGIRPHVQRLIQQGILVPVQSPWNTPLLPVRKPGTNDYRPVQDLREVNKRVQDIHPTVPNPYNLLCALPPQRSWYTVLDLKDAFFCLRLHPTSQPLFAFEWRDPGTGRTGQLTWTRLPQGFKNSPTIFNEALHRDLANFRIQHPQVTLLQYVDDLLLAGATKQDCLEGTKALLLELSDLGYRASAKKAQICRREVTYLGYSLRDGQRWLTEARKKTVVQIPAPTTAKQVREFLGTAGFCRLWIPGFATLAAPLYPLTKPKGEFSWAPEHQKAFDAIKKALLSAPALALPDVTKPFTLYVDERKGVARGVLTQTLGPWRRPVAYLSKKLDPVASGWPVCLKAIAAVAILVKDADKLTLGQNITVIAPHALENIVRQPPDRWMTNARMTHYQSLLLTERVTFAPPAALNPATLLPEETDEPVTHDCHQLLIEETGVRKDLTDIPLTGEVLTWFTDGSSYVVEGKRMAGAAVVDGTRTIWASSLPEGTSAQKAELMALTQALRLAEGKSINIYTDSRYAFATAHVHGAIYKQRGWLTSAGREIKNKEEILSLLEALHLPKRLAIIHCPGHQKAKDPISRGNQMADRVAKQAAQGVNLLAGKRTADGSEFEKRTADGSEFESPKKKAKVE

SEQ ID NO: 116 - protein, 2090 aa, synthetic construct
MPAAKRVKLDGGDKKYSIGLDIGTNSVGWAVITDEYKVPSKKFKVLGNTDRHSIKKNLIGALLFDSGETAEATRLKRTARRRYTRRKNRICYLQEIFSNEMAKVDDSFFHRLEESFLVEEDKKHERHPIFGNIVDEVAYHEKYPTIYHLRKKLVDSTDKADLRLIYLALAHMIKFRGHFLIEGDLNPDNSDVDKLFIQLVQTYNQLFEENPINASGVDAKAILSARLSKSRRLENLIAQLPGEKKNGLFGNLIALSLGLTPNFKSNFDLAEDAKLQLSKDTYDDDLDNLLAQIGDQYADLFLAAKNLSDAILLSDILRVNTEITKAPLSASMIKRYDEHHQDLTLLKALVRQQLPEKYKEIFFDQSKNGYAGYIDGGASQEEFYKFIKPILEKMDGTEELLVKLNREDLLRKQRTFDNGSIPHQIHLGELHAILRRQEDFYPFLKDNREKIEKILTFRIPYYVGPLARGNSRFAWMTRKSEETITPWNFEEVVDKGASAQSFIERMTNFDKNLPNEKVLPKHSLLYEYFTVYNELTKVKYVTEGMRKPAFLSGEQKKAIVDLLFKTNRKVTVKQLKEDYFKKIECFDSVEISGVEDRFNASLGTYHDLLKIIKDKDFLDNEENEDILEDIVLTLTLFEDREMIEERLKTYAHLFDDKVMKQLKRRRYTGWGRLSRKLINGIRDKQSGKTILDFLKSDGFANRNFMQLIHDDSLTFKEDIQKAQVSGQGDSLHEHIANLAGSPAIKKGILQTVKVVDELVKVMGRHKPENIVIEMARENQTTQKGQKNSRERMKRIEEGIKELGSQILKEHPVENTQLQNEKLYLYYLQNGRDMYVDQELDINRLSDYDVDHIVPQSFLKDDSIDNKVLTRSDKARGKSDNVPSEEVVKKMKNYWRQLLNAKLITQRKFDNLTKAERGGLSELDKAGFIKRQLVETRQITKHVAQILDSRMNTKYDENDKLIREVKVITLKSKLVSDFRKDFQFYKVREINNYHHAHDAYLNAVVGTALIKKYPKLESEFVYGDYKVYDVRKMIAKSEQEIGKATAKYFFYSNIMNFFKTEITLANGEIRKRPLIETNGETGEIVWDKGRDFATVRKVLSMPQVNIVKKTEVQTGGFSKESILPKRNSDKLIARKKDWDPKKYGGFDSPTVAYSVLVVAKVEKGKSKKLKSVKELLGITIMERSSFEKNPIDFLEAKGYKEVKKDLIIKLPKYSLFELENGRKRMLASAGELQKGNELALPSKYVNFLYLASHYEKLKGSPEDNEQKQLFVEQHKHYLDEIIEQISEFSKRVILADANLDKVLSAYNKHRDKPIREQAENIIHLFTLTNLGAPAAFKYFDTTIDRKRYTSTKEVLDATLIHQSITGLYETRIDLSQLGGDGGGSSEAAAKPAPGGTLQLDDEYRLYSPLVKPDQNIQFWLEQFPQAWAETAGMGLAKQVPPQVIQLKASATPVSVRQYPLSKEAQEGIRPHVQRLIQQGILVPVQSPWNTPLLPVRKPGTNDYRPVQDLREVNKRVQDIHPTVPNPYNLLCALPPQRSWYTVLDLKDAFFCLRLHPTSQPLFAFEWRDPGTGRTGQLTWTRLPQGFKNSPTIFNEALHRDLANFRIQHPQVTLLQYVDDLLLAGATKQDCLEGTKALLLELSDLGYRASAKKAQICRREVTYLGYSLRDGQRWLTEARKKTVVQIPAPTTAKQVREFLGTAGFCRLWIPGFATLAAPLYPLTKPKGEFSWAPEHQKAFDAIKKALLSAPALALPDVTKPFTLYVDERKGVARGVLTQTLGPWRRPVAYLSKKLDPVASGWPVCLKAIAAVAILVKDADKLTLGQNITVIAPHALENIVRQPPDRWMTNARMTHYQSLLLTERVTFAPPAALNPATLLPEETDEPVTHDCHQLLIEETGVRKDLTDIPLTGEVLTWFTDGSSYVVEGKRMAGAAVVDGTRTIWASSLPEGTSAQKAELMALTQALRLAEGKSINIYTDSRYAFATAHVHGAIYKQRGWLTSAGREIKNKEEILSLLEALHLPKRLAIIHCPGHQKAKDPISRGNQMADRVAKQAAQGVNLLAGKRTADGSEFEKRTADGSEFESPKKKAKVE

SEQ ID NO: 117 - protein, 2109 aa, synthetic construct
MPAAKRVKLDGGDKKYSIGLDIGTNSVGWAVITDEYKVPSKKFKVLGNTDRHSIKKNLIGALLFDSGETAEATRLKRTARRRYTRRKNRICYLQEIFSNEMAKVDDSFFHRLEESFLVEEDKKHERHPIFGNIVDEVAYHEKYPTIYHLRKKLVDSTDKADLRLIYLALAHMIKFRGHFLIEGDLNPDNSDVDKLFIQLVQTYNQLFEENPINASGVDAKAILSARLSKSRRLENLIAQLPGEKKNGLFGNLIALSLGLTPNFKSNFDLAEDAKLQLSKDTYDDDLDNLLAQIGDQYADLFLAAKNLSDAILLSDILRVNTEITKAPLSASMIKRYDEHHQDLTLLKALVRQQLPEKYKEIFFDQSKNGYAGYIDGGASQEEFYKFIKPILEKMDGTEELLVKLNREDLLRKQRTFDNGSIPHQIHLGELHAILRRQEDFYPFLKDNREKIEKILTFRIPYYVGPLARGNSRFAWMTRKSEETITPWNFEEVVDKGASAQSFIERMTNFDKNLPNEKVLPKHSLLYEYFTVYNELTKVKYVTEGMRKPAFLSGEQKKAIVDLLFKTNRKVTVKQLKEDYFKKIECFDSVEISGVEDRFNASLGTYHDLLKIIKDKDFLDNEENEDILEDIVLTLTLFEDREMIEERLKTYAHLFDDKVMKQLKRRRYTGWGRLSRKLINGIRDKQSGKTILDFLKSDGFANRNFMQLIHDDSLTFKEDIQKAQVSGQGDSLHEHIANLAGSPAIKKGILQTVKVVDELVKVMGRHKPENIVIEMARENQTTQKGQKNSRERMKRIEEGIKELGSQILKEHPVENTQLQNEKLYLYYLQNGRDMYVDQELDINRLSDYDVDHIVPQSFLKDDSIDNKVLTRSDKARGKSDNVPSEEVVKKMKNYWRQLLNAKLITQRKFDNLTKAERGGLSELDKAGFIKRQLVETRQITKHVAQILDSRMNTKYDENDKLIREVKVITLKSKLVSDFRKDFQFYKVREINNYHHAHDAYLNAVVGTALIKKYPKLESEFVYGDYKVYDVRKMIAKSEQEIGKATAKYFFYSNIMNFFKTEITLANGEIRKRPLIETNGETGEIVWDKGRDFATVRKVLSMPQVNIVKKTEVQTGGFSKESILPKRNSDKLIARKKDWDPKKYGGFDSPTVAYSVLVVAKVEKGKSKKLKSVKELLGITIMERSSFEKNPIDFLEAKGYKEVKKDLIIKLPKYSLFELENGRKRMLASAGELQKGNELALPSKYVNFLYLASHYEKLKGSPEDNEQKQLFVEQHKHYLDEIIEQISEFSKRVILADANLDKVLSAYNKHRDKPIREQAENIIHLFTLTNLGAPAAFKYFDTTIDRKRYTSTKEVLDATLIHQSITGLYETRIDLSQLGGDGGEAAAKEAAAKEAAAKEAAAKEAAAKEAAAKGGTLQLDDEYRLYSPLVKPDQNIQFWLEQFPQAWAETAGMGLAKQVPPQVIQLKASATPVSVRQYPLSKEAQEGIRPHVQRLIQQGILVPVQSPWNTPLLPVRKPGTNDYRPVQDLREVNKRVQDIHPTVPNPYNLLCALPPQRSWYTVLDLKDAFFCLRLHPTSQPLFAFEWRDPGTGRTGQLTWTRLPQGFKNSPTIFNEALHRDLANFRIQHPQVTLLQYVDDLLLAGATKQDCLEGTKALLLELSDLGYRASAKKAQICRREVTYLGYSLRDGQRWLTEARKKTVVQIPAPTTAKQVREFLGTAGFCRLWIPGFATLAAPLYPLTKPKGEFSWAPEHQKAFDAIKKALLSAPALALPDVTKPFTLYVDERKGVARGVLTQTLGPWRRPVAYLSKKLDPVASGWPVCLKAIAAVAILVKDADKLTLGQNITVIAPHALENIVRQPPDRWMTNARMTHYQSLLLTERVTFAPPAALNPATLLPEETDEPVTHDCHQLLIEETGVRKDLTDIPLTGEVLTWFTDGSSYVVEGKRMAGAAVVDGTRTIWASSLPEGTSAQKAELMALTQALRLAEGKSINIYTDSRYAFATAHVHGAIYKQRGWLTSAGREIKNKEEILSLLEALHLPKRLAIIHCPGHQKAKDPISRGNQMADRVAKQAAQGVNLLAGKRTADGSEFEKRTADGSEFESPKKKAKVE

SEQ ID NO: 118 - protein, 2094 aa, synthetic construct
MPAAKRVKLDGGDKKYSIGLDIGTNSVGWAVITDEYKVPSKKFKVLGNTDRHSIKKNLIGALLFDSGETAEATRLKRTARRRYTRRKNRICYLQEIFSNEMAKVDDSFFHRLEESFLVEEDKKHERHPIFGNIVDEVAYHEKYPTIYHLRKKLVDSTDKADLRLIYLALAHMIKFRGHFLIEGDLNPDNSDVDKLFIQLVQTYNQLFEENPINASGVDAKAILSARLSKSRRLENLIAQLPGEKKNGLFGNLIALSLGLTPNFKSNFDLAEDAKLQLSKDTYDDDLDNLLAQIGDQYADLFLAAKNLSDAILLSDILRVNTEITKAPLSASMIKRYDEHHQDLTLLKALVRQQLPEKYKEIFFDQSKNGYAGYIDGGASQEEFYKFIKPILEKMDGTEELLVKLNREDLLRKQRTFDNGSIPHQIHLGELHAILRRQEDFYPFLKDNREKIEKILTFRIPYYVGPLARGNSRFAWMTRKSEETITPWNFEEVVDKGASAQSFIERMTNFDKNLPNEKVLPKHSLLYEYFTVYNELTKVKYVTEGMRKPAFLSGEQKKAIVDLLFKTNRKVTVKQLKEDYFKKIECFDSVEISGVEDRFNASLGTYHDLLKIIKDKDFLDNEENEDILEDIVLTLTLFEDREMIEERLKTYAHLFDDKVMKQLKRRRYTGWGRLSRKLINGIRDKQSGKTILDFLKSDGFANRNFMQLIHDDSLTFKEDIQKAQVSGQGDSLHEHIANLAGSPAIKKGILQTVKVVDELVKVMGRHKPENIVIEMARENQTTQKGQKNSRERMKRIEEGIKELGSQILKEHPVENTQLQNEKLYLYYLQNGRDMYVDQELDINRLSDYDVDHIVPQSFLKDDSIDNKVLTRSDKARGKSDNVPSEEVVKKMKNYWRQLLNAKLITQRKFDNLTKAERGGLSELDKAGFIKRQLVETRQITKHVAQILDSRMNTKYDENDKLIREVKVITLKSKLVSDFRKDFQFYKVREINNYHHAHDAYLNAVVGTALIKKYPKLESEFVYGDYKVYDVRKMIAKSEQEIGKATAKYFFYSNIMNFFKTEITLANGEIRKRPLIETNGETGEIVWDKGRDFATVRKVLSMPQVNIVKKTEVQTGGFSKESILPKRNSDKLIARKKDWDPKKYGGFDSPTVAYSVLVVAKVEKGKSKKLKSVKELLGITIMERSSFEKNPIDFLEAKGYKEVKKDLIIKLPKYSLFELENGRKRMLASAGELQKGNELALPSKYVNFLYLASHYEKLKGSPEDNEQKQLFVEQHKHYLDEIIEQISEFSKRVILADANLDKVLSAYNKHRDKPIREQAENIIHLFTLTNLGAPAAFKYFDTTIDRKRYTSTKEVLDATLIHQSITGLYETRIDLSQLGGDGGGSSGSSGSSGSSGSSGGTLQLDDEYRLYSPLVKPDQNIQFWLEQFPQAWAETAGMGLAKQVPPQVIQLKASATPVSVRQYPLSKEAQEGIRPHVQRLIQQGILVPVQSPWNTPLLPVRKPGTNDYRPVQDLREVNKRVQDIHPTVPNPYNLLCALPPQRSWYTVLDLKDAFFCLRLHPTSQPLFAFEWRDPGTGRTGQLTWTRLPQGFKNSPTIFNEALHRDLANFRIQHPQVTLLQYVDDLLLAGATKQDCLEGTKALLLELSDLGYRASAKKAQICRREVTYLGYSLRDGQRWLTEARKKTVVQIPAPTTAKQVREFLGTAGFCRLWIPGFATLAAPLYPLTKPKGEFSWAPEHQKAFDAIKKALLSAPALALPDVTKPFTLYVDERKGVARGVLTQTLGPWRRPVAYLSKKLDPVASGWPVCLKAIAAVAILVKDADKLTLGQNITVIAPHALENIVRQPPDRWMTNARMTHYQSLLLTERVTFAPPAALNPATLLPEETDEPVTHDCHQLLIEETGVRKDLTDIPLTGEVLTWFTDGSSYVVEGKRMAGAAVVDGTRTIWASSLPEGTSAQKAELMALTQALRLAEGKSINIYTDSRYAFATAHVHGAIYKQRGWLTSAGREIKNKEEILSLLEALHLPKRLAIIHCPGHQKAKDPISRGNQMADRVAKQAAQGVNLLAGKRTADGSEFEKRTADGSEFESPKKKAKVE

SEQ ID NO: 119 - protein, 2090 aa, synthetic construct
MPAAKRVKLDGGDKKYSIGLDIGTNSVGWAVITDEYKVPSKKFKVLGNTDRHSIKKNLIGALLFDSGETAEATRLKRTARRRYTRRKNRICYLQEIFSNEMAKVDDSFFHRLEESFLVEEDKKHERHPIFGNIVDEVAYHEKYPTIYHLRKKLVDSTDKADLRLIYLALAHMIKFRGHFLIEGDLNPDNSDVDKLFIQLVQTYNQLFEENPINASGVDAKAILSARLSKSRRLENLIAQLPGEKKNGLFGNLIALSLGLTPNFKSNFDLAEDAKLQLSKDTYDDDLDNLLAQIGDQYADLFLAAKNLSDAILLSDILRVNTEITKAPLSASMIKRYDEHHQDLTLLKALVRQQLPEKYKEIFFDQSKNGYAGYIDGGASQEEFYKFIKPILEKMDGTEELLVKLNREDLLRKQRTFDNGSIPHQIHLGELHAILRRQEDFYPFLKDNREKIEKILTFRIPYYVGPLARGNSRFAWMTRKSEETITPWNFEEVVDKGASAQSFIERMTNFDKNLPNEKVLPKHSLLYEYFTVYNELTKVKYVTEGMRKPAFLSGEQKKAIVDLLFKTNRKVTVKQLKEDYFKKIECFDSVEISGVEDRFNASLGTYHDLLKIIKDKDFLDNEENEDILEDIVLTLTLFEDREMIEERLKTYAHLFDDKVMKQLKRRRYTGWGRLSRKLINGIRDKQSGKTILDFLKSDGFANRNFMQLIHDDSLTFKEDIQKAQVSGQGDSLHEHIANLAGSPAIKKGILQTVKVVDELVKVMGRHKPENIVIEMARENQTTQKGQKNSRERMKRIEEGIKELGSQILKEHPVENTQLQNEKLYLYYLQNGRDMYVDQELDINRLSDYDVDHIVPQSFLKDDSIDNKVLTRSDKARGKSDNVPSEEVVKKMKNYWRQLLNAKLITQRKFDNLTKAERGGLSELDKAGFIKRQLVETRQITKHVAQILDSRMNTKYDENDKLIREVKVITLKSKLVSDFRKDFQFYKVREINNYHHAHDAYLNAVVGTALIKKYPKLESEFVYGDYKVYDVRKMIAKSEQEIGKATAKYFFYSNIMNFFKTEITLANGEIRKRPLIETNGETGEIVWDKGRDFATVRKVLSMPQVNIVKKTEVQTGGFSKESILPKRNSDKLIARKKDWDPKKYGGFDSPTVAYSVLVVAKVEKGKSKKLKSVKELLGITIMERSSFEKNPIDFLEAKGYKEVKKDLIIKLPKYSLFELENGRKRMLASAGELQKGNELALPSKYVNFLYLASHYEKLKGSPEDNEQKQLFVEQHKHYLDEIIEQISEFSKRVILADANLDKVLSAYNKHRDKPIREQAENIIHLFTLTNLGAPAAFKYFDTTIDRKRYTSTKEVLDATLIHQSITGLYETRIDLSQLGGDGGEAAAKGSSGGSGGTLQLDDEYRLYSPLVKPDQNIQFWLEQFPQAWAETAGMGLAKQVPPQVIQLKASATPVSVRQYPLSKEAQEGIRPHVQRLIQQGILVPVQSPWNTPLLPVRKPGTNDYRPVQDLREVNKRVQDIHPTVPNPYNLLCALPPQRSWYTVLDLKDAFFCLRLHPTSQPLFAFEWRDPGTGRTGQLTWTRLPQGFKNSPTIFNEALHRDLANFRIQHPQVTLLQYVDDLLLAGATKQDCLEGTKALLLELSDLGYRASAKKAQICRREVTYLGYSLRDGQRWLTEARKKTVVQIPAPTTAKQVREFLGTAGFCRLWIPGFATLAAPLYPLTKPKGEFSWAPEHQKAFDAIKKALLSAPALALPDVTKPFTLYVDERKGVARGVLTQTLGPWRRPVAYLSKKLDPVASGWPVCLKAIAAVAILVKDADKLTLGQNITVIAPHALENIVRQPPDRWMTNARMTHYQSLLLTERVTFAPPAALNPATLLPEETDEPVTHDCHQLLIEETGVRKDLTDIPLTGEVLTWFTDGSSYVVEGKRMAGAAVVDGTRTIWASSLPEGTSAQKAELMALTQALRLAEGKSINIYTDSRYAFATAHVHGAIYKQRGWLTSAGREIKNKEEILSLLEALHLPKRLAIIHCPGHQKAKDPISRGNQMADRVAKQAAQGVNLLAGKRTADGSEFEKRTADGSEFESPKKKAKVE

SEQ ID NO: 120 - protein, 2082 aa, synthetic construct
MPAAKRVKLDGGDKKYSIGLDIGTNSVGWAVITDEYKVPSKKFKVLGNTDRHSIKKNLIGALLFDSGETAEATRLKRTARRRYTRRKNRICYLQEIFSNEMAKVDDSFFHRLEESFLVEEDKKHERHPIFGNIVDEVAYHEKYPTIYHLRKKLVDSTDKADLRLIYLALAHMIKFRGHFLIEGDLNPDNSDVDKLFIQLVQTYNQLFEENPINASGVDAKAILSARLSKSRRLENLIAQLPGEKKNGLFGNLIALSLGLTPNFKSNFDLAEDAKLQLSKDTYDDDLDNLLAQIGDQYADLFLAAKNLSDAILLSDILRVNTEITKAPLSASMIKRYDEHHQDLTLLKALVRQQLPEKYKEIFFDQSKNGYAGYIDGGASQEEFYKFIKPILEKMDGTEELLVKLNREDLLRKQRTFDNGSIPHQIHLGELHAILRRQEDFYPFLKDNREKIEKILTFRIPYYVGPLARGNSRFAWMTRKSEETITPWNFEEVVDKGASAQSFIERMTNFDKNLPNEKVLPKHSLLYEYFTVYNELTKVKYVTEGMRKPAFLSGEQKKAIVDLLFKTNRKVTVKQLKEDYFKKIECFDSVEISGVEDRFNASLGTYHDLLKIIKDKDFLDNEENEDILEDIVLTLTLFEDREMIEERLKTYAHLFDDKVMKQLKRRRYTGWGRLSRKLINGIRDKQSGKTILDFLKSDGFANRNFMQLIHDDSLTFKEDIQKAQVSGQGDSLHEHIANLAGSPAIKKGILQTVKVVDELVKVMGRHKPENIVIEMARENQTTQKGQKNSRERMKRIEEGIKELGSQILKEHPVENTQLQNEKLYLYYLQNGRDMYVDQELDINRLSDYDVDHIVPQSFLKDDSIDNKVLTRSDKARGKSDNVPSEEVVKKMKNYWRQLLNAKLITQRKFDNLTKAERGGLSELDKAGFIKRQLVETRQITKHVAQILDSRMNTKYDENDKLIREVKVITLKSKLVSDFRKDFQFYKVREINNYHHAHDAYLNAVVGTALIKKYPKLESEFVYGDYKVYDVRKMIAKSEQEIGKATAKYFFYSNIMNFFKTEITLANGEIRKRPLIETNGETGEIVWDKGRDFATVRKVLSMPQVNIVKKTEVQTGGFSKESILPKRNSDKLIARKKDWDPKKYGGFDSPTVAYSVLVVAKVEKGKSKKLKSVKELLGITIMERSSFEKNPIDFLEAKGYKEVKKDLIIKLPKYSLFELENGRKRMLASAGELQKGNELALPSKYVNFLYLASHYEKLKGSPEDNEQKQLFVEQHKHYLDEIIEQISEFSKRVILADANLDKVLSAYNKHRDKPIREQAENIIHLFTLTNLGAPAAFKYFDTTIDRKRYTSTKEVLDATLIHQSITGLYETRIDLSQLGGDGGGSSGGTLQLDDEYRLYSPLVKPDQNIQFWLEQFPQAWAETAGMGLAKQVPPQVIQLKASATPVSVRQYPLSKEAQEGIRPHVQRLIQQGILVPVQSPWNTPLLPVRKPGTNDYRPVQDLREVNKRVQDIHPTVPNPYNLLCALPPQRSWYTVLDLKDAFFCLRLHPTSQPLFAFEWRDPGTGRTGQLTWTRLPQGFKNSPTIFNEALHRDLANFRIQHPQVTLLQYVDDLLLAGATKQDCLEGTKALLLELSDLGYRASAKKAQICRREVTYLGYSLRDGQRWLTEARKKTVVQIPAPTTAKQVREFLGTAGFCRLWIPGFATLAAPLYPLTKPKGEFSWAPEHQKAFDAIKKALLSAPALALPDVTKPFTLYVDERKGVARGVLTQTLGPWRRPVAYLSKKLDPVASGWPVCLKAIAAVAILVKDADKLTLGQNITVIAPHALENIVRQPPDRWMTNARMTHYQSLLLTERVTFAPPAALNPATLLPEETDEPVTHDCHQLLIEETGVRKDLTDIPLTGEVLTWFTDGSSYVVEGKRMAGAAVVDGTRTIWASSLPEGTSAQKAELMALTQALRLAEGKSINIYTDSRYAFATAHVHGAIYKQRGWLTSAGREIKNKEEILSLLEALHLPKRLAIIHCPGHQKAKDPISRGNQMADRVAKQAAQGVNLLAGKRTADGSEFEKRTADGSEFESPKKKAKVE

SEQ ID NO: 121 - protein, 2090 aa, synthetic construct
MPAAKRVKLDGGDKKYSIGLDIGTNSVGWAVITDEYKVPSKKFKVLGNTDRHSIKKNLIGALLFDSGETAEATRLKRTARRRYTRRKNRICYLQEIFSNEMAKVDDSFFHRLEESFLVEEDKKHERHPIFGNIVDEVAYHEKYPTIYHLRKKLVDSTDKADLRLIYLALAHMIKFRGHFLIEGDLNPDNSDVDKLFIQLVQTYNQLFEENPINASGVDAKAILSARLSKSRRLENLIAQLPGEKKNGLFGNLIALSLGLTPNFKSNFDLAEDAKLQLSKDTYDDDLDNLLAQIGDQYADLFLAAKNLSDAILLSDILRVNTEITKAPLSASMIKRYDEHHQDLTLLKALVRQQLPEKYKEIFFDQSKNGYAGYIDGGASQEEFYKFIKPILEKMDGTEELLVKLNREDLLRKQRTFDNGSIPHQIHLGELHAILRRQEDFYPFLKDNREKIEKILTFRIPYYVGPLARGNSRFAWMTRKSEETITPWNFEEVVDKGASAQSFIERMTNFDKNLPNEKVLPKHSLLYEYFTVYNELTKVKYVTEGMRKPAFLSGEQKKAIVDLLFKTNRKVTVKQLKEDYFKKIECFDSVEISGVEDRFNASLGTYHDLLKIIKDKDFLDNEENEDILEDIVLTLTLFEDREMIEERLKTYAHLFDDKVMKQLKRRRYTGWGRLSRKLINGIRDKQSGKTILDFLKSDGFANRNFMQLIHDDSLTFKEDIQKAQVSGQGDSLHEHIANLAGSPAIKKGILQTVKVVDELVKVMGRHKPENIVIEMARENQTTQKGQKNSRERMKRIEEGIKELGSQILKEHPVENTQLQNEKLYLYYLQNGRDMYVDQELDINRLSDYDVDHIVPQSFLKDDSIDNKVLTRSDKARGKSDNVPSEEVVKKMKNYWRQLLNAKLITQRKFDNLTKAERGGLSELDKAGFIKRQLVETRQITKHVAQILDSRMNTKYDENDKLIREVKVITLKSKLVSDFRKDFQFYKVREINNYHHAHDAYLNAVVGTALIKKYPKLESEFVYGDYKVYDVRKMIAKSEQEIGKATAKYFFYSNIMNFFKTEITLANGEIRKRPLIETNGETGEIVWDKGRDFATVRKVLSMPQVNIVKKTEVQTGGFSKESILPKRNSDKLIARKKDWDPKKYGGFDSPTVAYSVLVVAKVEKGKSKKLKSVKELLGITIMERSSFEKNPIDFLEAKGYKEVKKDLIIKLPKYSLFELENGRKRMLASAGELQKGNELALPSKYVNFLYLASHYEKLKGSPEDNEQKQLFVEQHKHYLDEIIEQISEFSKRVILADANLDKVLSAYNKHRDKPIREQAENIIHLFTLTNLGAPAAFKYFDTTIDRKRYTSTKEVLDATLIHQSITGLYETRIDLSQLGGDGGGGGGSSEAAAKGGTLQLDDEYRLYSPLVKPDQNIQFWLEQFPQAWAETAGMGLAKQVPPQVIQLKASATPVSVRQYPLSKEAQEGIRPHVQRLIQQGILVPVQSPWNTPLLPVRKPGTNDYRPVQDLREVNKRVQDIHPTVPNPYNLLCALPPQRSWYTVLDLKDAFFCLRLHPTSQPLFAFEWRDPGTGRTGQLTWTRLPQGFKNSPTIFNEALHRDLANFRIQHPQVTLLQYVDDLLLAGATKQDCLEGTKALLLELSDLGYRASAKKAQICRREVTYLGYSLRDGQRWLTEARKKTVVQIPAPTTAKQVREFLGTAGFCRLWIPGFATLAAPLYPLTKPKGEFSWAPEHQKAFDAIKKALLSAPALALPDVTKPFTLYVDERKGVARGVLTQTLGPWRRPVAYLSKKLDPVASGWPVCLKAIAAVAILVKDADKLTLGQNITVIAPHALENIVRQPPDRWMTNARMTHYQSLLLTERVTFAPPAALNPATLLPEETDEPVTHDCHQLLIEETGVRKDLTDIPLTGEVLTWFTDGSSYVVEGKRMAGAAVVDGTRTIWASSLPEGTSAQKAELMALTQALRLAEGKSINIYTDSRYAFATAHVHGAIYKQRGWLTSAGREIKNKEEILSLLEALHLPKRLAIIHCPGHQKAKDPISRGNQMADRVAKQAAQGVNLLAGKRTADGSEFEKRTADGSEFESPKKKAKVE

SEQ ID NO: 122 - protein, 2095 aa, synthetic construct
MPAAKRVKLDGGDKKYSIGLDIGTNSVGWAVITDEYKVPSKKFKVLGNTDRHSIKKNLIGALLFDSGETAEATRLKRTARRRYTRRKNRICYLQEIFSNEMAKVDDSFFHRLEESFLVEEDKKHERHPIFGNIVDEVAYHEKYPTIYHLRKKLVDSTDKADLRLIYLALAHMIKFRGHFLIEGDLNPDNSDVDKLFIQLVQTYNQLFEENPINASGVDAKAILSARLSKSRRLENLIAQLPGEKKNGLFGNLIALSLGLTPNFKSNFDLAEDAKLQLSKDTYDDDLDNLLAQIGDQYADLFLAAKNLSDAILLSDILRVNTEITKAPLSASMIKRYDEHHQDLTLLKALVRQQLPEKYKEIFFDQSKNGYAGYIDGGASQEEFYKFIKPILEKMDGTEELLVKLNREDLLRKQRTFDNGSIPHQIHLGELHAILRRQEDFYPFLKDNREKIEKILTFRIPYYVGPLARGNSRFAWMTRKSEETITPWNFEEVVDKGASAQSFIERMTNFDKNLPNEKVLPKHSLLYEYFTVYNELTKVKYVTEGMRKPAFLSGEQKKAIVDLLFKTNRKVTVKQLKEDYFKKIECFDSVEISGVEDRFNASLGTYHDLLKIIKDKDFLDNEENEDILEDIVLTLTLFEDREMIEERLKTYAHLFDDKVMKQLKRRRYTGWGRLSRKLINGIRDKQSGKTILDFLKSDGFANRNFMQLIHDDSLTFKEDIQKAQVSGQGDSLHEHIANLAGSPAIKKGILQTVKVVDELVKVMGRHKPENIVIEMARENQTTQKGQKNSRERMKRIEEGIKELGSQILKEHPVENTQLQNEKLYLYYLQNGRDMYVDQELDINRLSDYDVDHIVPQSFLKDDSIDNKVLTRSDKARGKSDNVPSEEVVKKMKNYWRQLLNAKLITQRKFDNLTKAERGGLSELDKAGFIKRQLVETRQITKHVAQILDSRMNTKYDENDKLIREVKVITLKSKLVSDFRKDFQFYKVREINNYHHAHDAYLNAVVGTALIKKYPKLESEFVYGDYKVYDVRKMIAKSEQEIGKATAKYFFYSNIMNFFKTEITLANGEIRKRPLIETNGETGEIVWDKGRDFATVRKVLSMPQVNIVKKTEVQTGGFSKESILPKRNSDKLIARKKDWDPKKYGGFDSPTVAYSVLVVAKVEKGKSKKLKSVKELLGITIMERSSFEKNPIDFLEAKGYKEVKKDLIIKLPKYSLFELENGRKRMLASAGELQKGNELALPSKYVNFLYLASHYEKLKGSPEDNEQKQLFVEQHKHYLDEIIEQISEFSKRVILADANLDKVLSAYNKHRDKPIREQAENIIHLFTLTNLGAPAAFKYFDTTIDRKRYTSTKEVLDATLIHQSITGLYETRIDLSQLGGDGGSGSETPGTSESATPESGGTLQLDDEYRLYSPLVKPDQNIQFWLEQFPQAWAETAGMGLAKQVPPQVIQLKASATPVSVRQYPLSKEAQEGIRPHVQRLIQQGILVPVQSPWNTPLLPVRKPGTNDYRPVQDLREVNKRVQDIHPTVPNPYNLLCALPPQRSWYTVLDLKDAFFCLRLHPTSQPLFAFEWRDPGTGRTGQLTWTRLPQGFKNSPTIFNEALHRDLANFRIQHPQVTLLQYVDDLLLAGATKQDCLEGTKALLLELSDLGYRASAKKAQICRREVTYLGYSLRDGQRWLTEARKKTVVQIPAPTTAKQVREFLGTAGFCRLWIPGFATLAAPLYPLTKPKGEFSWAPEHQKAFDAIKKALLSAPALALPDVTKPFTLYVDERKGVARGVLTQTLGPWRRPVAYLSKKLDPVASGWPVCLKAIAAVAILVKDADKLTLGQNITVIAPHALENIVRQPPDRWMTNARMTHYQSLLLTERVTFAPPAALNPATLLPEETDEPVTHDCHQLLIEETGVRKDLTDIPLTGEVLTWFTDGSSYVVEGKRMAGAAVVDGTRTIWASSLPEGTSAQKAELMALTQALRLAEGKSINIYTDSRYAFATAHVHGAIYKQRGWLTSAGREIKNKEEILSLLEALHLPKRLAIIHCPGHQKAKDPISRGNQMADRVAKQAAQGVNLLAGKRTADGSEFEKRTADGSEFESPKKKAKVE

SEQ ID NO: 123 - protein, 2085 aa, synthetic construct
MPAAKRVKLDGGDKKYSIGLDIGTNSVGWAVITDEYKVPSKKFKVLGNTDRHSIKKNLIGALLFDSGETAEATRLKRTARRRYTRRKNRICYLQEIFSNEMAKVDDSFFHRLEESFLVEEDKKHERHPIFGNIVDEVAYHEKYPTIYHLRKKLVDSTDKADLRLIYLALAHMIKFRGHFLIEGDLNPDNSDVDKLFIQLVQTYNQLFEENPINASGVDAKAILSARLSKSRRLENLIAQLPGEKKNGLFGNLIALSLGLTPNFKSNFDLAEDAKLQLSKDTYDDDLDNLLAQIGDQYADLFLAAKNLSDAILLSDILRVNTEITKAPLSASMIKRYDEHHQDLTLLKALVRQQLPEKYKEIFFDQSKNGYAGYIDGGASQEEFYKFIKPILEKMDGTEELLVKLNREDLLRKQRTFDNGSIPHQIHLGELHAILRRQEDFYPFLKDNREKIEKILTFRIPYYVGPLARGNSRFAWMTRKSEETITPWNFEEVVDKGASAQSFIERMTNFDKNLPNEKVLPKHSLLYEYFTVYNELTKVKYVTEGMRKPAFLSGEQKKAIVDLLFKTNRKVTVKQLKEDYFKKIECFDSVEISGVEDRFNASLGTYHDLLKIIKDKDFLDNEENEDILEDIVLTLTLFEDREMIEERLKTYAHLFDDKVMKQLKRRRYTGWGRLSRKLINGIRDKQSGKTILDFLKSDGFANRNFMQLIHDDSLTFKEDIQKAQVSGQGDSLHEHIANLAGSPAIKKGILQTVKVVDELVKVMGRHKPENIVIEMARENQTTQKGQKNSRERMKRIEEGIKELGSQILKEHPVENTQLQNEKLYLYYLQNGRDMYVDQELDINRLSDYDVDHIVPQSFLKDDSIDNKVLTRSDKARGKSDNVPSEEVVKKMKNYWRQLLNAKLITQRKFDNLTKAERGGLSELDKAGFIKRQLVETRQITKHVAQILDSRMNTKYDENDKLIREVKVITLKSKLVSDFRKDFQFYKVREINNYHHAHDAYLNAVVGTALIKKYPKLESEFVYGDYKVYDVRKMIAKSEQEIGKATAKYFFYSNIMNFFKTEITLANGEIRKRPLIETNGETGEIVWDKGRDFATVRKVLSMPQVNIVKKTEVQTGGFSKESILPKRNSDKLIARKKDWDPKKYGGFDSPTVAYSVLVVAKVEKGKSKKLKSVKELLGITIMERSSFEKNPIDFLEAKGYKEVKKDLIIKLPKYSLFELENGRKRMLASAGELQKGNELALPSKYVNFLYLASHYEKLKGSPEDNEQKQLFVEQHKHYLDEIIEQISEFSKRVILADANLDKVLSAYNKHRDKPIREQAENIIHLFTLTNLGAPAAFKYFDTTIDRKRYTSTKEVLDATLIHQSITGLYETRIDLSQLGGDGGPAPGSSGGTLQLDDEYRLYSPLVKPDQNIQFWLEQFPQAWAETAGMGLAKQVPPQVIQLKASATPVSVRQYPLSKEAQEGIRPHVQRLIQQGILVPVQSPWNTPLLPVRKPGTNDYRPVQDLREVNKRVQDIHPTVPNPYNLLCALPPQRSWYTVLDLKDAFFCLRLHPTSQPLFAFEWRDPGTGRTGQLTWTRLPQGFKNSPTIFNEALHRDLANFRIQHPQVTLLQYVDDLLLAGATKQDCLEGTKALLLELSDLGYRASAKKAQICRREVTYLGYSLRDGQRWLTEARKKTVVQIPAPTTAKQVREFLGTAGFCRLWIPGFATLAAPLYPLTKPKGEFSWAPEHQKAFDAIKKALLSAPALALPDVTKPFTLYVDERKGVARGVLTQTLGPWRRPVAYLSKKLDPVASGWPVCLKAIAAVAILVKDADKLTLGQNITVIAPHALENIVRQPPDRWMTNARMTHYQSLLLTERVTFAPPAALNPATLLPEETDEPVTHDCHQLLIEETGVRKDLTDIPLTGEVLTWFTDGSSYVVEGKRMAGAAVVDGTRTIWASSLPEGTSAQKAELMALTQALRLAEGKSINIYTDSRYAFATAHVHGAIYKQRGWLTSAGREIKNKEEILSLLEALHLPKRLAIIHCPGHQKAKDPISRGNQMADRVAKQAAQGVNLLAGKRTADGSEFEKRTADGSEFESPKKKAKVE

SEQ ID NO: 124 - protein, 2090 aa, synthetic construct
MPAAKRVKLDGGDKKYSIGLDIGTNSVGWAVITDEYKVPSKKFKVLGNTDRHSIKKNLIGALLFDSGETAEATRLKRTARRRYTRRKNRICYLQEIFSNEMAKVDDSFFHRLEESFLVEEDKKHERHPIFGNIVDEVAYHEKYPTIYHLRKKLVDSTDKADLRLIYLALAHMIKFRGHFLIEGDLNPDNSDVDKLFIQLVQTYNQLFEENPINASGVDAKAILSARLSKSRRLENLIAQLPGEKKNGLFGNLIALSLGLTPNFKSNFDLAEDAKLQLSKDTYDDDLDNLLAQIGDQYADLFLAAKNLSDAILLSDILRVNTEITKAPLSASMIKRYDEHHQDLTLLKALVRQQLPEKYKEIFFDQSKNGYAGYIDGGASQEEFYKFIKPILEKMDGTEELLVKLNREDLLRKQRTFDNGSIPHQIHLGELHAILRRQEDFYPFLKDNREKIEKILTFRIPYYVGPLARGNSRFAWMTRKSEETITPWNFEEVVDKGASAQSFIERMTNFDKNLPNEKVLPKHSLLYEYFTVYNELTKVKYVTEGMRKPAFLSGEQKKAIVDLLFKTNRKVTVKQLKEDYFKKIECFDSVEISGVEDRFNASLGTYHDLLKIIKDKDFLDNEENEDILEDIVLTLTLFEDREMIEERLKTYAHLFDDKVMKQLKRRRYTGWGRLSRKLINGIRDKQSGKTILDFLKSDGFANRNFMQLIHDDSLTFKEDIQKAQVSGQGDSLHEHIANLAGSPAIKKGILQTVKVVDELVKVMGRHKPENIVIEMARENQTTQKGQKNSRERMKRIEEGIKELGSQILKEHPVENTQLQNEKLYLYYLQNGRDMYVDQELDINRLSDYDVDHIVPQSFLKDDSIDNKVLTRSDKARGKSDNVPSEEVVKKMKNYWRQLLNAKLITQRKFDNLTKAERGGLSELDKAGFIKRQLVETRQITKHVAQILDSRMNTKYDENDKLIREVKVITLKSKLVSDFRKDFQFYKVREINNYHHAHDAYLNAVVGTALIKKYPKLESEFVYGDYKVYDVRKMIAKSEQEIGKATAKYFFYSNIMNFFKTEITLANGEIRKRPLIETNGETGEIVWDKGRDFATVRKVLSMPQVNIVKKTEVQTGGFSKESILPKRNSDKLIARKKDWDPKKYGGFDSPTVAYSVLVVAKVEKGKSKKLKSVKELLGITIMERSSFEKNPIDFLEAKGYKEVKKDLIIKLPKYSLFELENGRKRMLASAGELQKGNELALPSKYVNFLYLASHYEKLKGSPEDNEQKQLFVEQHKHYLDEIIEQISEFSKRVILADANLDKVLSAYNKHRDKPIREQAENIIHLFTLTNLGAPAAFKYFDTTIDRKRYTSTKEVLDATLIHQSITGLYETRIDLSQLGGDGGPAPEAAAKGGGGGTLQLDDEYRLYSPLVKPDQNIQFWLEQFPQAWAETAGMGLAKQVPPQVIQLKASATPVSVRQYPLSKEAQEGIRPHVQRLIQQGILVPVQSPWNTPLLPVRKPGTNDYRPVQDLREVNKRVQDIHPTVPNPYNLLCALPPQRSWYTVLDLKDAFFCLRLHPTSQPLFAFEWRDPGTGRTGQLTWTRLPQGFKNSPTIFNEALHRDLANFRIQHPQVTLLQYVDDLLLAGATKQDCLEGTKALLLELSDLGYRASAKKAQICRREVTYLGYSLRDGQRWLTEARKKTVVQIPAPTTAKQVREFLGTAGFCRLWIPGFATLAAPLYPLTKPKGEFSWAPEHQKAFDAIKKALLSAPALALPDVTKPFTLYVDERKGVARGVLTQTLGPWRRPVAYLSKKLDPVASGWPVCLKAIAAVAILVKDADKLTLGQNITVIAPHALENIVRQPPDRWMTNARMTHYQSLLLTERVTFAPPAALNPATLLPEETDEPVTHDCHQLLIEETGVRKDLTDIPLTGEVLTWFTDGSSYVVEGKRMAGAAVVDGTRTIWASSLPEGTSAQKAELMALTQALRLAEGKSINIYTDSRYAFATAHVHGAIYKQRGWLTSAGREIKNKEEILSLLEALHLPKRLAIIHCPGHQKAKDPISRGNQMADRVAKQAAQGVNLLAGKRTADGSEFEKRTADGSEFESPKKKAKVE

SEQ ID NO: 125 - protein, 2085 aa, synthetic construct
MPAAKRVKLDGGDKKYSIGLDIGTNSVGWAVITDEYKVPSKKFKVLGNTDRHSIKKNLIGALLFDSGETAEATRLKRTARRRYTRRKNRICYLQEIFSNEMAKVDDSFFHRLEESFLVEEDKKHERHPIFGNIVDEVAYHEKYPTIYHLRKKLVDSTDKADLRLIYLALAHMIKFRGHFLIEGDLNPDNSDVDKLFIQLVQTYNQLFEENPINASGVDAKAILSARLSKSRRLENLIAQLPGEKKNGLFGNLIALSLGLTPNFKSNFDLAEDAKLQLSKDTYDDDLDNLLAQIGDQYADLFLAAKNLSDAILLSDILRVNTEITKAPLSASMIKRYDEHHQDLTLLKALVRQQLPEKYKEIFFDQSKNGYAGYIDGGASQEEFYKFIKPILEKMDGTEELLVKLNREDLLRKQRTFDNGSIPHQIHLGELHAILRRQEDFYPFLKDNREKIEKILTFRIPYYVGPLARGNSRFAWMTRKSEETITPWNFEEVVDKGASAQSFIERMTNFDKNLPNEKVLPKHSLLYEYFTVYNELTKVKYVTEGMRKPAFLSGEQKKAIVDLLFKTNRKVTVKQLKEDYFKKIECFDSVEISGVEDRFNASLGTYHDLLKIIKDKDFLDNEENEDILEDIVLTLTLFEDREMIEERLKTYAHLFDDKVMKQLKRRRYTGWGRLSRKLINGIRDKQSGKTILDFLKSDGFANRNFMQLIHDDSLTFKEDIQKAQVSGQGDSLHEHIANLAGSPAIKKGILQTVKVVDELVKVMGRHKPENIVIEMARENQTTQKGQKNSRERMKRIEEGIKELGSQILKEHPVENTQLQNEKLYLYYLQNGRDMYVDQELDINRLSDYDVDHIVPQSFLKDDSIDNKVLTRSDKARGKSDNVPSEEVVKKMKNYWRQLLNAKLITQRKFDNLTKAERGGLSELDKAGFIKRQLVETRQITKHVAQILDSRMNTKYDENDKLIREVKVITLKSKLVSDFRKDFQFYKVREINNYHHAHDAYLNAVVGTALIKKYPKLESEFVYGDYKVYDVRKMIAKSEQEIGKATAKYFFYSNIMNFFKTEITLANGEIRKRPLIETNGETGEIVWDKGRDFATVRKVLSMPQVNIVKKTEVQTGGFSKESILPKRNSDKLIARKKDWDPKKYGGFDSPTVAYSVLVVAKVEKGKSKKLKSVKELLGITIMERSSFEKNPIDFLEAKGYKEVKKDLIIKLPKYSLFELENGRKRMLASAGELQKGNELALPSKYVNFLYLASHYEKLKGSPEDNEQKQLFVEQHKHYLDEIIEQISEFSKRVILADANLDKVLSAYNKHRDKPIREQAENIIHLFTLTNLGAPAAFKYFDTTIDRKRYTSTKEVLDATLIHQSITGLYETRIDLSQLGGDGGPAPGGSGGTLQLDDEYRLYSPLVKPDQNIQFWLEQFPQAWAETAGMGLAKQVPPQVIQLKASATPVSVRQYPLSKEAQEGIRPHVQRLIQQGILVPVQSPWNTPLLPVRKPGTNDYRPVQDLREVNKRVQDIHPTVPNPYNLLCALPPQRSWYTVLDLKDAFFCLRLHPTSQPLFAFEWRDPGTGRTGQLTWTRLPQGFKNSPTIFNEALHRDLANFRIQHPQVTLLQYVDDLLLAGATKQDCLEGTKALLLELSDLGYRASAKKAQICRREVTYLGYSLRDGQRWLTEARKKTVVQIPAPTTAKQVREFLGTAGFCRLWIPGFATLAAPLYPLTKPKGEFSWAPEHQKAFDAIKKALLSAPALALPDVTKPFTLYVDERKGVARGVLTQTLGPWRRPVAYLSKKLDPVASGWPVCLKAIAAVAILVKDADKLTLGQNITVIAPHALENIVRQPPDRWMTNARMTHYQSLLLTERVTFAPPAALNPATLLPEETDEPVTHDCHQLLIEETGVRKDLTDIPLTGEVLTWFTDGSSYVVEGKRMAGAAVVDGTRTIWASSLPEGTSAQKAELMALTQALRLAEGKSINIYTDSRYAFATAHVHGAIYKQRGWLTSAGREIKNKEEILSLLEALHLPKRLAIIHCPGHQKAKDPISRGNQMADRVAKQAAQGVNLLAGKRTADGSEFEKRTADGSEFESPKKKAKVE

SEQ ID NO: 126 - protein, 2087 aa, synthetic construct
MPAAKRVKLDGGDKKYSIGLDIGTNSVGWAVITDEYKVPSKKFKVLGNTDRHSIKKNLIGALLFDSGETAEATRLKRTARRRYTRRKNRICYLQEIFSNEMAKVDDSFFHRLEESFLVEEDKKHERHPIFGNIVDEVAYHEKYPTIYHLRKKLVDSTDKADLRLIYLALAHMIKFRGHFLIEGDLNPDNSDVDKLFIQLVQTYNQLFEENPINASGVDAKAILSARLSKSRRLENLIAQLPGEKKNGLFGNLIALSLGLTPNFKSNFDLAEDAKLQLSKDTYDDDLDNLLAQIGDQYADLFLAAKNLSDAILLSDILRVNTEITKAPLSASMIKRYDEHHQDLTLLKALVRQQLPEKYKEIFFDQSKNGYAGYIDGGASQEEFYKFIKPILEKMDGTEELLVKLNREDLLRKQRTFDNGSIPHQIHLGELHAILRRQEDFYPFLKDNREKIEKILTFRIPYYVGPLARGNSRFAWMTRKSEETITPWNFEEVVDKGASAQSFIERMTNFDKNLPNEKVLPKHSLLYEYFTVYNELTKVKYVTEGMRKPAFLSGEQKKAIVDLLFKTNRKVTVKQLKEDYFKKIECFDSVEISGVEDRFNASLGTYHDLLKIIKDKDFLDNEENEDILEDIVLTLTLFEDREMIEERLKTYAHLFDDKVMKQLKRRRYTGWGRLSRKLINGIRDKQSGKTILDFLKSDGFANRNFMQLIHDDSLTFKEDIQKAQVSGQGDSLHEHIANLAGSPAIKKGILQTVKVVDELVKVMGRHKPENIVIEMARENQTTQKGQKNSRERMKRIEEGIKELGSQILKEHPVENTQLQNEKLYLYYLQNGRDMYVDQELDINRLSDYDVDHIVPQSFLKDDSIDNKVLTRSDKARGKSDNVPSEEVVKKMKNYWRQLLNAKLITQRKFDNLTKAERGGLSELDKAGFIKRQLVETRQITKHVAQILDSRMNTKYDENDKLIREVKVITLKSKLVSDFRKDFQFYKVREINNYHHAHDAYLNAVVGTALIKKYPKLESEFVYGDYKVYDVRKMIAKSEQEIGKATAKYFFYSNIMNFFKTEITLANGEIRKRPLIETNGETGEIVWDKGRDFATVRKVLSMPQVNIVKKTEVQTGGFSKESILPKRNSDKLIARKKDWDPKKYGGFDSPTVAYSVLVVAKVEKGKSKKLKSVKELLGITIMERSSFEKNPIDFLEAKGYKEVKKDLIIKLPKYSLFELENGRKRMLASAGELQKGNELALPSKYVNFLYLASHYEKLKGSPEDNEQKQLFVEQHKHYLDEIIEQISEFSKRVILADANLDKVLSAYNKHRDKPIREQAENIIHLFTLTNLGAPAAFKYFDTTIDRKRYTSTKEVLDATLIHQSITGLYETRIDLSQLGGDGGEAAAKGGGGGTLQLDDEYRLYSPLVKPDQNIQFWLEQFPQAWAETAGMGLAKQVPPQVIQLKASATPVSVRQYPLSKEAQEGIRPHVQRLIQQGILVPVQSPWNTPLLPVRKPGTNDYRPVQDLREVNKRVQDIHPTVPNPYNLLCALPPQRSWYTVLDLKDAFFCLRLHPTSQPLFAFEWRDPGTGRTGQLTWTRLPQGFKNSPTIFNEALHRDLANFRIQHPQVTLLQYVDDLLLAGATKQDCLEGTKALLLELSDLGYRASAKKAQICRREVTYLGYSLRDGQRWLTEARKKTVVQIPAPTTAKQVREFLGTAGFCRLWIPGFATLAAPLYPLTKPKGEFSWAPEHQKAFDAIKKALLSAPALALPDVTKPFTLYVDERKGVARGVLTQTLGPWRRPVAYLSKKLDPVASGWPVCLKAIAAVAILVKDADKLTLGQNITVIAPHALENIVRQPPDRWMTNARMTHYQSLLLTERVTFAPPAALNPATLLPEETDEPVTHDCHQLLIEETGVRKDLTDIPLTGEVLTWFTDGSSYVVEGKRMAGAAVVDGTRTIWASSLPEGTSAQKAELMALTQALRLAEGKSINIYTDSRYAFATAHVHGAIYKQRGWLTSAGREIKNKEEILSLLEALHLPKRLAIIHCPGHQKAKDPISRGNQMADRVAKQAAQGVNLLAGKRTADGSEFEKRTADGSEFESPKKKAKVE

SEQ ID NO: 127 - protein, 2090 aa, synthetic construct
MPAAKRVKLDGGDKKYSIGLDIGTNSVGWAVITDEYKVPSKKFKVLGNTDRHSIKKNLIGALLFDSGETAEATRLKRTARRRYTRRKNRICYLQEIFSNEMAKVDDSFFHRLEESFLVEEDKKHERHPIFGNIVDEVAYHEKYPTIYHLRKKLVDSTDKADLRLIYLALAHMIKFRGHFLIEGDLNPDNSDVDKLFIQLVQTYNQLFEENPINASGVDAKAILSARLSKSRRLENLIAQLPGEKKNGLFGNLIALSLGLTPNFKSNFDLAEDAKLQLSKDTYDDDLDNLLAQIGDQYADLFLAAKNLSDAILLSDILRVNTEITKAPLSASMIKRYDEHHQDLTLLKALVRQQLPEKYKEIFFDQSKNGYAGYIDGGASQEEFYKFIKPILEKMDGTEELLVKLNREDLLRKQRTFDNGSIPHQIHLGELHAILRRQEDFYPFLKDNREKIEKILTFRIPYYVGPLARGNSRFAWMTRKSEETITPWNFEEVVDKGASAQSFIERMTNFDKNLPNEKVLPKHSLLYEYFTVYNELTKVKYVTEGMRKPAFLSGEQKKAIVDLLFKTNRKVTVKQLKEDYFKKIECFDSVEISGVEDRFNASLGTYHDLLKIIKDKDFLDNEENEDILEDIVLTLTLFEDREMIEERLKTYAHLFDDKVMKQLKRRRYTGWGRLSRKLINGIRDKQSGKTILDFLKSDGFANRNFMQLIHDDSLTFKEDIQKAQVSGQGDSLHEHIANLAGSPAIKKGILQTVKVVDELVKVMGRHKPENIVIEMARENQTTQKGQKNSRERMKRIEEGIKELGSQILKEHPVENTQLQNEKLYLYYLQNGRDMYVDQELDINRLSDYDVDHIVPQSFLKDDSIDNKVLTRSDKARGKSDNVPSEEVVKKMKNYWRQLLNAKLITQRKFDNLTKAERGGLSELDKAGFIKRQLVETRQITKHVAQILDSRMNTKYDENDKLIREVKVITLKSKLVSDFRKDFQFYKVREINNYHHAHDAYLNAVVGTALIKKYPKLESEFVYGDYKVYDVRKMIAKSEQEIGKATAKYFFYSNIMNFFKTEITLANGEIRKRPLIETNGETGEIVWDKGRDFATVRKVLSMPQVNIVKKTEVQTGGFSKESILPKRNSDKLIARKKDWDPKKYGGFDSPTVAYSVLVVAKVEKGKSKKLKSVKELLGITIMERSSFEKNPIDFLEAKGYKEVKKDLIIKLPKYSLFELENGRKRMLASAGELQKGNELALPSKYVNFLYLASHYEKLKGSPEDNEQKQLFVEQHKHYLDEIIEQISEFSKRVILADANLDKVLSAYNKHRDKPIREQAENIIHLFTLTNLGAPAAFKYFDTTIDRKRYTSTKEVLDATLIHQSITGLYETRIDLSQLGGDGGPAPGGGEAAAKGGTLQLDDEYRLYSPLVKPDQNIQFWLEQFPQAWAETAGMGLAKQVPPQVIQLKASATPVSVRQYPLSKEAQEGIRPHVQRLIQQGILVPVQSPWNTPLLPVRKPGTNDYRPVQDLREVNKRVQDIHPTVPNPYNLLCALPPQRSWYTVLDLKDAFFCLRLHPTSQPLFAFEWRDPGTGRTGQLTWTRLPQGFKNSPTIFNEALHRDLANFRIQHPQVTLLQYVDDLLLAGATKQDCLEGTKALLLELSDLGYRASAKKAQICRREVTYLGYSLRDGQRWLTEARKKTVVQIPAPTTAKQVREFLGTAGFCRLWIPGFATLAAPLYPLTKPKGEFSWAPEHQKAFDAIKKALLSAPALALPDVTKPFTLYVDERKGVARGVLTQTLGPWRRPVAYLSKKLDPVASGWPVCLKAIAAVAILVKDADKLTLGQNITVIAPHALENIVRQPPDRWMTNARMTHYQSLLLTERVTFAPPAALNPATLLPEETDEPVTHDCHQLLIEETGVRKDLTDIPLTGEVLTWFTDGSSYVVEGKRMAGAAVVDGTRTIWASSLPEGTSAQKAELMALTQALRLAEGKSINIYTDSRYAFATAHVHGAIYKQRGWLTSAGREIKNKEEILSLLEALHLPKRLAIIHCPGHQKAKDPISRGNQMADRVAKQAAQGVNLLAGKRTADGSEFEKRTADGSEFESPKKKAKVE

SEQ ID NO: 128 - protein, 2087 aa, synthetic construct
MPAAKRVKLDGGDKKYSIGLDIGTNSVGWAVITDEYKVPSKKFKVLGNTDRHSIKKNLIGALLFDSGETAEATRLKRTARRRYTRRKNRICYLQEIFSNEMAKVDDSFFHRLEESFLVEEDKKHERHPIFGNIVDEVAYHEKYPTIYHLRKKLVDSTDKADLRLIYLALAHMIKFRGHFLIEGDLNPDNSDVDKLFIQLVQTYNQLFEENPINASGVDAKAILSARLSKSRRLENLIAQLPGEKKNGLFGNLIALSLGLTPNFKSNFDLAEDAKLQLSKDTYDDDLDNLLAQIGDQYADLFLAAKNLSDAILLSDILRVNTEITKAPLSASMIKRYDEHHQDLTLLKALVRQQLPEKYKEIFFDQSKNGYAGYIDGGASQEEFYKFIKPILEKMDGTEELLVKLNREDLLRKQRTFDNGSIPHQIHLGELHAILRRQEDFYPFLKDNREKIEKILTFRIPYYVGPLARGNSRFAWMTRKSEETITPWNFEEVVDKGASAQSFIERMTNFDKNLPNEKVLPKHSLLYEYFTVYNELTKVKYVTEGMRKPAFLSGEQKKAIVDLLFKTNRKVTVKQLKEDYFKKIECFDSVEISGVEDRFNASLGTYHDLLKIIKDKDFLDNEENEDILEDIVLTLTLFEDREMIEERLKTYAHLFDDKVMKQLKRRRYTGWGRLSRKLINGIRDKQSGKTILDFLKSDGFANRNFMQLIHDDSLTFKEDIQKAQVSGQGDSLHEHIANLAGSPAIKKGILQTVKVVDELVKVMGRHKPENIVIEMARENQTTQKGQKNSRERMKRIEEGIKELGSQILKEHPVENTQLQNEKLYLYYLQNGRDMYVDQELDINRLSDYDVDHIVPQSFLKDDSIDNKVLTRSDKARGKSDNVPSEEVVKKMKNYWRQLLNAKLITQRKFDNLTKAERGGLSELDKAGFIKRQLVETRQITKHVAQILDSRMNTKYDENDKLIREVKVITLKSKLVSDFRKDFQFYKVREINNYHHAHDAYLNAVVGTALIKKYPKLESEFVYGDYKVYDVRKMIAKSEQEIGKATAKYFFYSNIMNFFKTEITLANGEIRKRPLIETNGETGEIVWDKGRDFATVRKVLSMPQVNIVKKTEVQTGGFSKESILPKRNSDKLIARKKDWDPKKYGGFDSPTVAYSVLVVAKVEKGKSKKLKSVKELLGITIMERSSFEKNPIDFLEAKGYKEVKKDLIIKLPKYSLFELENGRKRMLASAGELQKGNELALPSKYVNFLYLASHYEKLKGSPEDNEQKQLFVEQHKHYLDEIIEQISEFSKRVILADANLDKVLSAYNKHRDKPIREQAENIIHLFTLTNLGAPAAFKYFDTTIDRKRYTSTKEVLDATLIHQSITGLYETRIDLSQLGGDGGGSSEAAAKGGTLQLDDEYRLYSPLVKPDQNIQFWLEQFPQAWAETAGMGLAKQVPPQVIQLKASATPVSVRQYPLSKEAQEGIRPHVQRLIQQGILVPVQSPWNTPLLPVRKPGTNDYRPVQDLREVNKRVQDIHPTVPNPYNLLCALPPQRSWYTVLDLKDAFFCLRLHPTSQPLFAFEWRDPGTGRTGQLTWTRLPQGFKNSPTIFNEALHRDLANFRIQHPQVTLLQYVDDLLLAGATKQDCLEGTKALLLELSDLGYRASAKKAQICRREVTYLGYSLRDGQRWLTEARKKTVVQIPAPTTAKQVREFLGTAGFCRLWIPGFATLAAPLYPLTKPKGEFSWAPEHQKAFDAIKKALLSAPALALPDVTKPFTLYVDERKGVARGVLTQTLGPWRRPVAYLSKKLDPVASGWPVCLKAIAAVAILVKDADKLTLGQNITVIAPHALENIVRQPPDRWMTNARMTHYQSLLLTERVTFAPPAALNPATLLPEETDEPVTHDCHQLLIEETGVRKDLTDIPLTGEVLTWFTDGSSYVVEGKRMAGAAVVDGTRTIWASSLPEGTSAQKAELMALTQALRLAEGKSINIYTDSRYAFATAHVHGAIYKQRGWLTSAGREIKNKEEILSLLEALHLPKRLAIIHCPGHQKAKDPISRGNQMADRVAKQAAQGVNLLAGKRTADGSEFEKRTADGSEFESPKKKAKVE

SEQ ID NO: 129 - protein, 2088 aa, synthetic construct
MPAAKRVKLDGGDKKYSIGLDIGTNSVGWAVITDEYKVPSKKFKVLGNTDRHSIKKNLIGALLFDSGETAEATRLKRTARRRYTRRKNRICYLQEIFSNEMAKVDDSFFHRLEESFLVEEDKKHERHPIFGNIVDEVAYHEKYPTIYHLRKKLVDSTDKADLRLIYLALAHMIKFRGHFLIEGDLNPDNSDVDKLFIQLVQTYNQLFEENPINASGVDAKAILSARLSKSRRLENLIAQLPGEKKNGLFGNLIALSLGLTPNFKSNFDLAEDAKLQLSKDTYDDDLDNLLAQIGDQYADLFLAAKNLSDAILLSDILRVNTEITKAPLSASMIKRYDEHHQDLTLLKALVRQQLPEKYKEIFFDQSKNGYAGYIDGGASQEEFYKFIKPILEKMDGTEELLVKLNREDLLRKQRTFDNGSIPHQIHLGELHAILRRQEDFYPFLKDNREKIEKILTFRIPYYVGPLARGNSRFAWMTRKSEETITPWNFEEVVDKGASAQSFIERMTNFDKNLPNEKVLPKHSLLYEYFTVYNELTKVKYVTEGMRKPAFLSGEQKKAIVDLLFKTNRKVTVKQLKEDYFKKIECFDSVEISGVEDRFNASLGTYHDLLKIIKDKDFLDNEENEDILEDIVLTLTLFEDREMIEERLKTYAHLFDDKVMKQLKRRRYTGWGRLSRKLINGIRDKQSGKTILDFLKSDGFANRNFMQLIHDDSLTFKEDIQKAQVSGQGDSLHEHIANLAGSPAIKKGILQTVKVVDELVKVMGRHKPENIVIEMARENQTTQKGQKNSRERMKRIEEGIKELGSQILKEHPVENTQLQNEKLYLYYLQNGRDMYVDQELDINRLSDYDVDHIVPQSFLKDDSIDNKVLTRSDKARGKSDNVPSEEVVKKMKNYWRQLLNAKLITQRKFDNLTKAERGGLSELDKAGFIKRQLVETRQITKHVAQILDSRMNTKYDENDKLIREVKVITLKSKLVSDFRKDFQFYKVREINNYHHAHDAYLNAVVGTALIKKYPKLESEFVYGDYKVYDVRKMIAKSEQEIGKATAKYFFYSNIMNFFKTEITLANGEIRKRPLIETNGETGEIVWDKGRDFATVRKVLSMPQVNIVKKTEVQTGGFSKESILPKRNSDKLIARKKDWDPKKYGGFDSPTVAYSVLVVAKVEKGKSKKLKSVKELLGITIMERSSFEKNPIDFLEAKGYKEVKKDLIIKLPKYSLFELENGRKRMLASAGELQKGNELALPSKYVNFLYLASHYEKLKGSPEDNEQKQLFVEQHKHYLDEIIEQISEFSKRVILADANLDKVLSAYNKHRDKPIREQAENIIHLFTLTNLGAPAAFKYFDTTIDRKRYTSTKEVLDATLIHQSITGLYETRIDLSQLGGDGGPAPGSSGGGGGTLQLDDEYRLYSPLVKPDQNIQFWLEQFPQAWAETAGMGLAKQVPPQVIQLKASATPVSVRQYPLSKEAQEGIRPHVQRLIQQGILVPVQSPWNTPLLPVRKPGTNDYRPVQDLREVNKRVQDIHPTVPNPYNLLCALPPQRSWYTVLDLKDAFFCLRLHPTSQPLFAFEWRDPGTGRTGQLTWTRLPQGFKNSPTIFNEALHRDLANFRIQHPQVTLLQYVDDLLLAGATKQDCLEGTKALLLELSDLGYRASAKKAQICRREVTYLGYSLRDGQRWLTEARKKTVVQIPAPTTAKQVREFLGTAGFCRLWIPGFATLAAPLYPLTKPKGEFSWAPEHQKAFDAIKKALLSAPALALPDVTKPFTLYVDERKGVARGVLTQTLGPWRRPVAYLSKKLDPVASGWPVCLKAIAAVAILVKDADKLTLGQNITVIAPHALENIVRQPPDRWMTNARMTHYQSLLLTERVTFAPPAALNPATLLPEETDEPVTHDCHQLLIEETGVRKDLTDIPLTGEVLTWFTDGSSYVVEGKRMAGAAVVDGTRTIWASSLPEGTSAQKAELMALTQALRLAEGKSINIYTDSRYAFATAHVHGAIYKQRGWLTSAGREIKNKEEILSLLEALHLPKRLAIIHCPGHQKAKDPISRGNQMADRVAKQAAQGVNLLAGKRTADGSEFEKRTADGSEFESPKKKAKVE

SEQ ID NO: 130 - protein, 2088 aa, synthetic construct
MPAAKRVKLDGGDKKYSIGLDIGTNSVGWAVITDEYKVPSKKFKVLGNTDRHSIKKNLIGALLFDSGETAEATRLKRTARRRYTRRKNRICYLQEIFSNEMAKVDDSFFHRLEESFLVEEDKKHERHPIFGNIVDEVAYHEKYPTIYHLRKKLVDSTDKADLRLIYLALAHMIKFRGHFLIEGDLNPDNSDVDKLFIQLVQTYNQLFEENPINASGVDAKAILSARLSKSRRLENLIAQLPGEKKNGLFGNLIALSLGLTPNFKSNFDLAEDAKLQLSKDTYDDDLDNLLAQIGDQYADLFLAAKNLSDAILLSDILRVNTEITKAPLSASMIKRYDEHHQDLTLLKALVRQQLPEKYKEIFFDQSKNGYAGYIDGGASQEEFYKFIKPILEKMDGTEELLVKLNREDLLRKQRTFDNGSIPHQIHLGELHAILRRQEDFYPFLKDNREKIEKILTFRIPYYVGPLARGNSRFAWMTRKSEETITPWNFEEVVDKGASAQSFIERMTNFDKNLPNEKVLPKHSLLYEYFTVYNELTKVKYVTEGMRKPAFLSGEQKKAIVDLLFKTNRKVTVKQLKEDYFKKIECFDSVEISGVEDRFNASLGTYHDLLKIIKDKDFLDNEENEDILEDIVLTLTLFEDREMIEERLKTYAHLFDDKVMKQLKRRRYTGWGRLSRKLINGIRDKQSGKTILDFLKSDGFANRNFMQLIHDDSLTFKEDIQKAQVSGQGDSLHEHIANLAGSPAIKKGILQTVKVVDELVKVMGRHKPENIVIEMARENQTTQKGQKNSRERMKRIEEGIKELGSQILKEHPVENTQLQNEKLYLYYLQNGRDMYVDQELDINRLSDYDVDHIVPQSFLKDDSIDNKVLTRSDKARGKSDNVPSEEVVKKMKNYWRQLLNAKLITQRKFDNLTKAERGGLSELDKAGFIKRQLVETRQITKHVAQILDSRMNTKYDENDKLIREVKVITLKSKLVSDFRKDFQFYKVREINNYHHAHDAYLNAVVGTALIKKYPKLESEFVYGDYKVYDVRKMIAKSEQEIGKATAKYFFYSNIMNFFKTEITLANGEIRKRPLIETNGETGEIVWDKGRDFATVRKVLSMPQVNIVKKTEVQTGGFSKESILPKRNSDKLIARKKDWDPKKYGGFDSPTVAYSVLVVAKVEKGKSKKLKSVKELLGITIMERSSFEKNPIDFLEAKGYKEVKKDLIIKLPKYSLFELENGRKRMLASAGELQKGNELALPSKYVNFLYLASHYEKLKGSPEDNEQKQLFVEQHKHYLDEIIEQISEFSKRVILADANLDKVLSAYNKHRDKPIREQAENIIHLFTLTNLGAPAAFKYFDTTIDRKRYTSTKEVLDATLIHQSITGLYETRIDLSQLGGDGGGGSGGSGGSGGTLQLDDEYRLYSPLVKPDQNIQFWLEQFPQAWAETAGMGLAKQVPPQVIQLKASATPVSVRQYPLSKEAQEGIRPHVQRLIQQGILVPVQSPWNTPLLPVRKPGTNDYRPVQDLREVNKRVQDIHPTVPNPYNLLCALPPQRSWYTVLDLKDAFFCLRLHPTSQPLFAFEWRDPGTGRTGQLTWTRLPQGFKNSPTIFNEALHRDLANFRIQHPQVTLLQYVDDLLLAGATKQDCLEGTKALLLELSDLGYRASAKKAQICRREVTYLGYSLRDGQRWLTEARKKTVVQIPAPTTAKQVREFLGTAGFCRLWIPGFATLAAPLYPLTKPKGEFSWAPEHQKAFDAIKKALLSAPALALPDVTKPFTLYVDERKGVARGVLTQTLGPWRRPVAYLSKKLDPVASGWPVCLKAIAAVAILVKDADKLTLGQNITVIAPHALENIVRQPPDRWMTNARMTHYQSLLLTERVTFAPPAALNPATLLPEETDEPVTHDCHQLLIEETGVRKDLTDIPLTGEVLTWFTDGSSYVVEGKRMAGAAVVDGTRTIWASSLPEGTSAQKAELMALTQALRLAEGKSINIYTDSRYAFATAHVHGAIYKQRGWLTSAGREIKNKEEILSLLEALHLPKRLAIIHCPGHQKAKDPISRGNQMADRVAKQAAQGVNLLAGKRTADGSEFEKRTADGSEFESPKKKAKVE

SEQ ID NO: 131 - protein, 2088 aa, synthetic construct
MPAAKRVKLDGGDKKYSIGLDIGTNSVGWAVITDEYKVPSKKFKVLGNTDRHSIKKNLIGALLFDSGETAEATRLKRTARRRYTRRKNRICYLQEIFSNEMAKVDDSFFHRLEESFLVEEDKKHERHPIFGNIVDEVAYHEKYPTIYHLRKKLVDSTDKADLRLIYLALAHMIKFRGHFLIEGDLNPDNSDVDKLFIQLVQTYNQLFEENPINASGVDAKAILSARLSKSRRLENLIAQLPGEKKNGLFGNLIALSLGLTPNFKSNFDLAEDAKLQLSKDTYDDDLDNLLAQIGDQYADLFLAAKNLSDAILLSDILRVNTEITKAPLSASMIKRYDEHHQDLTLLKALVRQQLPEKYKEIFFDQSKNGYAGYIDGGASQEEFYKFIKPILEKMDGTEELLVKLNREDLLRKQRTFDNGSIPHQIHLGELHAILRRQEDFYPFLKDNREKIEKILTFRIPYYVGPLARGNSRFAWMTRKSEETITPWNFEEVVDKGASAQSFIERMTNFDKNLPNEKVLPKHSLLYEYFTVYNELTKVKYVTEGMRKPAFLSGEQKKAIVDLLFKTNRKVTVKQLKEDYFKKIECFDSVEISGVEDRFNASLGTYHDLLKIIKDKDFLDNEENEDILEDIVLTLTLFEDREMIEERLKTYAHLFDDKVMKQLKRRRYTGWGRLSRKLINGIRDKQSGKTILDFLKSDGFANRNFMQLIHDDSLTFKEDIQKAQVSGQGDSLHEHIANLAGSPAIKKGILQTVKVVDELVKVMGRHKPENIVIEMARENQTTQKGQKNSRERMKRIEEGIKELGSQILKEHPVENTQLQNEKLYLYYLQNGRDMYVDQELDINRLSDYDVDHIVPQSFLKDDSIDNKVLTRSDKARGKSDNVPSEEVVKKMKNYWRQLLNAKLITQRKFDNLTKAERGGLSELDKAGFIKRQLVETRQITKHVAQILDSRMNTKYDENDKLIREVKVITLKSKLVSDFRKDFQFYKVREINNYHHAHDAYLNAVVGTALIKKYPKLESEFVYGDYKVYDVRKMIAKSEQEIGKATAKYFFYSNIMNFFKTEITLANGEIRKRPLIETNGETGEIVWDKGRDFATVRKVLSMPQVNIVKKTEVQTGGFSKESILPKRNSDKLIARKKDWDPKKYGGFDSPTVAYSVLVVAKVEKGKSKKLKSVKELLGITIMERSSFEKNPIDFLEAKGYKEVKKDLIIKLPKYSLFELENGRKRMLASAGELQKGNELALPSKYVNFLYLASHYEKLKGSPEDNEQKQLFVEQHKHYLDEIIEQISEFSKRVILADANLDKVLSAYNKHRDKPIREQAENIIHLFTLTNLGAPAAFKYFDTTIDRKRYTSTKEVLDATLIHQSITGLYETRIDLSQLGGDGGGGSPAPGGGGGTLQLDDEYRLYSPLVKPDQNIQFWLEQFPQAWAETAGMGLAKQVPPQVIQLKASATPVSVRQYPLSKEAQEGIRPHVQRLIQQGILVPVQSPWNTPLLPVRKPGTNDYRPVQDLREVNKRVQDIHPTVPNPYNLLCALPPQRSWYTVLDLKDAFFCLRLHPTSQPLFAFEWRDPGTGRTGQLTWTRLPQGFKNSPTIFNEALHRDLANFRIQHPQVTLLQYVDDLLLAGATKQDCLEGTKALLLELSDLGYRASAKKAQICRREVTYLGYSLRDGQRWLTEARKKTVVQIPAPTTAKQVREFLGTAGFCRLWIPGFATLAAPLYPLTKPKGEFSWAPEHQKAFDAIKKALLSAPALALPDVTKPFTLYVDERKGVARGVLTQTLGPWRRPVAYLSKKLDPVASGWPVCLKAIAAVAILVKDADKLTLGQNITVIAPHALENIVRQPPDRWMTNARMTHYQSLLLTERVTFAPPAALNPATLLPEETDEPVTHDCHQLLIEETGVRKDLTDIPLTGEVLTWFTDGSSYVVEGKRMAGAAVVDGTRTIWASSLPEGTSAQKAELMALTQALRLAEGKSINIYTDSRYAFATAHVHGAIYKQRGWLTSAGREIKNKEEILSLLEALHLPKRLAIIHCPGHQKAKDPISRGNQMADRVAKQAAQGVNLLAGKRTADGSEFEKRTADGSEFESPKKKAKVE

SEQ ID NO: 132 - protein, 2090 aa, synthetic construct
MPAAKRVKLDGGDKKYSIGLDIGTNSVGWAVITDEYKVPSKKFKVLGNTDRHSIKKNLIGALLFDSGETAEATRLKRTARRRYTRRKNRICYLQEIFSNEMAKVDDSFFHRLEESFLVEEDKKHERHPIFGNIVDEVAYHEKYPTIYHLRKKLVDSTDKADLRLIYLALAHMIKFRGHFLIEGDLNPDNSDVDKLFIQLVQTYNQLFEENPINASGVDAKAILSARLSKSRRLENLIAQLPGEKKNGLFGNLIALSLGLTPNFKSNFDLAEDAKLQLSKDTYDDDLDNLLAQIGDQYADLFLAAKNLSDAILLSDILRVNTEITKAPLSASMIKRYDEHHQDLTLLKALVRQQLPEKYKEIFFDQSKNGYAGYIDGGASQEEFYKFIKPILEKMDGTEELLVKLNREDLLRKQRTFDNGSIPHQIHLGELHAILRRQEDFYPFLKDNREKIEKILTFRIPYYVGPLARGNSRFAWMTRKSEETITPWNFEEVVDKGASAQSFIERMTNFDKNLPNEKVLPKHSLLYEYFTVYNELTKVKYVTEGMRKPAFLSGEQKKAIVDLLFKTNRKVTVKQLKEDYFKKIECFDSVEISGVEDRFNASLGTYHDLLKIIKDKDFLDNEENEDILEDIVLTLTLFEDREMIEERLKTYAHLFDDKVMKQLKRRRYTGWGRLSRKLINGIRDKQSGKTILDFLKSDGFANRNFMQLIHDDSLTFKEDIQKAQVSGQGDSLHEHIANLAGSPAIKKGILQTVKVVDELVKVMGRHKPENIVIEMARENQTTQKGQKNSRERMKRIEEGIKELGSQILKEHPVENTQLQNEKLYLYYLQNGRDMYVDQELDINRLSDYDVDHIVPQSFLKDDSIDNKVLTRSDKARGKSDNVPSEEVVKKMKNYWRQLLNAKLITQRKFDNLTKAERGGLSELDKAGFIKRQLVETRQITKHVAQILDSRMNTKYDENDKLIREVKVITLKSKLVSDFRKDFQFYKVREINNYHHAHDAYLNAVVGTALIKKYPKLESEFVYGDYKVYDVRKMIAKSEQEIGKATAKYFFYSNIMNFFKTEITLANGEIRKRPLIETNGETGEIVWDKGRDFATVRKVLSMPQVNIVKKTEVQTGGFSKESILPKRNSDKLIARKKDWDPKKYGGFDSPTVAYSVLVVAKVEKGKSKKLKSVKELLGITIMERSSFEKNPIDFLEAKGYKEVKKDLIIKLPKYSLFELENGRKRMLASAGELQKGNELALPSKYVNFLYLASHYEKLKGSPEDNEQKQLFVEQHKHYLDEIIEQISEFSKRVILADANLDKVLSAYNKHRDKPIREQAENIIHLFTLTNLGAPAAFKYFDTTIDRKRYTSTKEVLDATLIHQSITGLYETRIDLSQLGGDGGPAPEAAAKGSSGGTLQLDDEYRLYSPLVKPDQNIQFWLEQFPQAWAETAGMGLAKQVPPQVIQLKASATPVSVRQYPLSKEAQEGIRPHVQRLIQQGILVPVQSPWNTPLLPVRKPGTNDYRPVQDLREVNKRVQDIHPTVPNPYNLLCALPPQRSWYTVLDLKDAFFCLRLHPTSQPLFAFEWRDPGTGRTGQLTWTRLPQGFKNSPTIFNEALHRDLANFRIQHPQVTLLQYVDDLLLAGATKQDCLEGTKALLLELSDLGYRASAKKAQICRREVTYLGYSLRDGQRWLTEARKKTVVQIPAPTTAKQVREFLGTAGFCRLWIPGFATLAAPLYPLTKPKGEFSWAPEHQKAFDAIKKALLSAPALALPDVTKPFTLYVDERKGVARGVLTQTLGPWRRPVAYLSKKLDPVASGWPVCLKAIAAVAILVKDADKLTLGQNITVIAPHALENIVRQPPDRWMTNARMTHYQSLLLTERVTFAPPAALNPATLLPEETDEPVTHDCHQLLIEETGVRKDLTDIPLTGEVLTWFTDGSSYVVEGKRMAGAAVVDGTRTIWASSLPEGTSAQKAELMALTQALRLAEGKSINIYTDSRYAFATAHVHGAIYKQRGWLTSAGREIKNKEEILSLLEALHLPKRLAIIHCPGHQKAKDPISRGNQMADRVAKQAAQGVNLLAGKRTADGSEFEKRTADGSEFESPKKKAKVE

SEQ ID NO: 133 - protein, 2090 aa, synthetic construct
MPAAKRVKLDGGDKKYSIGLDIGTNSVGWAVITDEYKVPSKKFKVLGNTDRHSIKKNLIGALLFDSGETAEATRLKRTARRRYTRRKNRICYLQEIFSNEMAKVDDSFFHRLEESFLVEEDKKHERHPIFGNIVDEVAYHEKYPTIYHLRKKLVDSTDKADLRLIYLALAHMIKFRGHFLIEGDLNPDNSDVDKLFIQLVQTYNQLFEENPINASGVDAKAILSARLSKSRRLENLIAQLPGEKKNGLFGNLIALSLGLTPNFKSNFDLAEDAKLQLSKDTYDDDLDNLLAQIGDQYADLFLAAKNLSDAILLSDILRVNTEITKAPLSASMIKRYDEHHQDLTLLKALVRQQLPEKYKEIFFDQSKNGYAGYIDGGASQEEFYKFIKPILEKMDGTEELLVKLNREDLLRKQRTFDNGSIPHQIHLGELHAILRRQEDFYPFLKDNREKIEKILTFRIPYYVGPLARGNSRFAWMTRKSEETITPWNFEEVVDKGASAQSFIERMTNFDKNLPNEKVLPKHSLLYEYFTVYNELTKVKYVTEGMRKPAFLSGEQKKAIVDLLFKTNRKVTVKQLKEDYFKKIECFDSVEISGVEDRFNASLGTYHDLLKIIKDKDFLDNEENEDILEDIVLTLTLFEDREMIEERLKTYAHLFDDKVMKQLKRRRYTGWGRLSRKLINGIRDKQSGKTILDFLKSDGFANRNFMQLIHDDSLTFKEDIQKAQVSGQGDSLHEHIANLAGSPAIKKGILQTVKVVDELVKVMGRHKPENIVIEMARENQTTQKGQKNSRERMKRIEEGIKELGSQILKEHPVENTQLQNEKLYLYYLQNGRDMYVDQELDINRLSDYDVDHIVPQSFLKDDSIDNKVLTRSDKARGKSDNVPSEEVVKKMKNYWRQLLNAKLITQRKFDNLTKAERGGLSELDKAGFIKRQLVETRQITKHVAQILDSRMNTKYDENDKLIREVKVITLKSKLVSDFRKDFQFYKVREINNYHHAHDAYLNAVVGTALIKKYPKLESEFVYGDYKVYDVRKMIAKSEQEIGKATAKYFFYSNIMNFFKTEITLANGEIRKRPLIETNGETGEIVWDKGRDFATVRKVLSMPQVNIVKKTEVQTGGFSKESILPKRNSDKLIARKKDWDPKKYGGFDSPTVAYSVLVVAKVEKGKSKKLKSVKELLGITIMERSSFEKNPIDFLEAKGYKEVKKDLIIKLPKYSLFELENGRKRMLASAGELQKGNELALPSKYVNFLYLASHYEKLKGSPEDNEQKQLFVEQHKHYLDEIIEQISEFSKRVILADANLDKVLSAYNKHRDKPIREQAENIIHLFTLTNLGAPAAFKYFDTTIDRKRYTSTKEVLDATLIHQSITGLYETRIDLSQLGGDGGGSSEAAAKGGGGGTLQLDDEYRLYSPLVKPDQNIQFWLEQFPQAWAETAGMGLAKQVPPQVIQLKASATPVSVRQYPLSKEAQEGIRPHVQRLIQQGILVPVQSPWNTPLLPVRKPGTNDYRPVQDLREVNKRVQDIHPTVPNPYNLLCALPPQRSWYTVLDLKDAFFCLRLHPTSQPLFAFEWRDPGTGRTGQLTWTRLPQGFKNSPTIFNEALHRDLANFRIQHPQVTLLQYVDDLLLAGATKQDCLEGTKALLLELSDLGYRASAKKAQICRREVTYLGYSLRDGQRWLTEARKKTVVQIPAPTTAKQVREFLGTAGFCRLWIPGFATLAAPLYPLTKPKGEFSWAPEHQKAFDAIKKALLSAPALALPDVTKPFTLYVDERKGVARGVLTQTLGPWRRPVAYLSKKLDPVASGWPVCLKAIAAVAILVKDADKLTLGQNITVIAPHALENIVRQPPDRWMTNARMTHYQSLLLTERVTFAPPAALNPATLLPEETDEPVTHDCHQLLIEETGVRKDLTDIPLTGEVLTWFTDGSSYVVEGKRMAGAAVVDGTRTIWASSLPEGTSAQKAELMALTQALRLAEGKSINIYTDSRYAFATAHVHGAIYKQRGWLTSAGREIKNKEEILSLLEALHLPKRLAIIHCPGHQKAKDPISRGNQMADRVAKQAAQGVNLLAGKRTADGSEFEKRTADGSEFESPKKKAKVE

SEQ ID NO: 134 - protein, 2088 aa, synthetic construct
MPAAKRVKLDGGDKKYSIGLDIGTNSVGWAVITDEYKVPSKKFKVLGNTDRHSIKKNLIGALLFDSGETAEATRLKRTARRRYTRRKNRICYLQEIFSNEMAKVDDSFFHRLEESFLVEEDKKHERHPIFGNIVDEVAYHEKYPTIYHLRKKLVDSTDKADLRLIYLALAHMIKFRGHFLIEGDLNPDNSDVDKLFIQLVQTYNQLFEENPINASGVDAKAILSARLSKSRRLENLIAQLPGEKKNGLFGNLIALSLGLTPNFKSNFDLAEDAKLQLSKDTYDDDLDNLLAQIGDQYADLFLAAKNLSDAILLSDILRVNTEITKAPLSASMIKRYDEHHQDLTLLKALVRQQLPEKYKEIFFDQSKNGYAGYIDGGASQEEFYKFIKPILEKMDGTEELLVKLNREDLLRKQRTFDNGSIPHQIHLGELHAILRRQEDFYPFLKDNREKIEKILTFRIPYYVGPLARGNSRFAWMTRKSEETITPWNFEEVVDKGASAQSFIERMTNFDKNLPNEKVLPKHSLLYEYFTVYNELTKVKYVTEGMRKPAFLSGEQKKAIVDLLFKTNRKVTVKQLKEDYFKKIECFDSVEISGVEDRFNASLGTYHDLLKIIKDKDFLDNEENEDILEDIVLTLTLFEDREMIEERLKTYAHLFDDKVMKQLKRRRYTGWGRLSRKLINGIRDKQSGKTILDFLKSDGFANRNFMQLIHDDSLTFKEDIQKAQVSGQGDSLHEHIANLAGSPAIKKGILQTVKVVDELVKVMGRHKPENIVIEMARENQTTQKGQKNSRERMKRIEEGIKELGSQILKEHPVENTQLQNEKLYLYYLQNGRDMYVDQELDINRLSDYDVDHIVPQSFLKDDSIDNKVLTRSDKARGKSDNVPSEEVVKKMKNYWRQLLNAKLITQRKFDNLTKAERGGLSELDKAGFIKRQLVETRQITKHVAQILDSRMNTKYDENDKLIREVKVITLKSKLVSDFRKDFQFYKVREINNYHHAHDAYLNAVVGTALIKKYPKLESEFVYGDYKVYDVRKMIAKSEQEIGKATAKYFFYSNIMNFFKTEITLANGEIRKRPLIETNGETGEIVWDKGRDFATVRKVLSMPQVNIVKKTEVQTGGFSKESILPKRNSDKLIARKKDWDPKKYGGFDSPTVAYSVLVVAKVEKGKSKKLKSVKELLGITIMERSSFEKNPIDFLEAKGYKEVKKDLIIKLPKYSLFELENGRKRMLASAGELQKGNELALPSKYVNFLYLASHYEKLKGSPEDNEQKQLFVEQHKHYLDEIIEQISEFSKRVILADANLDKVLSAYNKHRDKPIREQAENIIHLFTLTNLGAPAAFKYFDTTIDRKRYTSTKEVLDATLIHQSITGLYETRIDLSQLGGDGGPAPGSSGGSGGTLQLDDEYRLYSPLVKPDQNIQFWLEQFPQAWAETAGMGLAKQVPPQVIQLKASATPVSVRQYPLSKEAQEGIRPHVQRLIQQGILVPVQSPWNTPLLPVRKPGTNDYRPVQDLREVNKRVQDIHPTVPNPYNLLCALPPQRSWYTVLDLKDAFFCLRLHPTSQPLFAFEWRDPGTGRTGQLTWTRLPQGFKNSPTIFNEALHRDLANFRIQHPQVTLLQYVDDLLLAGATKQDCLEGTKALLLELSDLGYRASAKKAQICRREVTYLGYSLRDGQRWLTEARKKTVVQIPAPTTAKQVREFLGTAGFCRLWIPGFATLAAPLYPLTKPKGEFSWAPEHQKAFDAIKKALLSAPALALPDVTKPFTLYVDERKGVARGVLTQTLGPWRRPVAYLSKKLDPVASGWPVCLKAIAAVAILVKDADKLTLGQNITVIAPHALENIVRQPPDRWMTNARMTHYQSLLLTERVTFAPPAALNPATLLPEETDEPVTHDCHQLLIEETGVRKDLTDIPLTGEVLTWFTDGSSYVVEGKRMAGAAVVDGTRTIWASSLPEGTSAQKAELMALTQALRLAEGKSINIYTDSRYAFATAHVHGAIYKQRGWLTSAGREIKNKEEILSLLEALHLPKRLAIIHCPGHQKAKDPISRGNQMADRVAKQAAQGVNLLAGKRTADGSEFEKRTADGSEFESPKKKAKVE

SEQ ID NO: 135 - protein, 2088 aa, synthetic construct
MPAAKRVKLDGGDKKYSIGLDIGTNSVGWAVITDEYKVPSKKFKVLGNTDRHSIKKNLIGALLFDSGETAEATRLKRTARRRYTRRKNRICYLQEIFSNEMAKVDDSFFHRLEESFLVEEDKKHERHPIFGNIVDEVAYHEKYPTIYHLRKKLVDSTDKADLRLIYLALAHMIKFRGHFLIEGDLNPDNSDVDKLFIQLVQTYNQLFEENPINASGVDAKAILSARLSKSRRLENLIAQLPGEKKNGLFGNLIALSLGLTPNFKSNFDLAEDAKLQLSKDTYDDDLDNLLAQIGDQYADLFLAAKNLSDAILLSDILRVNTEITKAPLSASMIKRYDEHHQDLTLLKALVRQQLPEKYKEIFFDQSKNGYAGYIDGGASQEEFYKFIKPILEKMDGTEELLVKLNREDLLRKQRTFDNGSIPHQIHLGELHAILRRQEDFYPFLKDNREKIEKILTFRIPYYVGPLARGNSRFAWMTRKSEETITPWNFEEVVDKGASAQSFIERMTNFDKNLPNEKVLPKHSLLYEYFTVYNELTKVKYVTEGMRKPAFLSGEQKKAIVDLLFKTNRKVTVKQLKEDYFKKIECFDSVEISGVEDRFNASLGTYHDLLKIIKDKDFLDNEENEDILEDIVLTLTLFEDREMIEERLKTYAHLFDDKVMKQLKRRRYTGWGRLSRKLINGIRDKQSGKTILDFLKSDGFANRNFMQLIHDDSLTFKEDIQKAQVSGQGDSLHEHIANLAGSPAIKKGILQTVKVVDELVKVMGRHKPENIVIEMARENQTTQKGQKNSRERMKRIEEGIKELGSQILKEHPVENTQLQNEKLYLYYLQNGRDMYVDQELDINRLSDYDVDHIVPQSFLKDDSIDNKVLTRSDKARGKSDNVPSEEVVKKMKNYWRQLLNAKLITQRKFDNLTKAERGGLSELDKAGFIKRQLVETRQITKHVAQILDSRMNTKYDENDKLIREVKVITLKSKLVSDFRKDFQFYKVREINNYHHAHDAYLNAVVGTALIKKYPKLESEFVYGDYKVYDVRKMIAKSEQEIGKATAKYFFYSNIMNFFKTEITLANGEIRKRPLIETNGETGEIVWDKGRDFATVRKVLSMPQVNIVKKTEVQTGGFSKESILPKRNSDKLIARKKDWDPKKYGGFDSPTVAYSVLVVAKVEKGKSKKLKSVKELLGITIMERSSFEKNPIDFLEAKGYKEVKKDLIIKLPKYSLFELENGRKRMLASAGELQKGNELALPSKYVNFLYLASHYEKLKGSPEDNEQKQLFVEQHKHYLDEIIEQISEFSKRVILADANLDKVLSAYNKHRDKPIREQAENIIHLFTLTNLGAPAAFKYFDTTIDRKRYTSTKEVLDATLIHQSITGLYETRIDLSQLGGDGGPAPGGSGSSGGTLQLDDEYRLYSPLVKPDQNIQFWLEQFPQAWAETAGMGLAKQVPPQVIQLKASATPVSVRQYPLSKEAQEGIRPHVQRLIQQGILVPVQSPWNTPLLPVRKPGTNDYRPVQDLREVNKRVQDIHPTVPNPYNLLCALPPQRSWYTVLDLKDAFFCLRLHPTSQPLFAFEWRDPGTGRTGQLTWTRLPQGFKNSPTIFNEALHRDLANFRIQHPQVTLLQYVDDLLLAGATKQDCLEGTKALLLELSDLGYRASAKKAQICRREVTYLGYSLRDGQRWLTEARKKTVVQIPAPTTAKQVREFLGTAGFCRLWIPGFATLAAPLYPLTKPKGEFSWAPEHQKAFDAIKKALLSAPALALPDVTKPFTLYVDERKGVARGVLTQTLGPWRRPVAYLSKKLDPVASGWPVCLKAIAAVAILVKDADKLTLGQNITVIAPHALENIVRQPPDRWMTNARMTHYQSLLLTERVTFAPPAALNPATLLPEETDEPVTHDCHQLLIEETGVRKDLTDIPLTGEVLTWFTDGSSYVVEGKRMAGAAVVDGTRTIWASSLPEGTSAQKAELMALTQALRLAEGKSINIYTDSRYAFATAHVHGAIYKQRGWLTSAGREIKNKEEILSLLEALHLPKRLAIIHCPGHQKAKDPISRGNQMADRVAKQAAQGVNLLAGKRTADGSEFEKRTADGSEFESPKKKAKVE

SEQ ID NO: 136 - protein, 2090 aa, synthetic construct
MPAAKRVKLDGGDKKYSIGLDIGTNSVGWAVITDEYKVPSKKFKVLGNTDRHSIKKNLIGALLFDSGETAEATRLKRTARRRYTRRKNRICYLQEIFSNEMAKVDDSFFHRLEESFLVEEDKKHERHPIFGNIVDEVAYHEKYPTIYHLRKKLVDSTDKADLRLIYLALAHMIKFRGHFLIEGDLNPDNSDVDKLFIQLVQTYNQLFEENPINASGVDAKAILSARLSKSRRLENLIAQLPGEKKNGLFGNLIALSLGLTPNFKSNFDLAEDAKLQLSKDTYDDDLDNLLAQIGDQYADLFLAAKNLSDAILLSDILRVNTEITKAPLSASMIKRYDEHHQDLTLLKALVRQQLPEKYKEIFFDQSKNGYAGYIDGGASQEEFYKFIKPILEKMDGTEELLVKLNREDLLRKQRTFDNGSIPHQIHLGELHAILRRQEDFYPFLKDNREKIEKILTFRIPYYVGPLARGNSRFAWMTRKSEETITPWNFEEVVDKGASAQSFIERMTNFDKNLPNEKVLPKHSLLYEYFTVYNELTKVKYVTEGMRKPAFLSGEQKKAIVDLLFKTNRKVTVKQLKEDYFKKIECFDSVEISGVEDRFNASLGTYHDLLKIIKDKDFLDNEENEDILEDIVLTLTLFEDREMIEERLKTYAHLFDDKVMKQLKRRRYTGWGRLSRKLINGIRDKQSGKTILDFLKSDGFANRNFMQLIHDDSLTFKEDIQKAQVSGQGDSLHEHIANLAGSPAIKKGILQTVKVVDELVKVMGRHKPENIVIEMARENQTTQKGQKNSRERMKRIEEGIKELGSQILKEHPVENTQLQNEKLYLYYLQNGRDMYVDQELDINRLSDYDVDHIVPQSFLKDDSIDNKVLTRSDKARGKSDNVPSEEVVKKMKNYWRQLLNAKLITQRKFDNLTKAERGGLSELDKAGFIKRQLVETRQITKHVAQILDSRMNTKYDENDKLIREVKVITLKSKLVSDFRKDFQFYKVREINNYHHAHDAYLNAVVGTALIKKYPKLESEFVYGDYKVYDVRKMIAKSEQEIGKATAKYFFYSNIMNFFKTEITLANGEIRKRPLIETNGETGEIVWDKGRDFATVRKVLSMPQVNIVKKTEVQTGGFSKESILPKRNSDKLIARKKDWDPKKYGGFDSPTVAYSVLVVAKVEKGKSKKLKSVKELLGITIMERSSFEKNPIDFLEAKGYKEVKKDLIIKLPKYSLFELENGRKRMLASAGELQKGNELALPSKYVNFLYLASHYEKLKGSPEDNEQKQLFVEQHKHYLDEIIEQISEFSKRVILADANLDKVLSAYNKHRDKPIREQAENIIHLFTLTNLGAPAAFKYFDTTIDRKRYTSTKEVLDATLIHQSITGLYETRIDLSQLGGDGGEAAAKGGSGSSGGTLQLDDEYRLYSPLVKPDQNIQFWLEQFPQAWAETAGMGLAKQVPPQVIQLKASATPVSVRQYPLSKEAQEGIRPHVQRLIQQGILVPVQSPWNTPLLPVRKPGTNDYRPVQDLREVNKRVQDIHPTVPNPYNLLCALPPQRSWYTVLDLKDAFFCLRLHPTSQPLFAFEWRDPGTGRTGQLTWTRLPQGFKNSPTIFNEALHRDLANFRIQHPQVTLLQYVDDLLLAGATKQDCLEGTKALLLELSDLGYRASAKKAQICRREVTYLGYSLRDGQRWLTEARKKTVVQIPAPTTAKQVREFLGTAGFCRLWIPGFATLAAPLYPLTKPKGEFSWAPEHQKAFDAIKKALLSAPALALPDVTKPFTLYVDERKGVARGVLTQTLGPWRRPVAYLSKKLDPVASGWPVCLKAIAAVAILVKDADKLTLGQNITVIAPHALENIVRQPPDRWMTNARMTHYQSLLLTERVTFAPPAALNPATLLPEETDEPVTHDCHQLLIEETGVRKDLTDIPLTGEVLTWFTDGSSYVVEGKRMAGAAVVDGTRTIWASSLPEGTSAQKAELMALTQALRLAEGKSINIYTDSRYAFATAHVHGAIYKQRGWLTSAGREIKNKEEILSLLEALHLPKRLAIIHCPGHQKAKDPISRGNQMADRVAKQAAQGVNLLAGKRTADGSEFEKRTADGSEFESPKKKAKVE

SEQ ID NO: 137 - protein, 2099 aa, synthetic construct
MPAAKRVKLDGGDKKYSIGLDIGTNSVGWAVITDEYKVPSKKFKVLGNTDRHSIKKNLIGALLFDSGETAEATRLKRTARRRYTRRKNRICYLQEIFSNEMAKVDDSFFHRLEESFLVEEDKKHERHPIFGNIVDEVAYHEKYPTIYHLRKKLVDSTDKADLRLIYLALAHMIKFRGHFLIEGDLNPDNSDVDKLFIQLVQTYNQLFEENPINASGVDAKAILSARLSKSRRLENLIAQLPGEKKNGLFGNLIALSLGLTPNFKSNFDLAEDAKLQLSKDTYDDDLDNLLAQIGDQYADLFLAAKNLSDAILLSDILRVNTEITKAPLSASMIKRYDEHHQDLTLLKALVRQQLPEKYKEIFFDQSKNGYAGYIDGGASQEEFYKFIKPILEKMDGTEELLVKLNREDLLRKQRTFDNGSIPHQIHLGELHAILRRQEDFYPFLKDNREKIEKILTFRIPYYVGPLARGNSRFAWMTRKSEETITPWNFEEVVDKGASAQSFIERMTNFDKNLPNEKVLPKHSLLYEYFTVYNELTKVKYVTEGMRKPAFLSGEQKKAIVDLLFKTNRKVTVKQLKEDYFKKIECFDSVEISGVEDRFNASLGTYHDLLKIIKDKDFLDNEENEDILEDIVLTLTLFEDREMIEERLKTYAHLFDDKVMKQLKRRRYTGWGRLSRKLINGIRDKQSGKTILDFLKSDGFANRNFMQLIHDDSLTFKEDIQKAQVSGQGDSLHEHIANLAGSPAIKKGILQTVKVVDELVKVMGRHKPENIVIEMARENQTTQKGQKNSRERMKRIEEGIKELGSQILKEHPVENTQLQNEKLYLYYLQNGRDMYVDQELDINRLSDYDVDHIVPQSFLKDDSIDNKVLTRSDKARGKSDNVPSEEVVKKMKNYWRQLLNAKLITQRKFDNLTKAERGGLSELDKAGFIKRQLVETRQITKHVAQILDSRMNTKYDENDKLIREVKVITLKSKLVSDFRKDFQFYKVREINNYHHAHDAYLNAVVGTALIKKYPKLESEFVYGDYKVYDVRKMIAKSEQEIGKATAKYFFYSNIMNFFKTEITLANGEIRKRPLIETNGETGEIVWDKGRDFATVRKVLSMPQVNIVKKTEVQTGGFSKESILPKRNSDKLIARKKDWDPKKYGGFDSPTVAYSVLVVAKVEKGKSKKLKSVKELLGITIMERSSFEKNPIDFLEAKGYKEVKKDLIIKLPKYSLFELENGRKRMLASAGELQKGNELALPSKYVNFLYLASHYEKLKGSPEDNEQKQLFVEQHKHYLDEIIEQISEFSKRVILADANLDKVLSAYNKHRDKPIREQAENIIHLFTLTNLGAPAAFKYFDTTIDRKRYTSTKEVLDATLIHQSITGLYETRIDLSQLGGDGGEAAAKEAAAKEAAAKEAAAKGGTLQLDDEYRLYSPLVKPDQNIQFWLEQFPQAWAETAGMGLAKQVPPQVIQLKASATPVSVRQYPLSKEAQEGIRPHVQRLIQQGILVPVQSPWNTPLLPVRKPGTNDYRPVQDLREVNKRVQDIHPTVPNPYNLLCALPPQRSWYTVLDLKDAFFCLRLHPTSQPLFAFEWRDPGTGRTGQLTWTRLPQGFKNSPTIFNEALHRDLANFRIQHPQVTLLQYVDDLLLAGATKQDCLEGTKALLLELSDLGYRASAKKAQICRREVTYLGYSLRDGQRWLTEARKKTVVQIPAPTTAKQVREFLGTAGFCRLWIPGFATLAAPLYPLTKPKGEFSWAPEHQKAFDAIKKALLSAPALALPDVTKPFTLYVDERKGVARGVLTQTLGPWRRPVAYLSKKLDPVASGWPVCLKAIAAVAILVKDADKLTLGQNITVIAPHALENIVRQPPDRWMTNARMTHYQSLLLTERVTFAPPAALNPATLLPEETDEPVTHDCHQLLIEETGVRKDLTDIPLTGEVLTWFTDGSSYVVEGKRMAGAAVVDGTRTIWASSLPEGTSAQKAELMALTQALRLAEGKSINIYTDSRYAFATAHVHGAIYKQRGWLTSAGREIKNKEEILSLLEALHLPKRLAIIHCPGHQKAKDPISRGNQMADRVAKQAAQGVNLLAGKRTADGSEFEKRTADGSEFESPKKKAKVE

SEQ ID NO: 138 - protein, 2090 aa, synthetic construct
MPAAKRVKLDGGDKKYSIGLDIGTNSVGWAVITDEYKVPSKKFKVLGNTDRHSIKKNLIGALLFDSGETAEATRLKRTARRRYTRRKNRICYLQEIFSNEMAKVDDSFFHRLEESFLVEEDKKHERHPIFGNIVDEVAYHEKYPTIYHLRKKLVDSTDKADLRLIYLALAHMIKFRGHFLIEGDLNPDNSDVDKLFIQLVQTYNQLFEENPINASGVDAKAILSARLSKSRRLENLIAQLPGEKKNGLFGNLIALSLGLTPNFKSNFDLAEDAKLQLSKDTYDDDLDNLLAQIGDQYADLFLAAKNLSDAILLSDILRVNTEITKAPLSASMIKRYDEHHQDLTLLKALVRQQLPEKYKEIFFDQSKNGYAGYIDGGASQEEFYKFIKPILEKMDGTEELLVKLNREDLLRKQRTFDNGSIPHQIHLGELHAILRRQEDFYPFLKDNREKIEKILTFRIPYYVGPLARGNSRFAWMTRKSEETITPWNFEEVVDKGASAQSFIERMTNFDKNLPNEKVLPKHSLLYEYFTVYNELTKVKYVTEGMRKPAFLSGEQKKAIVDLLFKTNRKVTVKQLKEDYFKKIECFDSVEISGVEDRFNASLGTYHDLLKIIKDKDFLDNEENEDILEDIVLTLTLFEDREMIEERLKTYAHLFDDKVMKQLKRRRYTGWGRLSRKLINGIRDKQSGKTILDFLKSDGFANRNFMQLIHDDSLTFKEDIQKAQVSGQGDSLHEHIANLAGSPAIKKGILQTVKVVDELVKVMGRHKPENIVIEMARENQTTQKGQKNSRERMKRIEEGIKELGSQILKEHPVENTQLQNEKLYLYYLQNGRDMYVDQELDINRLSDYDVDHIVPQSFLKDDSIDNKVLTRSDKARGKSDNVPSEEVVKKMKNYWRQLLNAKLITQRKFDNLTKAERGGLSELDKAGFIKRQLVETRQITKHVAQILDSRMNTKYDENDKLIREVKVITLKSKLVSDFRKDFQFYKVREINNYHHAHDAYLNAVVGTALIKKYPKLESEFVYGDYKVYDVRKMIAKSEQEIGKATAKYFFYSNIMNFFKTEITLANGEIRKRPLIETNGETGEIVWDKGRDFATVRKVLSMPQVNIVKKTEVQTGGFSKESILPKRNSDKLIARKKDWDPKKYGGFDSPTVAYSVLVVAKVEKGKSKKLKSVKELLGITIMERSSFEKNPIDFLEAKGYKEVKKDLIIKLPKYSLFELENGRKRMLASAGELQKGNELALPSKYVNFLYLASHYEKLKGSPEDNEQKQLFVEQHKHYLDEIIEQISEFSKRVILADANLDKVLSAYNKHRDKPIREQAENIIHLFTLTNLGAPAAFKYFDTTIDRKRYTSTKEVLDATLIHQSITGLYETRIDLSQLGGDGGPAPGGSEAAAKGGTLQLDDEYRLYSPLVKPDQNIQFWLEQFPQAWAETAGMGLAKQVPPQVIQLKASATPVSVRQYPLSKEAQEGIRPHVQRLIQQGILVPVQSPWNTPLLPVRKPGTNDYRPVQDLREVNKRVQDIHPTVPNPYNLLCALPPQRSWYTVLDLKDAFFCLRLHPTSQPLFAFEWRDPGTGRTGQLTWTRLPQGFKNSPTIFNEALHRDLANFRIQHPQVTLLQYVDDLLLAGATKQDCLEGTKALLLELSDLGYRASAKKAQICRREVTYLGYSLRDGQRWLTEARKKTVVQIPAPTTAKQVREFLGTAGFCRLWIPGFATLAAPLYPLTKPKGEFSWAPEHQKAFDAIKKALLSAPALALPDVTKPFTLYVDERKGVARGVLTQTLGPWRRPVAYLSKKLDPVASGWPVCLKAIAAVAILVKDADKLTLGQNITVIAPHALENIVRQPPDRWMTNARMTHYQSLLLTERVTFAPPAALNPATLLPEETDEPVTHDCHQLLIEETGVRKDLTDIPLTGEVLTWFTDGSSYVVEGKRMAGAAVVDGTRTIWASSLPEGTSAQKAELMALTQALRLAEGKSINIYTDSRYAFATAHVHGAIYKQRGWLTSAGREIKNKEEILSLLEALHLPKRLAIIHCPGHQKAKDPISRGNQMADRVAKQAAQGVNLLAGKRTADGSEFEKRTADGSEFESPKKKAKVE

SEQ ID NO: 139 - protein, 2090 aa, synthetic construct
MPAAKRVKLDGGDKKYSIGLDIGTNSVGWAVITDEYKVPSKKFKVLGNTDRHSIKKNLIGALLFDSGETAEATRLKRTARRRYTRRKNRICYLQEIFSNEMAKVDDSFFHRLEESFLVEEDKKHERHPIFGNIVDEVAYHEKYPTIYHLRKKLVDSTDKADLRLIYLALAHMIKFRGHFLIEGDLNPDNSDVDKLFIQLVQTYNQLFEENPINASGVDAKAILSARLSKSRRLENLIAQLPGEKKNGLFGNLIALSLGLTPNFKSNFDLAEDAKLQLSKDTYDDDLDNLLAQIGDQYADLFLAAKNLSDAILLSDILRVNTEITKAPLSASMIKRYDEHHQDLTLLKALVRQQLPEKYKEIFFDQSKNGYAGYIDGGASQEEFYKFIKPILEKMDGTEELLVKLNREDLLRKQRTFDNGSIPHQIHLGELHAILRRQEDFYPFLKDNREKIEKILTFRIPYYVGPLARGNSRFAWMTRKSEETITPWNFEEVVDKGASAQSFIERMTNFDKNLPNEKVLPKHSLLYEYFTVYNELTKVKYVTEGMRKPAFLSGEQKKAIVDLLFKTNRKVTVKQLKEDYFKKIECFDSVEISGVEDRFNASLGTYHDLLKIIKDKDFLDNEENEDILEDIVLTLTLFEDREMIEERLKTYAHLFDDKVMKQLKRRRYTGWGRLSRKLINGIRDKQSGKTILDFLKSDGFANRNFMQLIHDDSLTFKEDIQKAQVSGQGDSLHEHIANLAGSPAIKKGILQTVKVVDELVKVMGRHKPENIVIEMARENQTTQKGQKNSRERMKRIEEGIKELGSQILKEHPVENTQLQNEKLYLYYLQNGRDMYVDQELDINRLSDYDVDHIVPQSFLKDDSIDNKVLTRSDKARGKSDNVPSEEVVKKMKNYWRQLLNAKLITQRKFDNLTKAERGGLSELDKAGFIKRQLVETRQITKHVAQILDSRMNTKYDENDKLIREVKVITLKSKLVSDFRKDFQFYKVREINNYHHAHDAYLNAVVGTALIKKYPKLESEFVYGDYKVYDVRKMIAKSEQEIGKATAKYFFYSNIMNFFKTEITLANGEIRKRPLIETNGETGEIVWDKGRDFATVRKVLSMPQVNIVKKTEVQTGGFSKESILPKRNSDKLIARKKDWDPKKYGGFDSPTVAYSVLVVAKVEKGKSKKLKSVKELLGITIMERSSFEKNPIDFLEAKGYKEVKKDLIIKLPKYSLFELENGRKRMLASAGELQKGNELALPSKYVNFLYLASHYEKLKGSPEDNEQKQLFVEQHKHYLDEIIEQISEFSKRVILADANLDKVLSAYNKHRDKPIREQAENIIHLFTLTNLGAPAAFKYFDTTIDRKRYTSTKEVLDATLIHQSITGLYETRIDLSQLGGDGGGGSGSSEAAAKGGTLQLDDEYRLYSPLVKPDQNIQFWLEQFPQAWAETAGMGLAKQVPPQVIQLKASATPVSVRQYPLSKEAQEGIRPHVQRLIQQGILVPVQSPWNTPLLPVRKPGTNDYRPVQDLREVNKRVQDIHPTVPNPYNLLCALPPQRSWYTVLDLKDAFFCLRLHPTSQPLFAFEWRDPGTGRTGQLTWTRLPQGFKNSPTIFNEALHRDLANFRIQHPQVTLLQYVDDLLLAGATKQDCLEGTKALLLELSDLGYRASAKKAQICRREVTYLGYSLRDGQRWLTEARKKTVVQIPAPTTAKQVREFLGTAGFCRLWIPGFATLAAPLYPLTKPKGEFSWAPEHQKAFDAIKKALLSAPALALPDVTKPFTLYVDERKGVARGVLTQTLGPWRRPVAYLSKKLDPVASGWPVCLKAIAAVAILVKDADKLTLGQNITVIAPHALENIVRQPPDRWMTNARMTHYQSLLLTERVTFAPPAALNPATLLPEETDEPVTHDCHQLLIEETGVRKDLTDIPLTGEVLTWFTDGSSYVVEGKRMAGAAVVDGTRTIWASSLPEGTSAQKAELMALTQALRLAEGKSINIYTDSRYAFATAHVHGAIYKQRGWLTSAGREIKNKEEILSLLEALHLPKRLAIIHCPGHQKAKDPISRGNQMADRVAKQAAQGVNLLAGKRTADGSEFEKRTADGSEFESPKKKAKVE

SEQ ID NO: 140 - protein, 2112 aa, synthetic construct
MPAAKRVKLDGGDKKYSIGLDIGTNSVGWAVITDEYKVPSKKFKVLGNTDRHSIKKNLIGALLFDSGETAEATRLKRTARRRYTRRKNRICYLQEIFSNEMAKVDDSFFHRLEESFLVEEDKKHERHPIFGNIVDEVAYHEKYPTIYHLRKKLVDSTDKADLRLIYLALAHMIKFRGHFLIEGDLNPDNSDVDKLFIQLVQTYNQLFEENPINASGVDAKAILSARLSKSRRLENLIAQLPGEKKNGLFGNLIALSLGLTPNFKSNFDLAEDAKLQLSKDTYDDDLDNLLAQIGDQYADLFLAAKNLSDAILLSDILRVNTEITKAPLSASMIKRYDEHHQDLTLLKALVRQQLPEKYKEIFFDQSKNGYAGYIDGGASQEEFYKFIKPILEKMDGTEELLVKLNREDLLRKQRTFDNGSIPHQIHLGELHAILRRQEDFYPFLKDNREKIEKILTFRIPYYVGPLARGNSRFAWMTRKSEETITPWNFEEVVDKGASAQSFIERMTNFDKNLPNEKVLPKHSLLYEYFTVYNELTKVKYVTEGMRKPAFLSGEQKKAIVDLLFKTNRKVTVKQLKEDYFKKIECFDSVEISGVEDRFNASLGTYHDLLKIIKDKDFLDNEENEDILEDIVLTLTLFEDREMIEERLKTYAHLFDDKVMKQLKRRRYTGWGRLSRKLINGIRDKQSGKTILDFLKSDGFANRNFMQLIHDDSLTFKEDIQKAQVSGQGDSLHEHIANLAGSPAIKKGILQTVKVVDELVKVMGRHKPENIVIEMARENQTTQKGQKNSRERMKRIEEGIKELGSQILKEHPVENTQLQNEKLYLYYLQNGRDMYVDQELDINRLSDYDVDHIVPQSFLKDDSIDNKVLTRSDKARGKSDNVPSEEVVKKMKNYWRQLLNAKLITQRKFDNLTKAERGGLSELDKAGFIKRQLVETRQITKHVAQILDSRMNTKYDENDKLIREVKVITLKSKLVSDFRKDFQFYKVREINNYHHAHDAYLNAVVGTALIKKYPKLESEFVYGDYKVYDVRKMIAKSEQEIGKATAKYFFYSNIMNFFKTEITLANGEIRKRPLIETNGETGEIVWDKGRDFATVRKVLSMPQVNIVKKTEVQTGGFSKESILPKRNSDKLIARKKDWDPKKYGGFDSPTVAYSVLVVAKVEKGKSKKLKSVKELLGITIMERSSFEKNPIDFLEAKGYKEVKKDLIIKLPKYSLFELENGRKRMLASAGELQKGNELALPSKYVNFLYLASHYEKLKGSPEDNEQKQLFVEQHKHYLDEIIEQISEFSKRVILADANLDKVLSAYNKHRDKPIREQAENIIHLFTLTNLGAPAAFKYFDTTIDRKRYTSTKEVLDATLIHQSITGLYETRIDLSQLGGDGGSGGSSGGSSGSETPGTSESATPESSGGSSGGSSGGTLQLDDEYRLYSPLVKPDQNIQFWLEQFPQAWAETAGMGLAKQVPPQVIQLKASATPVSVRQYPLSKEAQEGIRPHVQRLIQQGILVPVQSPWNTPLLPVRKPGTNDYRPVQDLREVNKRVQDIHPTVPNPYNLLCALPPQRSWYTVLDLKDAFFCLRLHPTSQPLFAFEWRDPGTGRTGQLTWTRLPQGFKNSPTIFNEALHRDLANFRIQHPQVTLLQYVDDLLLAGATKQDCLEGTKALLLELSDLGYRASAKKAQICRREVTYLGYSLRDGQRWLTEARKKTVVQIPAPTTAKQVREFLGTAGFCRLWIPGFATLAAPLYPLTKPKGEFSWAPEHQKAFDAIKKALLSAPALALPDVTKPFTLYVDERKGVARGVLTQTLGPWRRPVAYLSKKLDPVASGWPVCLKAIAAVAILVKDADKLTLGQNITVIAPHALENIVRQPPDRWMTNARMTHYQSLLLTERVTFAPPAALNPATLLPEETDEPVTHDCHQLLIEETGVRKDLTDIPLTGEVLTWFTDGSSYVVEGKRMAGAAVVDGTRTIWASSLPEGTSAQKAELMALTQALRLAEGKSINIYTDSRYAFATAHVHGAIYKQRGWLTSAGREIKNKEEILSLLEALHLPKRLAIIHCPGHQKAKDPISRGNQMADRVAKQAAQGVNLLAGKRTADGSEFEKRTADGSEFESPKKKAKVE

SEQ ID NO: 141 - protein, 2090 aa, synthetic construct
MPAAKRVKLDGGDKKYSIGLDIGTNSVGWAVITDEYKVPSKKFKVLGNTDRHSIKKNLIGALLFDSGETAEATRLKRTARRRYTRRKNRICYLQEIFSNEMAKVDDSFFHRLEESFLVEEDKKHERHPIFGNIVDEVAYHEKYPTIYHLRKKLVDSTDKADLRLIYLALAHMIKFRGHFLIEGDLNPDNSDVDKLFIQLVQTYNQLFEENPINASGVDAKAILSARLSKSRRLENLIAQLPGEKKNGLFGNLIALSLGLTPNFKSNFDLAEDAKLQLSKDTYDDDLDNLLAQIGDQYADLFLAAKNLSDAILLSDILRVNTEITKAPLSASMIKRYDEHHQDLTLLKALVRQQLPEKYKEIFFDQSKNGYAGYIDGGASQEEFYKFIKPILEKMDGTEELLVKLNREDLLRKQRTFDNGSIPHQIHLGELHAILRRQEDFYPFLKDNREKIEKILTFRIPYYVGPLARGNSRFAWMTRKSEETITPWNFEEVVDKGASAQSFIERMTNFDKNLPNEKVLPKHSLLYEYFTVYNELTKVKYVTEGMRKPAFLSGEQKKAIVDLLFKTNRKVTVKQLKEDYFKKIECFDSVEISGVEDRFNASLGTYHDLLKIIKDKDFLDNEENEDILEDIVLTLTLFEDREMIEERLKTYAHLFDDKVMKQLKRRRYTGWGRLSRKLINGIRDKQSGKTILDFLKSDGFANRNFMQLIHDDSLTFKEDIQKAQVSGQGDSLHEHIANLAGSPAIKKGILQTVKVVDELVKVMGRHKPENIVIEMARENQTTQKGQKNSRERMKRIEEGIKELGSQILKEHPVENTQLQNEKLYLYYLQNGRDMYVDQELDINRLSDYDVDHIVPQSFLKDDSIDNKVLTRSDKARGKSDNVPSEEVVKKMKNYWRQLLNAKLITQRKFDNLTKAERGGLSELDKAGFIKRQLVETRQITKHVAQILDSRMNTKYDENDKLIREVKVITLKSKLVSDFRKDFQFYKVREINNYHHAHDAYLNAVVGTALIKKYPKLESEFVYGDYKVYDVRKMIAKSEQEIGKATAKYFFYSNIMNFFKTEITLANGEIRKRPLIETNGETGEIVWDKGRDFATVRKVLSMPQVNIVKKTEVQTGGFSKESILPKRNSDKLIARKKDWDPKKYGGFDSPTVAYSVLVVAKVEKGKSKKLKSVKELLGITIMERSSFEKNPIDFLEAKGYKEVKKDLIIKLPKYSLFELENGRKRMLASAGELQKGNELALPSKYVNFLYLASHYEKLKGSPEDNEQKQLFVEQHKHYLDEIIEQISEFSKRVILADANLDKVLSAYNKHRDKPIREQAENIIHLFTLTNLGAPAAFKYFDTTIDRKRYTSTKEVLDATLIHQSITGLYETRIDLSQLGGDGGEAAAKGGSPAPGGTLQLDDEYRLYSPLVKPDQNIQFWLEQFPQAWAETAGMGLAKQVPPQVIQLKASATPVSVRQYPLSKEAQEGIRPHVQRLIQQGILVPVQSPWNTPLLPVRKPGTNDYRPVQDLREVNKRVQDIHPTVPNPYNLLCALPPQRSWYTVLDLKDAFFCLRLHPTSQPLFAFEWRDPGTGRTGQLTWTRLPQGFKNSPTIFNEALHRDLANFRIQHPQVTLLQYVDDLLLAGATKQDCLEGTKALLLELSDLGYRASAKKAQICRREVTYLGYSLRDGQRWLTEARKKTVVQIPAPTTAKQVREFLGTAGFCRLWIPGFATLAAPLYPLTKPKGEFSWAPEHQKAFDAIKKALLSAPALALPDVTKPFTLYVDERKGVARGVLTQTLGPWRRPVAYLSKKLDPVASGWPVCLKAIAAVAILVKDADKLTLGQNITVIAPHALENIVRQPPDRWMTNARMTHYQSLLLTERVTFAPPAALNPATLLPEETDEPVTHDCHQLLIEETGVRKDLTDIPLTGEVLTWFTDGSSYVVEGKRMAGAAVVDGTRTIWASSLPEGTSAQKAELMALTQALRLAEGKSINIYTDSRYAFATAHVHGAIYKQRGWLTSAGREIKNKEEILSLLEALHLPKRLAIIHCPGHQKAKDPISRGNQMADRVAKQAAQGVNLLAGKRTADGSEFEKRTADGSEFESPKKKAKVE

SEQ ID NO: 142 - protein, 2097 aa, synthetic construct
MPAAKRVKLDGGDKKYSIGLDIGTNSVGWAVITDEYKVPSKKFKVLGNTDRHSIKKNLIGALLFDSGETAEATRLKRTARRRYTRRKNRICYLQEIFSNEMAKVDDSFFHRLEESFLVEEDKKHERHPIFGNIVDEVAYHEKYPTIYHLRKKLVDSTDKADLRLIYLALAHMIKFRGHFLIEGDLNPDNSDVDKLFIQLVQTYNQLFEENPINASGVDAKAILSARLSKSRRLENLIAQLPGEKKNGLFGNLIALSLGLTPNFKSNFDLAEDAKLQLSKDTYDDDLDNLLAQIGDQYADLFLAAKNLSDAILLSDILRVNTEITKAPLSASMIKRYDEHHQDLTLLKALVRQQLPEKYKEIFFDQSKNGYAGYIDGGASQEEFYKFIKPILEKMDGTEELLVKLNREDLLRKQRTFDNGSIPHQIHLGELHAILRRQEDFYPFLKDNREKIEKILTFRIPYYVGPLARGNSRFAWMTRKSEETITPWNFEEVVDKGASAQSFIERMTNFDKNLPNEKVLPKHSLLYEYFTVYNELTKVKYVTEGMRKPAFLSGEQKKAIVDLLFKTNRKVTVKQLKEDYFKKIECFDSVEISGVEDRFNASLGTYHDLLKIIKDKDFLDNEENEDILEDIVLTLTLFEDREMIEERLKTYAHLFDDKVMKQLKRRRYTGWGRLSRKLINGIRDKQSGKTILDFLKSDGFANRNFMQLIHDDSLTFKEDIQKAQVSGQGDSLHEHIANLAGSPAIKKGILQTVKVVDELVKVMGRHKPENIVIEMARENQTTQKGQKNSRERMKRIEEGIKELGSQILKEHPVENTQLQNEKLYLYYLQNGRDMYVDQELDINRLSDYDVDHIVPQSFLKDDSIDNKVLTRSDKARGKSDNVPSEEVVKKMKNYWRQLLNAKLITQRKFDNLTKAERGGLSELDKAGFIKRQLVETRQITKHVAQILDSRMNTKYDENDKLIREVKVITLKSKLVSDFRKDFQFYKVREINNYHHAHDAYLNAVVGTALIKKYPKLESEFVYGDYKVYDVRKMIAKSEQEIGKATAKYFFYSNIMNFFKTEITLANGEIRKRPLIETNGETGEIVWDKGRDFATVRKVLSMPQVNIVKKTEVQTGGFSKESILPKRNSDKLIARKKDWDPKKYGGFDSPTVAYSVLVVAKVEKGKSKKLKSVKELLGITIMERSSFEKNPIDFLEAKGYKEVKKDLIIKLPKYSLFELENGRKRMLASAGELQKGNELALPSKYVNFLYLASHYEKLKGSPEDNEQKQLFVEQHKHYLDEIIEQISEFSKRVILADANLDKVLSAYNKHRDKPIREQAENIIHLFTLTNLGAPAAFKYFDTTIDRKRYTSTKEVLDATLIHQSITGLYETRIDLSQLGGDGGGGSGGSGGSGGSGGSGGSGGTLQLDDEYRLYSPLVKPDQNIQFWLEQFPQAWAETAGMGLAKQVPPQVIQLKASATPVSVRQYPLSKEAQEGIRPHVQRLIQQGILVPVQSPWNTPLLPVRKPGTNDYRPVQDLREVNKRVQDIHPTVPNPYNLLCALPPQRSWYTVLDLKDAFFCLRLHPTSQPLFAFEWRDPGTGRTGQLTWTRLPQGFKNSPTIFNEALHRDLANFRIQHPQVTLLQYVDDLLLAGATKQDCLEGTKALLLELSDLGYRASAKKAQICRREVTYLGYSLRDGQRWLTEARKKTVVQIPAPTTAKQVREFLGTAGFCRLWIPGFATLAAPLYPLTKPKGEFSWAPEHQKAFDAIKKALLSAPALALPDVTKPFTLYVDERKGVARGVLTQTLGPWRRPVAYLSKKLDPVASGWPVCLKAIAAVAILVKDADKLTLGQNITVIAPHALENIVRQPPDRWMTNARMTHYQSLLLTERVTFAPPAALNPATLLPEETDEPVTHDCHQLLIEETGVRKDLTDIPLTGEVLTWFTDGSSYVVEGKRMAGAAVVDGTRTIWASSLPEGTSAQKAELMALTQALRLAEGKSINIYTDSRYAFATAHVHGAIYKQRGWLTSAGREIKNKEEILSLLEALHLPKRLAIIHCPGHQKAKDPISRGNQMADRVAKQAAQGVNLLAGKRTADGSEFEKRTADGSEFESPKKKAKVE

SEQ ID NO: 143 - protein, 2085 aa, synthetic construct
MPAAKRVKLDGGDKKYSIGLDIGTNSVGWAVITDEYKVPSKKFKVLGNTDRHSIKKNLIGALLFDSGETAEATRLKRTARRRYTRRKNRICYLQEIFSNEMAKVDDSFFHRLEESFLVEEDKKHERHPIFGNIVDEVAYHEKYPTIYHLRKKLVDSTDKADLRLIYLALAHMIKFRGHFLIEGDLNPDNSDVDKLFIQLVQTYNQLFEENPINASGVDAKAILSARLSKSRRLENLIAQLPGEKKNGLFGNLIALSLGLTPNFKSNFDLAEDAKLQLSKDTYDDDLDNLLAQIGDQYADLFLAAKNLSDAILLSDILRVNTEITKAPLSASMIKRYDEHHQDLTLLKALVRQQLPEKYKEIFFDQSKNGYAGYIDGGASQEEFYKFIKPILEKMDGTEELLVKLNREDLLRKQRTFDNGSIPHQIHLGELHAILRRQEDFYPFLKDNREKIEKILTFRIPYYVGPLARGNSRFAWMTRKSEETITPWNFEEVVDKGASAQSFIERMTNFDKNLPNEKVLPKHSLLYEYFTVYNELTKVKYVTEGMRKPAFLSGEQKKAIVDLLFKTNRKVTVKQLKEDYFKKIECFDSVEISGVEDRFNASLGTYHDLLKIIKDKDFLDNEENEDILEDIVLTLTLFEDREMIEERLKTYAHLFDDKVMKQLKRRRYTGWGRLSRKLINGIRDKQSGKTILDFLKSDGFANRNFMQLIHDDSLTFKEDIQKAQVSGQGDSLHEHIANLAGSPAIKKGILQTVKVVDELVKVMGRHKPENIVIEMARENQTTQKGQKNSRERMKRIEEGIKELGSQILKEHPVENTQLQNEKLYLYYLQNGRDMYVDQELDINRLSDYDVDHIVPQSFLKDDSIDNKVLTRSDKARGKSDNVPSEEVVKKMKNYWRQLLNAKLITQRKFDNLTKAERGGLSELDKAGFIKRQLVETRQITKHVAQILDSRMNTKYDENDKLIREVKVITLKSKLVSDFRKDFQFYKVREINNYHHAHDAYLNAVVGTALIKKYPKLESEFVYGDYKVYDVRKMIAKSEQEIGKATAKYFFYSNIMNFFKTEITLANGEIRKRPLIETNGETGEIVWDKGRDFATVRKVLSMPQVNIVKKTEVQTGGFSKESILPKRNSDKLIARKKDWDPKKYGGFDSPTVAYSVLVVAKVEKGKSKKLKSVKELLGITIMERSSFEKNPIDFLEAKGYKEVKKDLIIKLPKYSLFELENGRKRMLASAGELQKGNELALPSKYVNFLYLASHYEKLKGSPEDNEQKQLFVEQHKHYLDEIIEQISEFSKRVILADANLDKVLSAYNKHRDKPIREQAENIIHLFTLTNLGAPAAFKYFDTTIDRKRYTSTKEVLDATLIHQSITGLYETRIDLSQLGGDGGGGGPAPGGTLQLDDEYRLYSPLVKPDQNIQFWLEQFPQAWAETAGMGLAKQVPPQVIQLKASATPVSVRQYPLSKEAQEGIRPHVQRLIQQGILVPVQSPWNTPLLPVRKPGTNDYRPVQDLREVNKRVQDIHPTVPNPYNLLCALPPQRSWYTVLDLKDAFFCLRLHPTSQPLFAFEWRDPGTGRTGQLTWTRLPQGFKNSPTIFNEALHRDLANFRIQHPQVTLLQYVDDLLLAGATKQDCLEGTKALLLELSDLGYRASAKKAQICRREVTYLGYSLRDGQRWLTEARKKTVVQIPAPTTAKQVREFLGTAGFCRLWIPGFATLAAPLYPLTKPKGEFSWAPEHQKAFDAIKKALLSAPALALPDVTKPFTLYVDERKGVARGVLTQTLGPWRRPVAYLSKKLDPVASGWPVCLKAIAAVAILVKDADKLTLGQNITVIAPHALENIVRQPPDRWMTNARMTHYQSLLLTERVTFAPPAALNPATLLPEETDEPVTHDCHQLLIEETGVRKDLTDIPLTGEVLTWFTDGSSYVVEGKRMAGAAVVDGTRTIWASSLPEGTSAQKAELMALTQALRLAEGKSINIYTDSRYAFATAHVHGAIYKQRGWLTSAGREIKNKEEILSLLEALHLPKRLAIIHCPGHQKAKDPISRGNQMADRVAKQAAQGVNLLAGKRTADGSEFEKRTADGSEFESPKKKAKVE

SEQ ID NO: 144 - protein, 2088 aa, synthetic construct
MPAAKRVKLDGGDKKYSIGLDIGTNSVGWAVITDEYKVPSKKFKVLGNTDRHSIKKNLIGALLFDSGETAEATRLKRTARRRYTRRKNRICYLQEIFSNEMAKVDDSFFHRLEESFLVEEDKKHERHPIFGNIVDEVAYHEKYPTIYHLRKKLVDSTDKADLRLIYLALAHMIKFRGHFLIEGDLNPDNSDVDKLFIQLVQTYNQLFEENPINASGVDAKAILSARLSKSRRLENLIAQLPGEKKNGLFGNLIALSLGLTPNFKSNFDLAEDAKLQLSKDTYDDDLDNLLAQIGDQYADLFLAAKNLSDAILLSDILRVNTEITKAPLSASMIKRYDEHHQDLTLLKALVRQQLPEKYKEIFFDQSKNGYAGYIDGGASQEEFYKFIKPILEKMDGTEELLVKLNREDLLRKQRTFDNGSIPHQIHLGELHAILRRQEDFYPFLKDNREKIEKILTFRIPYYVGPLARGNSRFAWMTRKSEETITPWNFEEVVDKGASAQSFIERMTNFDKNLPNEKVLPKHSLLYEYFTVYNELTKVKYVTEGMRKPAFLSGEQKKAIVDLLFKTNRKVTVKQLKEDYFKKIECFDSVEISGVEDRFNASLGTYHDLLKIIKDKDFLDNEENEDILEDIVLTLTLFEDREMIEERLKTYAHLFDDKVMKQLKRRRYTGWGRLSRKLINGIRDKQSGKTILDFLKSDGFANRNFMQLIHDDSLTFKEDIQKAQVSGQGDSLHEHIANLAGSPAIKKGILQTVKVVDELVKVMGRHKPENIVIEMARENQTTQKGQKNSRERMKRIEEGIKELGSQILKEHPVENTQLQNEKLYLYYLQNGRDMYVDQELDINRLSDYDVDHIVPQSFLKDDSIDNKVLTRSDKARGKSDNVPSEEVVKKMKNYWRQLLNAKLITQRKFDNLTKAERGGLSELDKAGFIKRQLVETRQITKHVAQILDSRMNTKYDENDKLIREVKVITLKSKLVSDFRKDFQFYKVREINNYHHAHDAYLNAVVGTALIKKYPKLESEFVYGDYKVYDVRKMIAKSEQEIGKATAKYFFYSNIMNFFKTEITLANGEIRKRPLIETNGETGEIVWDKGRDFATVRKVLSMPQVNIVKKTEVQTGGFSKESILPKRNSDKLIARKKDWDPKKYGGFDSPTVAYSVLVVAKVEKGKSKKLKSVKELLGITIMERSSFEKNPIDFLEAKGYKEVKKDLIIKLPKYSLFELENGRKRMLASAGELQKGNELALPSKYVNFLYLASHYEKLKGSPEDNEQKQLFVEQHKHYLDEIIEQISEFSKRVILADANLDKVLSAYNKHRDKPIREQAENIIHLFTLTNLGAPAAFKYFDTTIDRKRYTSTKEVLDATLIHQSITGLYETRIDLSQLGGDGGGGSGSSGGGGGTLQLDDEYRLYSPLVKPDQNIQFWLEQFPQAWAETAGMGLAKQVPPQVIQLKASATPVSVRQYPLSKEAQEGIRPHVQRLIQQGILVPVQSPWNTPLLPVRKPGTNDYRPVQDLREVNKRVQDIHPTVPNPYNLLCALPPQRSWYTVLDLKDAFFCLRLHPTSQPLFAFEWRDPGTGRTGQLTWTRLPQGFKNSPTIFNEALHRDLANFRIQHPQVTLLQYVDDLLLAGATKQDCLEGTKALLLELSDLGYRASAKKAQICRREVTYLGYSLRDGQRWLTEARKKTVVQIPAPTTAKQVREFLGTAGFCRLWIPGFATLAAPLYPLTKPKGEFSWAPEHQKAFDAIKKALLSAPALALPDVTKPFTLYVDERKGVARGVLTQTLGPWRRPVAYLSKKLDPVASGWPVCLKAIAAVAILVKDADKLTLGQNITVIAPHALENIVRQPPDRWMTNARMTHYQSLLLTERVTFAPPAALNPATLLPEETDEPVTHDCHQLLIEETGVRKDLTDIPLTGEVLTWFTDGSSYVVEGKRMAGAAVVDGTRTIWASSLPEGTSAQKAELMALTQALRLAEGKSINIYTDSRYAFATAHVHGAIYKQRGWLTSAGREIKNKEEILSLLEALHLPKRLAIIHCPGHQKAKDPISRGNQMADRVAKQAAQGVNLLAGKRTADGSEFEKRTADGSEFESPKKKAKVE

SEQ ID NO: 145 - protein, 2091 aa, synthetic construct
MPAAKRVKLDGGDKKYSIGLDIGTNSVGWAVITDEYKVPSKKFKVLGNTDRHSIKKNLIGALLFDSGETAEATRLKRTARRRYTRRKNRICYLQEIFSNEMAKVDDSFFHRLEESFLVEEDKKHERHPIFGNIVDEVAYHEKYPTIYHLRKKLVDSTDKADLRLIYLALAHMIKFRGHFLIEGDLNPDNSDVDKLFIQLVQTYNQLFEENPINASGVDAKAILSARLSKSRRLENLIAQLPGEKKNGLFGNLIALSLGLTPNFKSNFDLAEDAKLQLSKDTYDDDLDNLLAQIGDQYADLFLAAKNLSDAILLSDILRVNTEITKAPLSASMIKRYDEHHQDLTLLKALVRQQLPEKYKEIFFDQSKNGYAGYIDGGASQEEFYKFIKPILEKMDGTEELLVKLNREDLLRKQRTFDNGSIPHQIHLGELHAILRRQEDFYPFLKDNREKIEKILTFRIPYYVGPLARGNSRFAWMTRKSEETITPWNFEEVVDKGASAQSFIERMTNFDKNLPNEKVLPKHSLLYEYFTVYNELTKVKYVTEGMRKPAFLSGEQKKAIVDLLFKTNRKVTVKQLKEDYFKKIECFDSVEISGVEDRFNASLGTYHDLLKIIKDKDFLDNEENEDILEDIVLTLTLFEDREMIEERLKTYAHLFDDKVMKQLKRRRYTGWGRLSRKLINGIRDKQSGKTILDFLKSDGFANRNFMQLIHDDSLTFKEDIQKAQVSGQGDSLHEHIANLAGSPAIKKGILQTVKVVDELVKVMGRHKPENIVIEMARENQTTQKGQKNSRERMKRIEEGIKELGSQILKEHPVENTQLQNEKLYLYYLQNGRDMYVDQELDINRLSDYDVDHIVPQSFLKDDSIDNKVLTRSDKARGKSDNVPSEEVVKKMKNYWRQLLNAKLITQRKFDNLTKAERGGLSELDKAGFIKRQLVETRQITKHVAQILDSRMNTKYDENDKLIREVKVITLKSKLVSDFRKDFQFYKVREINNYHHAHDAYLNAVVGTALIKKYPKLESEFVYGDYKVYDVRKMIAKSEQEIGKATAKYFFYSNIMNFFKTEITLANGEIRKRPLIETNGETGEIVWDKGRDFATVRKVLSMPQVNIVKKTEVQTGGFSKESILPKRNSDKLIARKKDWDPKKYGGFDSPTVAYSVLVVAKVEKGKSKKLKSVKELLGITIMERSSFEKNPIDFLEAKGYKEVKKDLIIKLPKYSLFELENGRKRMLASAGELQKGNELALPSKYVNFLYLASHYEKLKGSPEDNEQKQLFVEQHKHYLDEIIEQISEFSKRVILADANLDKVLSAYNKHRDKPIREQAENIIHLFTLTNLGAPAAFKYFDTTIDRKRYTSTKEVLDATLIHQSITGLYETRIDLSQLGGDGGGGSGGSGGSGGSGGTLQLDDEYRLYSPLVKPDQNIQFWLEQFPQAWAETAGMGLAKQVPPQVIQLKASATPVSVRQYPLSKEAQEGIRPHVQRLIQQGILVPVQSPWNTPLLPVRKPGTNDYRPVQDLREVNKRVQDIHPTVPNPYNLLCALPPQRSWYTVLDLKDAFFCLRLHPTSQPLFAFEWRDPGTGRTGQLTWTRLPQGFKNSPTIFNEALHRDLANFRIQHPQVTLLQYVDDLLLAGATKQDCLEGTKALLLELSDLGYRASAKKAQICRREVTYLGYSLRDGQRWLTEARKKTVVQIPAPTTAKQVREFLGTAGFCRLWIPGFATLAAPLYPLTKPKGEFSWAPEHQKAFDAIKKALLSAPALALPDVTKPFTLYVDERKGVARGVLTQTLGPWRRPVAYLSKKLDPVASGWPVCLKAIAAVAILVKDADKLTLGQNITVIAPHALENIVRQPPDRWMTNARMTHYQSLLLTERVTFAPPAALNPATLLPEETDEPVTHDCHQLLIEETGVRKDLTDIPLTGEVLTWFTDGSSYVVEGKRMAGAAVVDGTRTIWASSLPEGTSAQKAELMALTQALRLAEGKSINIYTDSRYAFATAHVHGAIYKQRGWLTSAGREIKNKEEILSLLEALHLPKRLAIIHCPGHQKAKDPISRGNQMADRVAKQAAQGVNLLAGKRTADGSEFEKRTADGSEFESPKKKAKVE

SEQ ID NO: 146 - protein, 2090 aa, synthetic construct
MPAAKRVKLDGGDKKYSIGLDIGTNSVGWAVITDEYKVPSKKFKVLGNTDRHSIKKNLIGALLFDSGETAEATRLKRTARRRYTRRKNRICYLQEIFSNEMAKVDDSFFHRLEESFLVEEDKKHERHPIFGNIVDEVAYHEKYPTIYHLRKKLVDSTDKADLRLIYLALAHMIKFRGHFLIEGDLNPDNSDVDKLFIQLVQTYNQLFEENPINASGVDAKAILSARLSKSRRLENLIAQLPGEKKNGLFGNLIALSLGLTPNFKSNFDLAEDAKLQLSKDTYDDDLDNLLAQIGDQYADLFLAAKNLSDAILLSDILRVNTEITKAPLSASMIKRYDEHHQDLTLLKALVRQQLPEKYKEIFFDQSKNGYAGYIDGGASQEEFYKFIKPILEKMDGTEELLVKLNREDLLRKQRTFDNGSIPHQIHLGELHAILRRQEDFYPFLKDNREKIEKILTFRIPYYVGPLARGNSRFAWMTRKSEETITPWNFEEVVDKGASAQSFIERMTNFDKNLPNEKVLPKHSLLYEYFTVYNELTKVKYVTEGMRKPAFLSGEQKKAIVDLLFKTNRKVTVKQLKEDYFKKIECFDSVEISGVEDRFNASLGTYHDLLKIIKDKDFLDNEENEDILEDIVLTLTLFEDREMIEERLKTYAHLFDDKVMKQLKRRRYTGWGRLSRKLINGIRDKQSGKTILDFLKSDGFANRNFMQLIHDDSLTFKEDIQKAQVSGQGDSLHEHIANLAGSPAIKKGILQTVKVVDELVKVMGRHKPENIVIEMARENQTTQKGQKNSRERMKRIEEGIKELGSQILKEHPVENTQLQNEKLYLYYLQNGRDMYVDQELDINRLSDYDVDHIVPQSFLKDDSIDNKVLTRSDKARGKSDNVPSEEVVKKMKNYWRQLLNAKLITQRKFDNLTKAERGGLSELDKAGFIKRQLVETRQITKHVAQILDSRMNTKYDENDKLIREVKVITLKSKLVSDFRKDFQFYKVREINNYHHAHDAYLNAVVGTALIKKYPKLESEFVYGDYKVYDVRKMIAKSEQEIGKATAKYFFYSNIMNFFKTEITLANGEIRKRPLIETNGETGEIVWDKGRDFATVRKVLSMPQVNIVKKTEVQTGGFSKESILPKRNSDKLIARKKDWDPKKYGGFDSPTVAYSVLVVAKVEKGKSKKLKSVKELLGITIMERSSFEKNPIDFLEAKGYKEVKKDLIIKLPKYSLFELENGRKRMLASAGELQKGNELALPSKYVNFLYLASHYEKLKGSPEDNEQKQLFVEQHKHYLDEIIEQISEFSKRVILADANLDKVLSAYNKHRDKPIREQAENIIHLFTLTNLGAPAAFKYFDTTIDRKRYTSTKEVLDATLIHQSITGLYETRIDLSQLGGDGGEAAAKGGGGSSGGTLQLDDEYRLYSPLVKPDQNIQFWLEQFPQAWAETAGMGLAKQVPPQVIQLKASATPVSVRQYPLSKEAQEGIRPHVQRLIQQGILVPVQSPWNTPLLPVRKPGTNDYRPVQDLREVNKRVQDIHPTVPNPYNLLCALPPQRSWYTVLDLKDAFFCLRLHPTSQPLFAFEWRDPGTGRTGQLTWTRLPQGFKNSPTIFNEALHRDLANFRIQHPQVTLLQYVDDLLLAGATKQDCLEGTKALLLELSDLGYRASAKKAQICRREVTYLGYSLRDGQRWLTEARKKTVVQIPAPTTAKQVREFLGTAGFCRLWIPGFATLAAPLYPLTKPKGEFSWAPEHQKAFDAIKKALLSAPALALPDVTKPFTLYVDERKGVARGVLTQTLGPWRRPVAYLSKKLDPVASGWPVCLKAIAAVAILVKDADKLTLGQNITVIAPHALENIVRQPPDRWMTNARMTHYQSLLLTERVTFAPPAALNPATLLPEETDEPVTHDCHQLLIEETGVRKDLTDIPLTGEVLTWFTDGSSYVVEGKRMAGAAVVDGTRTIWASSLPEGTSAQKAELMALTQALRLAEGKSINIYTDSRYAFATAHVHGAIYKQRGWLTSAGREIKNKEEILSLLEALHLPKRLAIIHCPGHQKAKDPISRGNQMADRVAKQAAQGVNLLAGKRTADGSEFEKRTADGSEFESPKKKAKVE

SEQ ID NO: 147 - protein, 2084 aa, synthetic construct
MPAAKRVKLDGGDKKYSIGLDIGTNSVGWAVITDEYKVPSKKFKVLGNTDRHSIKKNLIGALLFDSGETAEATRLKRTARRRYTRRKNRICYLQEIFSNEMAKVDDSFFHRLEESFLVEEDKKHERHPIFGNIVDEVAYHEKYPTIYHLRKKLVDSTDKADLRLIYLALAHMIKFRGHFLIEGDLNPDNSDVDKLFIQLVQTYNQLFEENPINASGVDAKAILSARLSKSRRLENLIAQLPGEKKNGLFGNLIALSLGLTPNFKSNFDLAEDAKLQLSKDTYDDDLDNLLAQIGDQYADLFLAAKNLSDAILLSDILRVNTEITKAPLSASMIKRYDEHHQDLTLLKALVRQQLPEKYKEIFFDQSKNGYAGYIDGGASQEEFYKFIKPILEKMDGTEELLVKLNREDLLRKQRTFDNGSIPHQIHLGELHAILRRQEDFYPFLKDNREKIEKILTFRIPYYVGPLARGNSRFAWMTRKSEETITPWNFEEVVDKGASAQSFIERMTNFDKNLPNEKVLPKHSLLYEYFTVYNELTKVKYVTEGMRKPAFLSGEQKKAIVDLLFKTNRKVTVKQLKEDYFKKIECFDSVEISGVEDRFNASLGTYHDLLKIIKDKDFLDNEENEDILEDIVLTLTLFEDREMIEERLKTYAHLFDDKVMKQLKRRRYTGWGRLSRKLINGIRDKQSGKTILDFLKSDGFANRNFMQLIHDDSLTFKEDIQKAQVSGQGDSLHEHIANLAGSPAIKKGILQTVKVVDELVKVMGRHKPENIVIEMARENQTTQKGQKNSRERMKRIEEGIKELGSQILKEHPVENTQLQNEKLYLYYLQNGRDMYVDQELDINRLSDYDVDHIVPQSFLKDDSIDNKVLTRSDKARGKSDNVPSEEVVKKMKNYWRQLLNAKLITQRKFDNLTKAERGGLSELDKAGFIKRQLVETRQITKHVAQILDSRMNTKYDENDKLIREVKVITLKSKLVSDFRKDFQFYKVREINNYHHAHDAYLNAVVGTALIKKYPKLESEFVYGDYKVYDVRKMIAKSEQEIGKATAKYFFYSNIMNFFKTEITLANGEIRKRPLIETNGETGEIVWDKGRDFATVRKVLSMPQVNIVKKTEVQTGGFSKESILPKRNSDKLIARKKDWDPKKYGGFDSPTVAYSVLVVAKVEKGKSKKLKSVKELLGITIMERSSFEKNPIDFLEAKGYKEVKKDLIIKLPKYSLFELENGRKRMLASAGELQKGNELALPSKYVNFLYLASHYEKLKGSPEDNEQKQLFVEQHKHYLDEIIEQISEFSKRVILADANLDKVLSAYNKHRDKPIREQAENIIHLFTLTNLGAPAAFKYFDTTIDRKRYTSTKEVLDATLIHQSITGLYETRIDLSQLGGDGGGGGGSGGTLQLDDEYRLYSPLVKPDQNIQFWLEQFPQAWAETAGMGLAKQVPPQVIQLKASATPVSVRQYPLSKEAQEGIRPHVQRLIQQGILVPVQSPWNTPLLPVRKPGTNDYRPVQDLREVNKRVQDIHPTVPNPYNLLCALPPQRSWYTVLDLKDAFFCLRLHPTSQPLFAFEWRDPGTGRTGQLTWTRLPQGFKNSPTIFNEALHRDLANFRIQHPQVTLLQYVDDLLLAGATKQDCLEGTKALLLELSDLGYRASAKKAQICRREVTYLGYSLRDGQRWLTEARKKTVVQIPAPTTAKQVREFLGTAGFCRLWIPGFATLAAPLYPLTKPKGEFSWAPEHQKAFDAIKKALLSAPALALPDVTKPFTLYVDERKGVARGVLTQTLGPWRRPVAYLSKKLDPVASGWPVCLKAIAAVAILVKDADKLTLGQNITVIAPHALENIVRQPPDRWMTNARMTHYQSLLLTERVTFAPPAALNPATLLPEETDEPVTHDCHQLLIEETGVRKDLTDIPLTGEVLTWFTDGSSYVVEGKRMAGAAVVDGTRTIWASSLPEGTSAQKAELMALTQALRLAEGKSINIYTDSRYAFATAHVHGAIYKQRGWLTSAGREIKNKEEILSLLEALHLPKRLAIIHCPGHQKAKDPISRGNQMADRVAKQAAQGVNLLAGKRTADGSEFEKRTADGSEFESPKKKAKVE

SEQ ID NO: 148 - protein, 2085 aa, synthetic construct
MPAAKRVKLDGGDKKYSIGLDIGTNSVGWAVITDEYKVPSKKFKVLGNTDRHSIKKNLIGALLFDSGETAEATRLKRTARRRYTRRKNRICYLQEIFSNEMAKVDDSFFHRLEESFLVEEDKKHERHPIFGNIVDEVAYHEKYPTIYHLRKKLVDSTDKADLRLIYLALAHMIKFRGHFLIEGDLNPDNSDVDKLFIQLVQTYNQLFEENPINASGVDAKAILSARLSKSRRLENLIAQLPGEKKNGLFGNLIALSLGLTPNFKSNFDLAEDAKLQLSKDTYDDDLDNLLAQIGDQYADLFLAAKNLSDAILLSDILRVNTEITKAPLSASMIKRYDEHHQDLTLLKALVRQQLPEKYKEIFFDQSKNGYAGYIDGGASQEEFYKFIKPILEKMDGTEELLVKLNREDLLRKQRTFDNGSIPHQIHLGELHAILRRQEDFYPFLKDNREKIEKILTFRIPYYVGPLARGNSRFAWMTRKSEETITPWNFEEVVDKGASAQSFIERMTNFDKNLPNEKVLPKHSLLYEYFTVYNELTKVKYVTEGMRKPAFLSGEQKKAIVDLLFKTNRKVTVKQLKEDYFKKIECFDSVEISGVEDRFNASLGTYHDLLKIIKDKDFLDNEENEDILEDIVLTLTLFEDREMIEERLKTYAHLFDDKVMKQLKRRRYTGWGRLSRKLINGIRDKQSGKTILDFLKSDGFANRNFMQLIHDDSLTFKEDIQKAQVSGQGDSLHEHIANLAGSPAIKKGILQTVKVVDELVKVMGRHKPENIVIEMARENQTTQKGQKNSRERMKRIEEGIKELGSQILKEHPVENTQLQNEKLYLYYLQNGRDMYVDQELDINRLSDYDVDHIVPQSFLKDDSIDNKVLTRSDKARGKSDNVPSEEVVKKMKNYWRQLLNAKLITQRKFDNLTKAERGGLSELDKAGFIKRQLVETRQITKHVAQILDSRMNTKYDENDKLIREVKVITLKSKLVSDFRKDFQFYKVREINNYHHAHDAYLNAVVGTALIKKYPKLESEFVYGDYKVYDVRKMIAKSEQEIGKATAKYFFYSNIMNFFKTEITLANGEIRKRPLIETNGETGEIVWDKGRDFATVRKVLSMPQVNIVKKTEVQTGGFSKESILPKRNSDKLIARKKDWDPKKYGGFDSPTVAYSVLVVAKVEKGKSKKLKSVKELLGITIMERSSFEKNPIDFLEAKGYKEVKKDLIIKLPKYSLFELENGRKRMLASAGELQKGNELALPSKYVNFLYLASHYEKLKGSPEDNEQKQLFVEQHKHYLDEIIEQISEFSKRVILADANLDKVLSAYNKHRDKPIREQAENIIHLFTLTNLGAPAAFKYFDTTIDRKRYTSTKEVLDATLIHQSITGLYETRIDLSQLGGDGGGSSPAPGGTLQLDDEYRLYSPLVKPDQNIQFWLEQFPQAWAETAGMGLAKQVPPQVIQLKASATPVSVRQYPLSKEAQEGIRPHVQRLIQQGILVPVQSPWNTPLLPVRKPGTNDYRPVQDLREVNKRVQDIHPTVPNPYNLLCALPPQRSWYTVLDLKDAFFCLRLHPTSQPLFAFEWRDPGTGRTGQLTWTRLPQGFKNSPTIFNEALHRDLANFRIQHPQVTLLQYVDDLLLAGATKQDCLEGTKALLLELSDLGYRASAKKAQICRREVTYLGYSLRDGQRWLTEARKKTVVQIPAPTTAKQVREFLGTAGFCRLWIPGFATLAAPLYPLTKPKGEFSWAPEHQKAFDAIKKALLSAPALALPDVTKPFTLYVDERKGVARGVLTQTLGPWRRPVAYLSKKLDPVASGWPVCLKAIAAVAILVKDADKLTLGQNITVIAPHALENIVRQPPDRWMTNARMTHYQSLLLTERVTFAPPAALNPATLLPEETDEPVTHDCHQLLIEETGVRKDLTDIPLTGEVLTWFTDGSSYVVEGKRMAGAAVVDGTRTIWASSLPEGTSAQKAELMALTQALRLAEGKSINIYTDSRYAFATAHVHGAIYKQRGWLTSAGREIKNKEEILSLLEALHLPKRLAIIHCPGHQKAKDPISRGNQMADRVAKQAAQGVNLLAGKRTADGSEFEKRTADGSEFESPKKKAKVE

SEQ ID NO: 149 - protein, 2083 aa, synthetic construct
MPAAKRVKLDGGDKKYSIGLDIGTNSVGWAVITDEYKVPSKKFKVLGNTDRHSIKKNLIGALLFDSGETAEATRLKRTARRRYTRRKNRICYLQEIFSNEMAKVDDSFFHRLEESFLVEEDKKHERHPIFGNIVDEVAYHEKYPTIYHLRKKLVDSTDKADLRLIYLALAHMIKFRGHFLIEGDLNPDNSDVDKLFIQLVQTYNQLFEENPINASGVDAKAILSARLSKSRRLENLIAQLPGEKKNGLFGNLIALSLGLTPNFKSNFDLAEDAKLQLSKDTYDDDLDNLLAQIGDQYADLFLAAKNLSDAILLSDILRVNTEITKAPLSASMIKRYDEHHQDLTLLKALVRQQLPEKYKEIFFDQSKNGYAGYIDGGASQEEFYKFIKPILEKMDGTEELLVKLNREDLLRKQRTFDNGSIPHQIHLGELHAILRRQEDFYPFLKDNREKIEKILTFRIPYYVGPLARGNSRFAWMTRKSEETITPWNFEEVVDKGASAQSFIERMTNFDKNLPNEKVLPKHSLLYEYFTVYNELTKVKYVTEGMRKPAFLSGEQKKAIVDLLFKTNRKVTVKQLKEDYFKKIECFDSVEISGVEDRFNASLGTYHDLLKIIKDKDFLDNEENEDILEDIVLTLTLFEDREMIEERLKTYAHLFDDKVMKQLKRRRYTGWGRLSRKLINGIRDKQSGKTILDFLKSDGFANRNFMQLIHDDSLTFKEDIQKAQVSGQGDSLHEHIANLAGSPAIKKGILQTVKVVDELVKVMGRHKPENIVIEMARENQTTQKGQKNSRERMKRIEEGIKELGSQILKEHPVENTQLQNEKLYLYYLQNGRDMYVDQELDINRLSDYDVDHIVPQSFLKDDSIDNKVLTRSDKARGKSDNVPSEEVVKKMKNYWRQLLNAKLITQRKFDNLTKAERGGLSELDKAGFIKRQLVETRQITKHVAQILDSRMNTKYDENDKLIREVKVITLKSKLVSDFRKDFQFYKVREINNYHHAHDAYLNAVVGTALIKKYPKLESEFVYGDYKVYDVRKMIAKSEQEIGKATAKYFFYSNIMNFFKTEITLANGEIRKRPLIETNGETGEIVWDKGRDFATVRKVLSMPQVNIVKKTEVQTGGFSKESILPKRNSDKLIARKKDWDPKKYGGFDSPTVAYSVLVVAKVEKGKSKKLKSVKELLGITIMERSSFEKNPIDFLEAKGYKEVKKDLIIKLPKYSLFELENGRKRMLASAGELQKGNELALPSKYVNFLYLASHYEKLKGSPEDNEQKQLFVEQHKHYLDEIIEQISEFSKRVILADANLDKVLSAYNKHRDKPIREQAENIIHLFTLTNLGAPAAFKYFDTTIDRKRYTSTKEVLDATLIHQSITGLYETRIDLSQLGGDGGGGGGGGTLQLDDEYRLYSPLVKPDQNIQFWLEQFPQAWAETAGMGLAKQVPPQVIQLKASATPVSVRQYPLSKEAQEGIRPHVQRLIQQGILVPVQSPWNTPLLPVRKPGTNDYRPVQDLREVNKRVQDIHPTVPNPYNLLCALPPQRSWYTVLDLKDAFFCLRLHPTSQPLFAFEWRDPGTGRTGQLTWTRLPQGFKNSPTIFNEALHRDLANFRIQHPQVTLLQYVDDLLLAGATKQDCLEGTKALLLELSDLGYRASAKKAQICRREVTYLGYSLRDGQRWLTEARKKTVVQIPAPTTAKQVREFLGTAGFCRLWIPGFATLAAPLYPLTKPKGEFSWAPEHQKAFDAIKKALLSAPALALPDVTKPFTLYVDERKGVARGVLTQTLGPWRRPVAYLSKKLDPVASGWPVCLKAIAAVAILVKDADKLTLGQNITVIAPHALENIVRQPPDRWMTNARMTHYQSLLLTERVTFAPPAALNPATLLPEETDEPVTHDCHQLLIEETGVRKDLTDIPLTGEVLTWFTDGSSYVVEGKRMAGAAVVDGTRTIWASSLPEGTSAQKAELMALTQALRLAEGKSINIYTDSRYAFATAHVHGAIYKQRGWLTSAGREIKNKEEILSLLEALHLPKRLAIIHCPGHQKAKDPISRGNQMADRVAKQAAQGVNLLAGKRTADGSEFEKRTADGSEFESPKKKAKVE

SEQ ID NO: 150 - protein, 2104 aa, synthetic construct
MPAAKRVKLDGGDKKYSIGLDIGTNSVGWAVITDEYKVPSKKFKVLGNTDRHSIKKNLIGALLFDSGETAEATRLKRTARRRYTRRKNRICYLQEIFSNEMAKVDDSFFHRLEESFLVEEDKKHERHPIFGNIVDEVAYHEKYPTIYHLRKKLVDSTDKADLRLIYLALAHMIKFRGHFLIEGDLNPDNSDVDKLFIQLVQTYNQLFEENPINASGVDAKAILSARLSKSRRLENLIAQLPGEKKNGLFGNLIALSLGLTPNFKSNFDLAEDAKLQLSKDTYDDDLDNLLAQIGDQYADLFLAAKNLSDAILLSDILRVNTEITKAPLSASMIKRYDEHHQDLTLLKALVRQQLPEKYKEIFFDQSKNGYAGYIDGGASQEEFYKFIKPILEKMDGTEELLVKLNREDLLRKQRTFDNGSIPHQIHLGELHAILRRQEDFYPFLKDNREKIEKILTFRIPYYVGPLARGNSRFAWMTRKSEETITPWNFEEVVDKGASAQSFIERMTNFDKNLPNEKVLPKHSLLYEYFTVYNELTKVKYVTEGMRKPAFLSGEQKKAIVDLLFKTNRKVTVKQLKEDYFKKIECFDSVEISGVEDRFNASLGTYHDLLKIIKDKDFLDNEENEDILEDIVLTLTLFEDREMIEERLKTYAHLFDDKVMKQLKRRRYTGWGRLSRKLINGIRDKQSGKTILDFLKSDGFANRNFMQLIHDDSLTFKEDIQKAQVSGQGDSLHEHIANLAGSPAIKKGILQTVKVVDELVKVMGRHKPENIVIEMARENQTTQKGQKNSRERMKRIEEGIKELGSQILKEHPVENTQLQNEKLYLYYLQNGRDMYVDQELDINRLSDYDVDHIVPQSFLKDDSIDNKVLTRSDKARGKSDNVPSEEVVKKMKNYWRQLLNAKLITQRKFDNLTKAERGGLSELDKAGFIKRQLVETRQITKHVAQILDSRMNTKYDENDKLIREVKVITLKSKLVSDFRKDFQFYKVREINNYHHAHDAYLNAVVGTALIKKYPKLESEFVYGDYKVYDVRKMIAKSEQEIGKATAKYFFYSNIMNFFKTEITLANGEIRKRPLIETNGETGEIVWDKGRDFATVRKVLSMPQVNIVKKTEVQTGGFSKESILPKRNSDKLIARKKDWDPKKYGGFDSPTVAYSVLVVAKVEKGKSKKLKSVKELLGITIMERSSFEKNPIDFLEAKGYKEVKKDLIIKLPKYSLFELENGRKRMLASAGELQKGNELALPSKYVNFLYLASHYEKLKGSPEDNEQKQLFVEQHKHYLDEIIEQISEFSKRVILADANLDKVLSAYNKHRDKPIREQAENIIHLFTLTNLGAPAAFKYFDTTIDRKRYTSTKEVLDATLIHQSITGLYETRIDLSQLGGDGGEAAAKEAAAKEAAAKEAAAKEAAAKGGTLQLDDEYRLYSPLVKPDQNIQFWLEQFPQAWAETAGMGLAKQVPPQVIQLKASATPVSVRQYPLSKEAQEGIRPHVQRLIQQGILVPVQSPWNTPLLPVRKPGTNDYRPVQDLREVNKRVQDIHPTVPNPYNLLCALPPQRSWYTVLDLKDAFFCLRLHPTSQPLFAFEWRDPGTGRTGQLTWTRLPQGFKNSPTIFNEALHRDLANFRIQHPQVTLLQYVDDLLLAGATKQDCLEGTKALLLELSDLGYRASAKKAQICRREVTYLGYSLRDGQRWLTEARKKTVVQIPAPTTAKQVREFLGTAGFCRLWIPGFATLAAPLYPLTKPKGEFSWAPEHQKAFDAIKKALLSAPALALPDVTKPFTLYVDERKGVARGVLTQTLGPWRRPVAYLSKKLDPVASGWPVCLKAIAAVAILVKDADKLTLGQNITVIAPHALENIVRQPPDRWMTNARMTHYQSLLLTERVTFAPPAALNPATLLPEETDEPVTHDCHQLLIEETGVRKDLTDIPLTGEVLTWFTDGSSYVVEGKRMAGAAVVDGTRTIWASSLPEGTSAQKAELMALTQALRLAEGKSINIYTDSRYAFATAHVHGAIYKQRGWLTSAGREIKNKEEILSLLEALHLPKRLAIIHCPGHQKAKDPISRGNQMADRVAKQAAQGVNLLAGKRTADGSEFEKRTADGSEFESPKKKAKVE

SEQ ID NO: 151 - protein, 2084 aa, synthetic construct
MPAAKRVKLDGGDKKYSIGLDIGTNSVGWAVITDEYKVPSKKFKVLGNTDRHSIKKNLIGALLFDSGETAEATRLKRTARRRYTRRKNRICYLQEIFSNEMAKVDDSFFHRLEESFLVEEDKKHERHPIFGNIVDEVAYHEKYPTIYHLRKKLVDSTDKADLRLIYLALAHMIKFRGHFLIEGDLNPDNSDVDKLFIQLVQTYNQLFEENPINASGVDAKAILSARLSKSRRLENLIAQLPGEKKNGLFGNLIALSLGLTPNFKSNFDLAEDAKLQLSKDTYDDDLDNLLAQIGDQYADLFLAAKNLSDAILLSDILRVNTEITKAPLSASMIKRYDEHHQDLTLLKALVRQQLPEKYKEIFFDQSKNGYAGYIDGGASQEEFYKFIKPILEKMDGTEELLVKLNREDLLRKQRTFDNGSIPHQIHLGELHAILRRQEDFYPFLKDNREKIEKILTFRIPYYVGPLARGNSRFAWMTRKSEETITPWNFEEVVDKGASAQSFIERMTNFDKNLPNEKVLPKHSLLYEYFTVYNELTKVKYVTEGMRKPAFLSGEQKKAIVDLLFKTNRKVTVKQLKEDYFKKIECFDSVEISGVEDRFNASLGTYHDLLKIIKDKDFLDNEENEDILEDIVLTLTLFEDREMIEERLKTYAHLFDDKVMKQLKRRRYTGWGRLSRKLINGIRDKQSGKTILDFLKSDGFANRNFMQLIHDDSLTFKEDIQKAQVSGQGDSLHEHIANLAGSPAIKKGILQTVKVVDELVKVMGRHKPENIVIEMARENQTTQKGQKNSRERMKRIEEGIKELGSQILKEHPVENTQLQNEKLYLYYLQNGRDMYVDQELDINRLSDYDVDHIVPQSFLKDDSIDNKVLTRSDKARGKSDNVPSEEVVKKMKNYWRQLLNAKLITQRKFDNLTKAERGGLSELDKAGFIKRQLVETRQITKHVAQILDSRMNTKYDENDKLIREVKVITLKSKLVSDFRKDFQFYKVREINNYHHAHDAYLNAVVGTALIKKYPKLESEFVYGDYKVYDVRKMIAKSEQEIGKATAKYFFYSNIMNFFKTEITLANGEIRKRPLIETNGETGEIVWDKGRDFATVRKVLSMPQVNIVKKTEVQTGGFSKESILPKRNSDKLIARKKDWDPKKYGGFDSPTVAYSVLVVAKVEKGKSKKLKSVKELLGITIMERSSFEKNPIDFLEAKGYKEVKKDLIIKLPKYSLFELENGRKRMLASAGELQKGNELALPSKYVNFLYLASHYEKLKGSPEDNEQKQLFVEQHKHYLDEIIEQISEFSKRVILADANLDKVLSAYNKHRDKPIREQAENIIHLFTLTNLGAPAAFKYFDTTIDRKRYTSTKEVLDATLIHQSITGLYETRIDLSQLGGDGGEAAAKGGTLQLDDEYRLYSPLVKPDQNIQFWLEQFPQAWAETAGMGLAKQVPPQVIQLKASATPVSVRQYPLSKEAQEGIRPHVQRLIQQGILVPVQSPWNTPLLPVRKPGTNDYRPVQDLREVNKRVQDIHPTVPNPYNLLCALPPQRSWYTVLDLKDAFFCLRLHPTSQPLFAFEWRDPGTGRTGQLTWTRLPQGFKNSPTIFNEALHRDLANFRIQHPQVTLLQYVDDLLLAGATKQDCLEGTKALLLELSDLGYRASAKKAQICRREVTYLGYSLRDGQRWLTEARKKTVVQIPAPTTAKQVREFLGTAGFCRLWIPGFATLAAPLYPLTKPKGEFSWAPEHQKAFDAIKKALLSAPALALPDVTKPFTLYVDERKGVARGVLTQTLGPWRRPVAYLSKKLDPVASGWPVCLKAIAAVAILVKDADKLTLGQNITVIAPHALENIVRQPPDRWMTNARMTHYQSLLLTERVTFAPPAALNPATLLPEETDEPVTHDCHQLLIEETGVRKDLTDIPLTGEVLTWFTDGSSYVVEGKRMAGAAVVDGTRTIWASSLPEGTSAQKAELMALTQALRLAEGKSINIYTDSRYAFATAHVHGAIYKQRGWLTSAGREIKNKEEILSLLEALHLPKRLAIIHCPGHQKAKDPISRGNQMADRVAKQAAQGVNLLAGKRTADGSEFEKRTADGSEFESPKKKAKVE

SEQ ID NO: 152 - protein, 2086 aa, synthetic construct
MPAAKRVKLDGGDKKYSIGLDIGTNSVGWAVITDEYKVPSKKFKVLGNTDRHSIKKNLIGALLFDSGETAEATRLKRTARRRYTRRKNRICYLQEIFSNEMAKVDDSFFHRLEESFLVEEDKKHERHPIFGNIVDEVAYHEKYPTIYHLRKKLVDSTDKADLRLIYLALAHMIKFRGHFLIEGDLNPDNSDVDKLFIQLVQTYNQLFEENPINASGVDAKAILSARLSKSRRLENLIAQLPGEKKNGLFGNLIALSLGLTPNFKSNFDLAEDAKLQLSKDTYDDDLDNLLAQIGDQYADLFLAAKNLSDAILLSDILRVNTEITKAPLSASMIKRYDEHHQDLTLLKALVRQQLPEKYKEIFFDQSKNGYAGYIDGGASQEEFYKFIKPILEKMDGTEELLVKLNREDLLRKQRTFDNGSIPHQIHLGELHAILRRQEDFYPFLKDNREKIEKILTFRIPYYVGPLARGNSRFAWMTRKSEETITPWNFEEVVDKGASAQSFIERMTNFDKNLPNEKVLPKHSLLYEYFTVYNELTKVKYVTEGMRKPAFLSGEQKKAIVDLLFKTNRKVTVKQLKEDYFKKIECFDSVEISGVEDRFNASLGTYHDLLKIIKDKDFLDNEENEDILEDIVLTLTLFEDREMIEERLKTYAHLFDDKVMKQLKRRRYTGWGRLSRKLINGIRDKQSGKTILDFLKSDGFANRNFMQLIHDDSLTFKEDIQKAQVSGQGDSLHEHIANLAGSPAIKKGILQTVKVVDELVKVMGRHKPENIVIEMARENQTTQKGQKNSRERMKRIEEGIKELGSQILKEHPVENTQLQNEKLYLYYLQNGRDMYVDQELDINRLSDYDVDHIVPQSFLKDDSIDNKVLTRSDKARGKSDNVPSEEVVKKMKNYWRQLLNAKLITQRKFDNLTKAERGGLSELDKAGFIKRQLVETRQITKHVAQILDSRMNTKYDENDKLIREVKVITLKSKLVSDFRKDFQFYKVREINNYHHAHDAYLNAVVGTALIKKYPKLESEFVYGDYKVYDVRKMIAKSEQEIGKATAKYFFYSNIMNFFKTEITLANGEIRKRPLIETNGETGEIVWDKGRDFATVRKVLSMPQVNIVKKTEVQTGGFSKESILPKRNSDKLIARKKDWDPKKYGGFDSPTVAYSVLVVAKVEKGKSKKLKSVKELLGITIMERSSFEKNPIDFLEAKGYKEVKKDLIIKLPKYSLFELENGRKRMLASAGELQKGNELALPSKYVNFLYLASHYEKLKGSPEDNEQKQLFVEQHKHYLDEIIEQISEFSKRVILADANLDKVLSAYNKHRDKPIREQAENIIHLFTLTNLGAPAAFKYFDTTIDRKRYTSTKEVLDATLIHQSITGLYETRIDLSQLGGDGGGGGGGGGGGTLQLDDEYRLYSPLVKPDQNIQFWLEQFPQAWAETAGMGLAKQVPPQVIQLKASATPVSVRQYPLSKEAQEGIRPHVQRLIQQGILVPVQSPWNTPLLPVRKPGTNDYRPVQDLREVNKRVQDIHPTVPNPYNLLCALPPQRSWYTVLDLKDAFFCLRLHPTSQPLFAFEWRDPGTGRTGQLTWTRLPQGFKNSPTIFNEALHRDLANFRIQHPQVTLLQYVDDLLLAGATKQDCLEGTKALLLELSDLGYRASAKKAQICRREVTYLGYSLRDGQRWLTEARKKTVVQIPAPTTAKQVREFLGTAGFCRLWIPGFATLAAPLYPLTKPKGEFSWAPEHQKAFDAIKKALLSAPALALPDVTKPFTLYVDERKGVARGVLTQTLGPWRRPVAYLSKKLDPVASGWPVCLKAIAAVAILVKDADKLTLGQNITVIAPHALENIVRQPPDRWMTNARMTHYQSLLLTERVTFAPPAALNPATLLPEETDEPVTHDCHQLLIEETGVRKDLTDIPLTGEVLTWFTDGSSYVVEGKRMAGAAVVDGTRTIWASSLPEGTSAQKAELMALTQALRLAEGKSINIYTDSRYAFATAHVHGAIYKQRGWLTSAGREIKNKEEILSLLEALHLPKRLAIIHCPGHQKAKDPISRGNQMADRVAKQAAQGVNLLAGKRTADGSEFEKRTADGSEFESPKKKAKVE

SEQ ID NO: 153 - protein, 2091 aa, synthetic construct
MPAAKRVKLDGGDKKYSIGLDIGTNSVGWAVITDEYKVPSKKFKVLGNTDRHSIKKNLIGALLFDSGETAEATRLKRTARRRYTRRKNRICYLQEIFSNEMAKVDDSFFHRLEESFLVEEDKKHERHPIFGNIVDEVAYHEKYPTIYHLRKKLVDSTDKADLRLIYLALAHMIKFRGHFLIEGDLNPDNSDVDKLFIQLVQTYNQLFEENPINASGVDAKAILSARLSKSRRLENLIAQLPGEKKNGLFGNLIALSLGLTPNFKSNFDLAEDAKLQLSKDTYDDDLDNLLAQIGDQYADLFLAAKNLSDAILLSDILRVNTEITKAPLSASMIKRYDEHHQDLTLLKALVRQQLPEKYKEIFFDQSKNGYAGYIDGGASQEEFYKFIKPILEKMDGTEELLVKLNREDLLRKQRTFDNGSIPHQIHLGELHAILRRQEDFYPFLKDNREKIEKILTFRIPYYVGPLARGNSRFAWMTRKSEETITPWNFEEVVDKGASAQSFIERMTNFDKNLPNEKVLPKHSLLYEYFTVYNELTKVKYVTEGMRKPAFLSGEQKKAIVDLLFKTNRKVTVKQLKEDYFKKIECFDSVEISGVEDRFNASLGTYHDLLKIIKDKDFLDNEENEDILEDIVLTLTLFEDREMIEERLKTYAHLFDDKVMKQLKRRRYTGWGRLSRKLINGIRDKQSGKTILDFLKSDGFANRNFMQLIHDDSLTFKEDIQKAQVSGQGDSLHEHIANLAGSPAIKKGILQTVKVVDELVKVMGRHKPENIVIEMARENQTTQKGQKNSRERMKRIEEGIKELGSQILKEHPVENTQLQNEKLYLYYLQNGRDMYVDQELDINRLSDYDVDHIVPQSFLKDDSIDNKVLTRSDKARGKSDNVPSEEVVKKMKNYWRQLLNAKLITQRKFDNLTKAERGGLSELDKAGFIKRQLVETRQITKHVAQILDSRMNTKYDENDKLIREVKVITLKSKLVSDFRKDFQFYKVREINNYHHAHDAYLNAVVGTALIKKYPKLESEFVYGDYKVYDVRKMIAKSEQEIGKATAKYFFYSNIMNFFKTEITLANGEIRKRPLIETNGETGEIVWDKGRDFATVRKVLSMPQVNIVKKTEVQTGGFSKESILPKRNSDKLIARKKDWDPKKYGGFDSPTVAYSVLVVAKVEKGKSKKLKSVKELLGITIMERSSFEKNPIDFLEAKGYKEVKKDLIIKLPKYSLFELENGRKRMLASAGELQKGNELALPSKYVNFLYLASHYEKLKGSPEDNEQKQLFVEQHKHYLDEIIEQISEFSKRVILADANLDKVLSAYNKHRDKPIREQAENIIHLFTLTNLGAPAAFKYFDTTIDRKRYTSTKEVLDATLIHQSITGLYETRIDLSQLGGDGGGSAGSAAGSGEFGGTLQLDDEYRLYSPLVKPDQNIQFWLEQFPQAWAETAGMGLAKQVPPQVIQLKASATPVSVRQYPLSKEAQEGIRPHVQRLIQQGILVPVQSPWNTPLLPVRKPGTNDYRPVQDLREVNKRVQDIHPTVPNPYNLLCALPPQRSWYTVLDLKDAFFCLRLHPTSQPLFAFEWRDPGTGRTGQLTWTRLPQGFKNSPTIFNEALHRDLANFRIQHPQVTLLQYVDDLLLAGATKQDCLEGTKALLLELSDLGYRASAKKAQICRREVTYLGYSLRDGQRWLTEARKKTVVQIPAPTTAKQVREFLGTAGFCRLWIPGFATLAAPLYPLTKPKGEFSWAPEHQKAFDAIKKALLSAPALALPDVTKPFTLYVDERKGVARGVLTQTLGPWRRPVAYLSKKLDPVASGWPVCLKAIAAVAILVKDADKLTLGQNITVIAPHALENIVRQPPDRWMTNARMTHYQSLLLTERVTFAPPAALNPATLLPEETDEPVTHDCHQLLIEETGVRKDLTDIPLTGEVLTWFTDGSSYVVEGKRMAGAAVVDGTRTIWASSLPEGTSAQKAELMALTQALRLAEGKSINIYTDSRYAFATAHVHGAIYKQRGWLTSAGREIKNKEEILSLLEALHLPKRLAIIHCPGHQKAKDPISRGNQMADRVAKQAAQGVNLLAGKRTADGSEFEKRTADGSEFESPKKKAKVE

SEQ ID NO: 154 - protein, 2090 aa, synthetic construct
MPAAKRVKLDGGDKKYSIGLDIGTNSVGWAVITDEYKVPSKKFKVLGNTDRHSIKKNLIGALLFDSGETAEATRLKRTARRRYTRRKNRICYLQEIFSNEMAKVDDSFFHRLEESFLVEEDKKHERHPIFGNIVDEVAYHEKYPTIYHLRKKLVDSTDKADLRLIYLALAHMIKFRGHFLIEGDLNPDNSDVDKLFIQLVQTYNQLFEENPINASGVDAKAILSARLSKSRRLENLIAQLPGEKKNGLFGNLIALSLGLTPNFKSNFDLAEDAKLQLSKDTYDDDLDNLLAQIGDQYADLFLAAKNLSDAILLSDILRVNTEITKAPLSASMIKRYDEHHQDLTLLKALVRQQLPEKYKEIFFDQSKNGYAGYIDGGASQEEFYKFIKPILEKMDGTEELLVKLNREDLLRKQRTFDNGSIPHQIHLGELHAILRRQEDFYPFLKDNREKIEKILTFRIPYYVGPLARGNSRFAWMTRKSEETITPWNFEEVVDKGASAQSFIERMTNFDKNLPNEKVLPKHSLLYEYFTVYNELTKVKYVTEGMRKPAFLSGEQKKAIVDLLFKTNRKVTVKQLKEDYFKKIECFDSVEISGVEDRFNASLGTYHDLLKIIKDKDFLDNEENEDILEDIVLTLTLFEDREMIEERLKTYAHLFDDKVMKQLKRRRYTGWGRLSRKLINGIRDKQSGKTILDFLKSDGFANRNFMQLIHDDSLTFKEDIQKAQVSGQGDSLHEHIANLAGSPAIKKGILQTVKVVDELVKVMGRHKPENIVIEMARENQTTQKGQKNSRERMKRIEEGIKELGSQILKEHPVENTQLQNEKLYLYYLQNGRDMYVDQELDINRLSDYDVDHIVPQSFLKDDSIDNKVLTRSDKARGKSDNVPSEEVVKKMKNYWRQLLNAKLITQRKFDNLTKAERGGLSELDKAGFIKRQLVETRQITKHVAQILDSRMNTKYDENDKLIREVKVITLKSKLVSDFRKDFQFYKVREINNYHHAHDAYLNAVVGTALIKKYPKLESEFVYGDYKVYDVRKMIAKSEQEIGKATAKYFFYSNIMNFFKTEITLANGEIRKRPLIETNGETGEIVWDKGRDFATVRKVLSMPQVNIVKKTEVQTGGFSKESILPKRNSDKLIARKKDWDPKKYGGFDSPTVAYSVLVVAKVEKGKSKKLKSVKELLGITIMERSSFEKNPIDFLEAKGYKEVKKDLIIKLPKYSLFELENGRKRMLASAGELQKGNELALPSKYVNFLYLASHYEKLKGSPEDNEQKQLFVEQHKHYLDEIIEQISEFSKRVILADANLDKVLSAYNKHRDKPIREQAENIIHLFTLTNLGAPAAFKYFDTTIDRKRYTSTKEVLDATLIHQSITGLYETRIDLSQLGGDGGGGSEAAAKPAPGGTLQLDDEYRLYSPLVKPDQNIQFWLEQFPQAWAETAGMGLAKQVPPQVIQLKASATPVSVRQYPLSKEAQEGIRPHVQRLIQQGILVPVQSPWNTPLLPVRKPGTNDYRPVQDLREVNKRVQDIHPTVPNPYNLLCALPPQRSWYTVLDLKDAFFCLRLHPTSQPLFAFEWRDPGTGRTGQLTWTRLPQGFKNSPTIFNEALHRDLANFRIQHPQVTLLQYVDDLLLAGATKQDCLEGTKALLLELSDLGYRASAKKAQICRREVTYLGYSLRDGQRWLTEARKKTVVQIPAPTTAKQVREFLGTAGFCRLWIPGFATLAAPLYPLTKPKGEFSWAPEHQKAFDAIKKALLSAPALALPDVTKPFTLYVDERKGVARGVLTQTLGPWRRPVAYLSKKLDPVASGWPVCLKAIAAVAILVKDADKLTLGQNITVIAPHALENIVRQPPDRWMTNARMTHYQSLLLTERVTFAPPAALNPATLLPEETDEPVTHDCHQLLIEETGVRKDLTDIPLTGEVLTWFTDGSSYVVEGKRMAGAAVVDGTRTIWASSLPEGTSAQKAELMALTQALRLAEGKSINIYTDSRYAFATAHVHGAIYKQRGWLTSAGREIKNKEEILSLLEALHLPKRLAIIHCPGHQKAKDPISRGNQMADRVAKQAAQGVNLLAGKRTADGSEFEKRTADGSEFESPKKKAKVE

SEQ ID NO: 155 - protein, 2088 aa, synthetic construct
MPAAKRVKLDGGDKKYSIGLDIGTNSVGWAVITDEYKVPSKKFKVLGNTDRHSIKKNLIGALLFDSGETAEATRLKRTARRRYTRRKNRICYLQEIFSNEMAKVDDSFFHRLEESFLVEEDKKHERHPIFGNIVDEVAYHEKYPTIYHLRKKLVDSTDKADLRLIYLALAHMIKFRGHFLIEGDLNPDNSDVDKLFIQLVQTYNQLFEENPINASGVDAKAILSARLSKSRRLENLIAQLPGEKKNGLFGNLIALSLGLTPNFKSNFDLAEDAKLQLSKDTYDDDLDNLLAQIGDQYADLFLAAKNLSDAILLSDILRVNTEITKAPLSASMIKRYDEHHQDLTLLKALVRQQLPEKYKEIFFDQSKNGYAGYIDGGASQEEFYKFIKPILEKMDGTEELLVKLNREDLLRKQRTFDNGSIPHQIHLGELHAILRRQEDFYPFLKDNREKIEKILTFRIPYYVGPLARGNSRFAWMTRKSEETITPWNFEEVVDKGASAQSFIERMTNFDKNLPNEKVLPKHSLLYEYFTVYNELTKVKYVTEGMRKPAFLSGEQKKAIVDLLFKTNRKVTVKQLKEDYFKKIECFDSVEISGVEDRFNASLGTYHDLLKIIKDKDFLDNEENEDILEDIVLTLTLFEDREMIEERLKTYAHLFDDKVMKQLKRRRYTGWGRLSRKLINGIRDKQSGKTILDFLKSDGFANRNFMQLIHDDSLTFKEDIQKAQVSGQGDSLHEHIANLAGSPAIKKGILQTVKVVDELVKVMGRHKPENIVIEMARENQTTQKGQKNSRERMKRIEEGIKELGSQILKEHPVENTQLQNEKLYLYYLQNGRDMYVDQELDINRLSDYDVDHIVPQSFLKDDSIDNKVLTRSDKARGKSDNVPSEEVVKKMKNYWRQLLNAKLITQRKFDNLTKAERGGLSELDKAGFIKRQLVETRQITKHVAQILDSRMNTKYDENDKLIREVKVITLKSKLVSDFRKDFQFYKVREINNYHHAHDAYLNAVVGTALIKKYPKLESEFVYGDYKVYDVRKMIAKSEQEIGKATAKYFFYSNIMNFFKTEITLANGEIRKRPLIETNGETGEIVWDKGRDFATVRKVLSMPQVNIVKKTEVQTGGFSKESILPKRNSDKLIARKKDWDPKKYGGFDSPTVAYSVLVVAKVEKGKSKKLKSVKELLGITIMERSSFEKNPIDFLEAKGYKEVKKDLIIKLPKYSLFELENGRKRMLASAGELQKGNELALPSKYVNFLYLASHYEKLKGSPEDNEQKQLFVEQHKHYLDEIIEQISEFSKRVILADANLDKVLSAYNKHRDKPIREQAENIIHLFTLTNLGAPAAFKYFDTTIDRKRYTSTKEVLDATLIHQSITGLYETRIDLSQLGGDGGGGSGSSPAPGGTLQLDDEYRLYSPLVKPDQNIQFWLEQFPQAWAETAGMGLAKQVPPQVIQLKASATPVSVRQYPLSKEAQEGIRPHVQRLIQQGILVPVQSPWNTPLLPVRKPGTNDYRPVQDLREVNKRVQDIHPTVPNPYNLLCALPPQRSWYTVLDLKDAFFCLRLHPTSQPLFAFEWRDPGTGRTGQLTWTRLPQGFKNSPTIFNEALHRDLANFRIQHPQVTLLQYVDDLLLAGATKQDCLEGTKALLLELSDLGYRASAKKAQICRREVTYLGYSLRDGQRWLTEARKKTVVQIPAPTTAKQVREFLGTAGFCRLWIPGFATLAAPLYPLTKPKGEFSWAPEHQKAFDAIKKALLSAPALALPDVTKPFTLYVDERKGVARGVLTQTLGPWRRPVAYLSKKLDPVASGWPVCLKAIAAVAILVKDADKLTLGQNITVIAPHALENIVRQPPDRWMTNARMTHYQSLLLTERVTFAPPAALNPATLLPEETDEPVTHDCHQLLIEETGVRKDLTDIPLTGEVLTWFTDGSSYVVEGKRMAGAAVVDGTRTIWASSLPEGTSAQKAELMALTQALRLAEGKSINIYTDSRYAFATAHVHGAIYKQRGWLTSAGREIKNKEEILSLLEALHLPKRLAIIHCPGHQKAKDPISRGNQMADRVAKQAAQGVNLLAGKRTADGSEFEKRTADGSEFESPKKKAKVE

SEQ ID NO: 156 - protein, 2125 aa, synthetic construct
MPAAKRVKLDGGDKKYSIGLDIGTNSVGWAVITDEYKVPSKKFKVLGNTDRHSIKKNLIGALLFDSGETAEATRLKRTARRRYTRRKNRICYLQEIFSNEMAKVDDSFFHRLEESFLVEEDKKHERHPIFGNIVDEVAYHEKYPTIYHLRKKLVDSTDKADLRLIYLALAHMIKFRGHFLIEGDLNPDNSDVDKLFIQLVQTYNQLFEENPINASGVDAKAILSARLSKSRRLENLIAQLPGEKKNGLFGNLIALSLGLTPNFKSNFDLAEDAKLQLSKDTYDDDLDNLLAQIGDQYADLFLAAKNLSDAILLSDILRVNTEITKAPLSASMIKRYDEHHQDLTLLKALVRQQLPEKYKEIFFDQSKNGYAGYIDGGASQEEFYKFIKPILEKMDGTEELLVKLNREDLLRKQRTFDNGSIPHQIHLGELHAILRRQEDFYPFLKDNREKIEKILTFRIPYYVGPLARGNSRFAWMTRKSEETITPWNFEEVVDKGASAQSFIERMTNFDKNLPNEKVLPKHSLLYEYFTVYNELTKVKYVTEGMRKPAFLSGEQKKAIVDLLFKTNRKVTVKQLKEDYFKKIECFDSVEISGVEDRFNASLGTYHDLLKIIKDKDFLDNEENEDILEDIVLTLTLFEDREMIEERLKTYAHLFDDKVMKQLKRRRYTGWGRLSRKLINGIRDKQSGKTILDFLKSDGFANRNFMQLIHDDSLTFKEDIQKAQVSGQGDSLHEHIANLAGSPAIKKGILQTVKVVDELVKVMGRHKPENIVIEMARENQTTQKGQKNSRERMKRIEEGIKELGSQILKEHPVENTQLQNEKLYLYYLQNGRDMYVDQELDINRLSDYDVDHIVPQSFLKDDSIDNKVLTRSDKARGKSDNVPSEEVVKKMKNYWRQLLNAKLITQRKFDNLTKAERGGLSELDKAGFIKRQLVETRQITKHVAQILDSRMNTKYDENDKLIREVKVITLKSKLVSDFRKDFQFYKVREINNYHHAHDAYLNAVVGTALIKKYPKLESEFVYGDYKVYDVRKMIAKSEQEIGKATAKYFFYSNIMNFFKTEITLANGEIRKRPLIETNGETGEIVWDKGRDFATVRKVLSMPQVNIVKKTEVQTGGFSKESILPKRNSDKLIARKKDWDPKKYGGFDSPTVAYSVLVVAKVEKGKSKKLKSVKELLGITIMERSSFEKNPIDFLEAKGYKEVKKDLIIKLPKYSLFELENGRKRMLASAGELQKGNELALPSKYVNFLYLASHYEKLKGSPEDNEQKQLFVEQHKHYLDEIIEQISEFSKRVILADANLDKVLSAYNKHRDKPIREQAENIIHLFTLTNLGAPAAFKYFDTTIDRKRYTSTKEVLDATLIHQSITGLYETRIDLSQLGGDGGAEAAAKEAAAKEAAAKEAAAKALEAEAAAKEAAAKEAAAKEAAAKAGGTLQLDDEYRLYSPLVKPDQNIQFWLEQFPQAWAETAGMGLAKQVPPQVIQLKASATPVSVRQYPLSKEAQEGIRPHVQRLIQQGILVPVQSPWNTPLLPVRKPGTNDYRPVQDLREVNKRVQDIHPTVPNPYNLLCALPPQRSWYTVLDLKDAFFCLRLHPTSQPLFAFEWRDPGTGRTGQLTWTRLPQGFKNSPTIFNEALHRDLANFRIQHPQVTLLQYVDDLLLAGATKQDCLEGTKALLLELSDLGYRASAKKAQICRREVTYLGYSLRDGQRWLTEARKKTVVQIPAPTTAKQVREFLGTAGFCRLWIPGFATLAAPLYPLTKPKGEFSWAPEHQKAFDAIKKALLSAPALALPDVTKPFTLYVDERKGVARGVLTQTLGPWRRPVAYLSKKLDPVASGWPVCLKAIAAVAILVKDADKLTLGQNITVIAPHALENIVRQPPDRWMTNARMTHYQSLLLTERVTFAPPAALNPATLLPEETDEPVTHDCHQLLIEETGVRKDLTDIPLTGEVLTWFTDGSSYVVEGKRMAGAAVVDGTRTIWASSLPEGTSAQKAELMALTQALRLAEGKSINIYTDSRYAFATAHVHGAIYKQRGWLTSAGREIKNKEEILSLLEALHLPKRLAIIHCPGHQKAKDPISRGNQMADRVAKQAAQGVNLLAGKRTADGSEFEKRTADGSEFESPKKKAKVE

SEQ ID NO: 157 - protein, 2092 aa, synthetic construct
MPAAKRVKLDGGDKKYSIGLDIGTNSVGWAVITDEYKVPSKKFKVLGNTDRHSIKKNLIGALLFDSGETAEATRLKRTARRRYTRRKNRICYLQEIFSNEMAKVDDSFFHRLEESFLVEEDKKHERHPIFGNIVDEVAYHEKYPTIYHLRKKLVDSTDKADLRLIYLALAHMIKFRGHFLIEGDLNPDNSDVDKLFIQLVQTYNQLFEENPINASGVDAKAILSARLSKSRRLENLIAQLPGEKKNGLFGNLIALSLGLTPNFKSNFDLAEDAKLQLSKDTYDDDLDNLLAQIGDQYADLFLAAKNLSDAILLSDILRVNTEITKAPLSASMIKRYDEHHQDLTLLKALVRQQLPEKYKEIFFDQSKNGYAGYIDGGASQEEFYKFIKPILEKMDGTEELLVKLNREDLLRKQRTFDNGSIPHQIHLGELHAILRRQEDFYPFLKDNREKIEKILTFRIPYYVGPLARGNSRFAWMTRKSEETITPWNFEEVVDKGASAQSFIERMTNFDKNLPNEKVLPKHSLLYEYFTVYNELTKVKYVTEGMRKPAFLSGEQKKAIVDLLFKTNRKVTVKQLKEDYFKKIECFDSVEISGVEDRFNASLGTYHDLLKIIKDKDFLDNEENEDILEDIVLTLTLFEDREMIEERLKTYAHLFDDKVMKQLKRRRYTGWGRLSRKLINGIRDKQSGKTILDFLKSDGFANRNFMQLIHDDSLTFKEDIQKAQVSGQGDSLHEHIANLAGSPAIKKGILQTVKVVDELVKVMGRHKPENIVIEMARENQTTQKGQKNSRERMKRIEEGIKELGSQILKEHPVENTQLQNEKLYLYYLQNGRDMYVDQELDINRLSDYDVDHIVPQSFLKDDSIDNKVLTRSDKARGKSDNVPSEEVVKKMKNYWRQLLNAKLITQRKFDNLTKAERGGLSELDKAGFIKRQLVETRQITKHVAQILDSRMNTKYDENDKLIREVKVITLKSKLVSDFRKDFQFYKVREINNYHHAHDAYLNAVVGTALIKKYPKLESEFVYGDYKVYDVRKMIAKSEQEIGKATAKYFFYSNIMNFFKTEITLANGEIRKRPLIETNGETGEIVWDKGRDFATVRKVLSMPQVNIVKKTEVQTGGFSKESILPKRNSDKLIARKKDWDPKKYGGFDSPTVAYSVLVVAKVEKGKSKKLKSVKELLGITIMERSSFEKNPIDFLEAKGYKEVKKDLIIKLPKYSLFELENGRKRMLASAGELQKGNELALPSKYVNFLYLASHYEKLKGSPEDNEQKQLFVEQHKHYLDEIIEQISEFSKRVILADANLDKVLSAYNKHRDKPIREQAENIIHLFTLTNLGAPAAFKYFDTTIDRKRYTSTKEVLDATLIHQSITGLYETRIDLSQLGGDGGPAPAPAPAPAPAPGGTLQLDDEYRLYSPLVKPDQNIQFWLEQFPQAWAETAGMGLAKQVPPQVIQLKASATPVSVRQYPLSKEAQEGIRPHVQRLIQQGILVPVQSPWNTPLLPVRKPGTNDYRPVQDLREVNKRVQDIHPTVPNPYNLLCALPPQRSWYTVLDLKDAFFCLRLHPTSQPLFAFEWRDPGTGRTGQLTWTRLPQGFKNSPTIFNEALHRDLANFRIQHPQVTLLQYVDDLLLAGATKQDCLEGTKALLLELSDLGYRASAKKAQICRREVTYLGYSLRDGQRWLTEARKKTVVQIPAPTTAKQVREFLGTAGFCRLWIPGFATLAAPLYPLTKPKGEFSWAPEHQKAFDAIKKALLSAPALALPDVTKPFTLYVDERKGVARGVLTQTLGPWRRPVAYLSKKLDPVASGWPVCLKAIAAVAILVKDADKLTLGQNITVIAPHALENIVRQPPDRWMTNARMTHYQSLLLTERVTFAPPAALNPATLLPEETDEPVTHDCHQLLIEETGVRKDLTDIPLTGEVLTWFTDGSSYVVEGKRMAGAAVVDGTRTIWASSLPEGTSAQKAELMALTQALRLAEGKSINIYTDSRYAFATAHVHGAIYKQRGWLTSAGREIKNKEEILSLLEALHLPKRLAIIHCPGHQKAKDPISRGNQMADRVAKQAAQGVNLLAGKRTADGSEFEKRTADGSEFESPKKKAKVE

SEQ ID NO: 158 - protein, 2087 aa, synthetic construct
MPAAKRVKLDGGDKKYSIGLDIGTNSVGWAVITDEYKVPSKKFKVLGNTDRHSIKKNLIGALLFDSGETAEATRLKRTARRRYTRRKNRICYLQEIFSNEMAKVDDSFFHRLEESFLVEEDKKHERHPIFGNIVDEVAYHEKYPTIYHLRKKLVDSTDKADLRLIYLALAHMIKFRGHFLIEGDLNPDNSDVDKLFIQLVQTYNQLFEENPINASGVDAKAILSARLSKSRRLENLIAQLPGEKKNGLFGNLIALSLGLTPNFKSNFDLAEDAKLQLSKDTYDDDLDNLLAQIGDQYADLFLAAKNLSDAILLSDILRVNTEITKAPLSASMIKRYDEHHQDLTLLKALVRQQLPEKYKEIFFDQSKNGYAGYIDGGASQEEFYKFIKPILEKMDGTEELLVKLNREDLLRKQRTFDNGSIPHQIHLGELHAILRRQEDFYPFLKDNREKIEKILTFRIPYYVGPLARGNSRFAWMTRKSEETITPWNFEEVVDKGASAQSFIERMTNFDKNLPNEKVLPKHSLLYEYFTVYNELTKVKYVTEGMRKPAFLSGEQKKAIVDLLFKTNRKVTVKQLKEDYFKKIECFDSVEISGVEDRFNASLGTYHDLLKIIKDKDFLDNEENEDILEDIVLTLTLFEDREMIEERLKTYAHLFDDKVMKQLKRRRYTGWGRLSRKLINGIRDKQSGKTILDFLKSDGFANRNFMQLIHDDSLTFKEDIQKAQVSGQGDSLHEHIANLAGSPAIKKGILQTVKVVDELVKVMGRHKPENIVIEMARENQTTQKGQKNSRERMKRIEEGIKELGSQILKEHPVENTQLQNEKLYLYYLQNGRDMYVDQELDINRLSDYDVDHIVPQSFLKDDSIDNKVLTRSDKARGKSDNVPSEEVVKKMKNYWRQLLNAKLITQRKFDNLTKAERGGLSELDKAGFIKRQLVETRQITKHVAQILDSRMNTKYDENDKLIREVKVITLKSKLVSDFRKDFQFYKVREINNYHHAHDAYLNAVVGTALIKKYPKLESEFVYGDYKVYDVRKMIAKSEQEIGKATAKYFFYSNIMNFFKTEITLANGEIRKRPLIETNGETGEIVWDKGRDFATVRKVLSMPQVNIVKKTEVQTGGFSKESILPKRNSDKLIARKKDWDPKKYGGFDSPTVAYSVLVVAKVEKGKSKKLKSVKELLGITIMERSSFEKNPIDFLEAKGYKEVKKDLIIKLPKYSLFELENGRKRMLASAGELQKGNELALPSKYVNFLYLASHYEKLKGSPEDNEQKQLFVEQHKHYLDEIIEQISEFSKRVILADANLDKVLSAYNKHRDKPIREQAENIIHLFTLTNLGAPAAFKYFDTTIDRKRYTSTKEVLDATLIHQSITGLYETRIDLSQLGGDGGEAAAKGGSGGTLQLDDEYRLYSPLVKPDQNIQFWLEQFPQAWAETAGMGLAKQVPPQVIQLKASATPVSVRQYPLSKEAQEGIRPHVQRLIQQGILVPVQSPWNTPLLPVRKPGTNDYRPVQDLREVNKRVQDIHPTVPNPYNLLCALPPQRSWYTVLDLKDAFFCLRLHPTSQPLFAFEWRDPGTGRTGQLTWTRLPQGFKNSPTIFNEALHRDLANFRIQHPQVTLLQYVDDLLLAGATKQDCLEGTKALLLELSDLGYRASAKKAQICRREVTYLGYSLRDGQRWLTEARKKTVVQIPAPTTAKQVREFLGTAGFCRLWIPGFATLAAPLYPLTKPKGEFSWAPEHQKAFDAIKKALLSAPALALPDVTKPFTLYVDERKGVARGVLTQTLGPWRRPVAYLSKKLDPVASGWPVCLKAIAAVAILVKDADKLTLGQNITVIAPHALENIVRQPPDRWMTNARMTHYQSLLLTERVTFAPPAALNPATLLPEETDEPVTHDCHQLLIEETGVRKDLTDIPLTGEVLTWFTDGSSYVVEGKRMAGAAVVDGTRTIWASSLPEGTSAQKAELMALTQALRLAEGKSINIYTDSRYAFATAHVHGAIYKQRGWLTSAGREIKNKEEILSLLEALHLPKRLAIIHCPGHQKAKDPISRGNQMADRVAKQAAQGVNLLAGKRTADGSEFEKRTADGSEFESPKKKAKVE

SEQ ID NO: 159 - protein, 2094 aa, synthetic construct
MPAAKRVKLDGGDKKYSIGLDIGTNSVGWAVITDEYKVPSKKFKVLGNTDRHSIKKNLIGALLFDSGETAEATRLKRTARRRYTRRKNRICYLQEIFSNEMAKVDDSFFHRLEESFLVEEDKKHERHPIFGNIVDEVAYHEKYPTIYHLRKKLVDSTDKADLRLIYLALAHMIKFRGHFLIEGDLNPDNSDVDKLFIQLVQTYNQLFEENPINASGVDAKAILSARLSKSRRLENLIAQLPGEKKNGLFGNLIALSLGLTPNFKSNFDLAEDAKLQLSKDTYDDDLDNLLAQIGDQYADLFLAAKNLSDAILLSDILRVNTEITKAPLSASMIKRYDEHHQDLTLLKALVRQQLPEKYKEIFFDQSKNGYAGYIDGGASQEEFYKFIKPILEKMDGTEELLVKLNREDLLRKQRTFDNGSIPHQIHLGELHAILRRQEDFYPFLKDNREKIEKILTFRIPYYVGPLARGNSRFAWMTRKSEETITPWNFEEVVDKGASAQSFIERMTNFDKNLPNEKVLPKHSLLYEYFTVYNELTKVKYVTEGMRKPAFLSGEQKKAIVDLLFKTNRKVTVKQLKEDYFKKIECFDSVEISGVEDRFNASLGTYHDLLKIIKDKDFLDNEENEDILEDIVLTLTLFEDREMIEERLKTYAHLFDDKVMKQLKRRRYTGWGRLSRKLINGIRDKQSGKTILDFLKSDGFANRNFMQLIHDDSLTFKEDIQKAQVSGQGDSLHEHIANLAGSPAIKKGILQTVKVVDELVKVMGRHKPENIVIEMARENQTTQKGQKNSRERMKRIEEGIKELGSQILKEHPVENTQLQNEKLYLYYLQNGRDMYVDQELDINRLSDYDVDHIVPQSFLKDDSIDNKVLTRSDKARGKSDNVPSEEVVKKMKNYWRQLLNAKLITQRKFDNLTKAERGGLSELDKAGFIKRQLVETRQITKHVAQILDSRMNTKYDENDKLIREVKVITLKSKLVSDFRKDFQFYKVREINNYHHAHDAYLNAVVGTALIKKYPKLESEFVYGDYKVYDVRKMIAKSEQEIGKATAKYFFYSNIMNFFKTEITLANGEIRKRPLIETNGETGEIVWDKGRDFATVRKVLSMPQVNIVKKTEVQTGGFSKESILPKRNSDKLIARKKDWDPKKYGGFDSPTVAYSVLVVAKVEKGKSKKLKSVKELLGITIMERSSFEKNPIDFLEAKGYKEVKKDLIIKLPKYSLFELENGRKRMLASAGELQKGNELALPSKYVNFLYLASHYEKLKGSPEDNEQKQLFVEQHKHYLDEIIEQISEFSKRVILADANLDKVLSAYNKHRDKPIREQAENIIHLFTLTNLGAPAAFKYFDTTIDRKRYTSTKEVLDATLIHQSITGLYETRIDLSQLGGDGGGGGGSGGGGSGGGGSGGTLQLDDEYRLYSPLVKPDQNIQFWLEQFPQAWAETAGMGLAKQVPPQVIQLKASATPVSVRQYPLSKEAQEGIRPHVQRLIQQGILVPVQSPWNTPLLPVRKPGTNDYRPVQDLREVNKRVQDIHPTVPNPYNLLCALPPQRSWYTVLDLKDAFFCLRLHPTSQPLFAFEWRDPGTGRTGQLTWTRLPQGFKNSPTIFNEALHRDLANFRIQHPQVTLLQYVDDLLLAGATKQDCLEGTKALLLELSDLGYRASAKKAQICRREVTYLGYSLRDGQRWLTEARKKTVVQIPAPTTAKQVREFLGTAGFCRLWIPGFATLAAPLYPLTKPKGEFSWAPEHQKAFDAIKKALLSAPALALPDVTKPFTLYVDERKGVARGVLTQTLGPWRRPVAYLSKKLDPVASGWPVCLKAIAAVAILVKDADKLTLGQNITVIAPHALENIVRQPPDRWMTNARMTHYQSLLLTERVTFAPPAALNPATLLPEETDEPVTHDCHQLLIEETGVRKDLTDIPLTGEVLTWFTDGSSYVVEGKRMAGAAVVDGTRTIWASSLPEGTSAQKAELMALTQALRLAEGKSINIYTDSRYAFATAHVHGAIYKQRGWLTSAGREIKNKEEILSLLEALHLPKRLAIIHCPGHQKAKDPISRGNQMADRVAKQAAQGVNLLAGKRTADGSEFEKRTADGSEFESPKKKAKVE

SEQ ID NO: 160 - protein, 2090 aa, synthetic construct
MPAAKRVKLDGGDKKYSIGLDIGTNSVGWAVITDEYKVPSKKFKVLGNTDRHSIKKNLIGALLFDSGETAEATRLKRTARRRYTRRKNRICYLQEIFSNEMAKVDDSFFHRLEESFLVEEDKKHERHPIFGNIVDEVAYHEKYPTIYHLRKKLVDSTDKADLRLIYLALAHMIKFRGHFLIEGDLNPDNSDVDKLFIQLVQTYNQLFEENPINASGVDAKAILSARLSKSRRLENLIAQLPGEKKNGLFGNLIALSLGLTPNFKSNFDLAEDAKLQLSKDTYDDDLDNLLAQIGDQYADLFLAAKNLSDAILLSDILRVNTEITKAPLSASMIKRYDEHHQDLTLLKALVRQQLPEKYKEIFFDQSKNGYAGYIDGGASQEEFYKFIKPILEKMDGTEELLVKLNREDLLRKQRTFDNGSIPHQIHLGELHAILRRQEDFYPFLKDNREKIEKILTFRIPYYVGPLARGNSRFAWMTRKSEETITPWNFEEVVDKGASAQSFIERMTNFDKNLPNEKVLPKHSLLYEYFTVYNELTKVKYVTEGMRKPAFLSGEQKKAIVDLLFKTNRKVTVKQLKEDYFKKIECFDSVEISGVEDRFNASLGTYHDLLKIIKDKDFLDNEENEDILEDIVLTLTLFEDREMIEERLKTYAHLFDDKVMKQLKRRRYTGWGRLSRKLINGIRDKQSGKTILDFLKSDGFANRNFMQLIHDDSLTFKEDIQKAQVSGQGDSLHEHIANLAGSPAIKKGILQTVKVVDELVKVMGRHKPENIVIEMARENQTTQKGQKNSRERMKRIEEGIKELGSQILKEHPVENTQLQNEKLYLYYLQNGRDMYVDQELDINRLSDYDVDHIVPQSFLKDDSIDNKVLTRSDKARGKSDNVPSEEVVKKMKNYWRQLLNAKLITQRKFDNLTKAERGGLSELDKAGFIKRQLVETRQITKHVAQILDSRMNTKYDENDKLIREVKVITLKSKLVSDFRKDFQFYKVREINNYHHAHDAYLNAVVGTALIKKYPKLESEFVYGDYKVYDVRKMIAKSEQEIGKATAKYFFYSNIMNFFKTEITLANGEIRKRPLIETNGETGEIVWDKGRDFATVRKVLSMPQVNIVKKTEVQTGGFSKESILPKRNSDKLIARKKDWDPKKYGGFDSPTVAYSVLVVAKVEKGKSKKLKSVKELLGITIMERSSFEKNPIDFLEAKGYKEVKKDLIIKLPKYSLFELENGRKRMLASAGELQKGNELALPSKYVNFLYLASHYEKLKGSPEDNEQKQLFVEQHKHYLDEIIEQISEFSKRVILADANLDKVLSAYNKHRDKPIREQAENIIHLFTLTNLGAPAAFKYFDTTIDRKRYTSTKEVLDATLIHQSITGLYETRIDLSQLGGDGGEAAAKGSSGGGGGTLQLDDEYRLYSPLVKPDQNIQFWLEQFPQAWAETAGMGLAKQVPPQVIQLKASATPVSVRQYPLSKEAQEGIRPHVQRLIQQGILVPVQSPWNTPLLPVRKPGTNDYRPVQDLREVNKRVQDIHPTVPNPYNLLCALPPQRSWYTVLDLKDAFFCLRLHPTSQPLFAFEWRDPGTGRTGQLTWTRLPQGFKNSPTIFNEALHRDLANFRIQHPQVTLLQYVDDLLLAGATKQDCLEGTKALLLELSDLGYRASAKKAQICRREVTYLGYSLRDGQRWLTEARKKTVVQIPAPTTAKQVREFLGTAGFCRLWIPGFATLAAPLYPLTKPKGEFSWAPEHQKAFDAIKKALLSAPALALPDVTKPFTLYVDERKGVARGVLTQTLGPWRRPVAYLSKKLDPVASGWPVCLKAIAAVAILVKDADKLTLGQNITVIAPHALENIVRQPPDRWMTNARMTHYQSLLLTERVTFAPPAALNPATLLPEETDEPVTHDCHQLLIEETGVRKDLTDIPLTGEVLTWFTDGSSYVVEGKRMAGAAVVDGTRTIWASSLPEGTSAQKAELMALTQALRLAEGKSINIYTDSRYAFATAHVHGAIYKQRGWLTSAGREIKNKEEILSLLEALHLPKRLAIIHCPGHQKAKDPISRGNQMADRVAKQAAQGVNLLAGKRTADGSEFEKRTADGSEFESPKKKAKVE

SEQ ID NO: 161 - protein, 2094 aa, synthetic construct
MPAAKRVKLDGGDKKYSIGLDIGTNSVGWAVITDEYKVPSKKFKVLGNTDRHSIKKNLIGALLFDSGETAEATRLKRTARRRYTRRKNRICYLQEIFSNEMAKVDDSFFHRLEESFLVEEDKKHERHPIFGNIVDEVAYHEKYPTIYHLRKKLVDSTDKADLRLIYLALAHMIKFRGHFLIEGDLNPDNSDVDKLFIQLVQTYNQLFEENPINASGVDAKAILSARLSKSRRLENLIAQLPGEKKNGLFGNLIALSLGLTPNFKSNFDLAEDAKLQLSKDTYDDDLDNLLAQIGDQYADLFLAAKNLSDAILLSDILRVNTEITKAPLSASMIKRYDEHHQDLTLLKALVRQQLPEKYKEIFFDQSKNGYAGYIDGGASQEEFYKFIKPILEKMDGTEELLVKLNREDLLRKQRTFDNGSIPHQIHLGELHAILRRQEDFYPFLKDNREKIEKILTFRIPYYVGPLARGNSRFAWMTRKSEETITPWNFEEVVDKGASAQSFIERMTNFDKNLPNEKVLPKHSLLYEYFTVYNELTKVKYVTEGMRKPAFLSGEQKKAIVDLLFKTNRKVTVKQLKEDYFKKIECFDSVEISGVEDRFNASLGTYHDLLKIIKDKDFLDNEENEDILEDIVLTLTLFEDREMIEERLKTYAHLFDDKVMKQLKRRRYTGWGRLSRKLINGIRDKQSGKTILDFLKSDGFANRNFMQLIHDDSLTFKEDIQKAQVSGQGDSLHEHIANLAGSPAIKKGILQTVKVVDELVKVMGRHKPENIVIEMARENQTTQKGQKNSRERMKRIEEGIKELGSQILKEHPVENTQLQNEKLYLYYLQNGRDMYVDQELDINRLSDYDVDHIVPQSFLKDDSIDNKVLTRSDKARGKSDNVPSEEVVKKMKNYWRQLLNAKLITQRKFDNLTKAERGGLSELDKAGFIKRQLVETRQITKHVAQILDSRMNTKYDENDKLIREVKVITLKSKLVSDFRKDFQFYKVREINNYHHAHDAYLNAVVGTALIKKYPKLESEFVYGDYKVYDVRKMIAKSEQEIGKATAKYFFYSNIMNFFKTEITLANGEIRKRPLIETNGETGEIVWDKGRDFATVRKVLSMPQVNIVKKTEVQTGGFSKESILPKRNSDKLIARKKDWDPKKYGGFDSPTVAYSVLVVAKVEKGKSKKLKSVKELLGITIMERSSFEKNPIDFLEAKGYKEVKKDLIIKLPKYSLFELENGRKRMLASAGELQKGNELALPSKYVNFLYLASHYEKLKGSPEDNEQKQLFVEQHKHYLDEIIEQISEFSKRVILADANLDKVLSAYNKHRDKPIREQAENIIHLFTLTNLGAPAAFKYFDTTIDRKRYTSTKEVLDATLIHQSITGLYETRIDLSQLGGDGGGGGGSEAAAKGGGGSGGTLQLDDEYRLYSPLVKPDQNIQFWLEQFPQAWAETAGMGLAKQVPPQVIQLKASATPVSVRQYPLSKEAQEGIRPHVQRLIQQGILVPVQSPWNTPLLPVRKPGTNDYRPVQDLREVNKRVQDIHPTVPNPYNLLCALPPQRSWYTVLDLKDAFFCLRLHPTSQPLFAFEWRDPGTGRTGQLTWTRLPQGFKNSPTIFNEALHRDLANFRIQHPQVTLLQYVDDLLLAGATKQDCLEGTKALLLELSDLGYRASAKKAQICRREVTYLGYSLRDGQRWLTEARKKTVVQIPAPTTAKQVREFLGTAGFCRLWIPGFATLAAPLYPLTKPKGEFSWAPEHQKAFDAIKKALLSAPALALPDVTKPFTLYVDERKGVARGVLTQTLGPWRRPVAYLSKKLDPVASGWPVCLKAIAAVAILVKDADKLTLGQNITVIAPHALENIVRQPPDRWMTNARMTHYQSLLLTERVTFAPPAALNPATLLPEETDEPVTHDCHQLLIEETGVRKDLTDIPLTGEVLTWFTDGSSYVVEGKRMAGAAVVDGTRTIWASSLPEGTSAQKAELMALTQALRLAEGKSINIYTDSRYAFATAHVHGAIYKQRGWLTSAGREIKNKEEILSLLEALHLPKRLAIIHCPGHQKAKDPISRGNQMADRVAKQAAQGVNLLAGKRTADGSEFEKRTADGSEFESPKKKAKVE

SEQ ID NO: 162 - protein, 2088 aa, synthetic construct
MPAAKRVKLDGGDKKYSIGLDIGTNSVGWAVITDEYKVPSKKFKVLGNTDRHSIKKNLIGALLFDSGETAEATRLKRTARRRYTRRKNRICYLQEIFSNEMAKVDDSFFHRLEESFLVEEDKKHERHPIFGNIVDEVAYHEKYPTIYHLRKKLVDSTDKADLRLIYLALAHMIKFRGHFLIEGDLNPDNSDVDKLFIQLVQTYNQLFEENPINASGVDAKAILSARLSKSRRLENLIAQLPGEKKNGLFGNLIALSLGLTPNFKSNFDLAEDAKLQLSKDTYDDDLDNLLAQIGDQYADLFLAAKNLSDAILLSDILRVNTEITKAPLSASMIKRYDEHHQDLTLLKALVRQQLPEKYKEIFFDQSKNGYAGYIDGGASQEEFYKFIKPILEKMDGTEELLVKLNREDLLRKQRTFDNGSIPHQIHLGELHAILRRQEDFYPFLKDNREKIEKILTFRIPYYVGPLARGNSRFAWMTRKSEETITPWNFEEVVDKGASAQSFIERMTNFDKNLPNEKVLPKHSLLYEYFTVYNELTKVKYVTEGMRKPAFLSGEQKKAIVDLLFKTNRKVTVKQLKEDYFKKIECFDSVEISGVEDRFNASLGTYHDLLKIIKDKDFLDNEENEDILEDIVLTLTLFEDREMIEERLKTYAHLFDDKVMKQLKRRRYTGWGRLSRKLINGIRDKQSGKTILDFLKSDGFANRNFMQLIHDDSLTFKEDIQKAQVSGQGDSLHEHIANLAGSPAIKKGILQTVKVVDELVKVMGRHKPENIVIEMARENQTTQKGQKNSRERMKRIEEGIKELGSQILKEHPVENTQLQNEKLYLYYLQNGRDMYVDQELDINRLSDYDVDHIVPQSFLKDDSIDNKVLTRSDKARGKSDNVPSEEVVKKMKNYWRQLLNAKLITQRKFDNLTKAERGGLSELDKAGFIKRQLVETRQITKHVAQILDSRMNTKYDENDKLIREVKVITLKSKLVSDFRKDFQFYKVREINNYHHAHDAYLNAVVGTALIKKYPKLESEFVYGDYKVYDVRKMIAKSEQEIGKATAKYFFYSNIMNFFKTEITLANGEIRKRPLIETNGETGEIVWDKGRDFATVRKVLSMPQVNIVKKTEVQTGGFSKESILPKRNSDKLIARKKDWDPKKYGGFDSPTVAYSVLVVAKVEKGKSKKLKSVKELLGITIMERSSFEKNPIDFLEAKGYKEVKKDLIIKLPKYSLFELENGRKRMLASAGELQKGNELALPSKYVNFLYLASHYEKLKGSPEDNEQKQLFVEQHKHYLDEIIEQISEFSKRVILADANLDKVLSAYNKHRDKPIREQAENIIHLFTLTNLGAPAAFKYFDTTIDRKRYTSTKEVLDATLIHQSITGLYETRIDLSQLGGDGGGSSGGGGGSGGTLQLDDEYRLYSPLVKPDQNIQFWLEQFPQAWAETAGMGLAKQVPPQVIQLKASATPVSVRQYPLSKEAQEGIRPHVQRLIQQGILVPVQSPWNTPLLPVRKPGTNDYRPVQDLREVNKRVQDIHPTVPNPYNLLCALPPQRSWYTVLDLKDAFFCLRLHPTSQPLFAFEWRDPGTGRTGQLTWTRLPQGFKNSPTIFNEALHRDLANFRIQHPQVTLLQYVDDLLLAGATKQDCLEGTKALLLELSDLGYRASAKKAQICRREVTYLGYSLRDGQRWLTEARKKTVVQIPAPTTAKQVREFLGTAGFCRLWIPGFATLAAPLYPLTKPKGEFSWAPEHQKAFDAIKKALLSAPALALPDVTKPFTLYVDERKGVARGVLTQTLGPWRRPVAYLSKKLDPVASGWPVCLKAIAAVAILVKDADKLTLGQNITVIAPHALENIVRQPPDRWMTNARMTHYQSLLLTERVTFAPPAALNPATLLPEETDEPVTHDCHQLLIEETGVRKDLTDIPLTGEVLTWFTDGSSYVVEGKRMAGAAVVDGTRTIWASSLPEGTSAQKAELMALTQALRLAEGKSINIYTDSRYAFATAHVHGAIYKQRGWLTSAGREIKNKEEILSLLEALHLPKRLAIIHCPGHQKAKDPISRGNQMADRVAKQAAQGVNLLAGKRTADGSEFEKRTADGSEFESPKKKAKVE

SEQ ID NO: 163 - protein, 2084 aa, synthetic construct
MPAAKRVKLDGGDKKYSIGLDIGTNSVGWAVITDEYKVPSKKFKVLGNTDRHSIKKNLIGALLFDSGETAEATRLKRTARRRYTRRKNRICYLQEIFSNEMAKVDDSFFHRLEESFLVEEDKKHERHPIFGNIVDEVAYHEKYPTIYHLRKKLVDSTDKADLRLIYLALAHMIKFRGHFLIEGDLNPDNSDVDKLFIQLVQTYNQLFEENPINASGVDAKAILSARLSKSRRLENLIAQLPGEKKNGLFGNLIALSLGLTPNFKSNFDLAEDAKLQLSKDTYDDDLDNLLAQIGDQYADLFLAAKNLSDAILLSDILRVNTEITKAPLSASMIKRYDEHHQDLTLLKALVRQQLPEKYKEIFFDQSKNGYAGYIDGGASQEEFYKFIKPILEKMDGTEELLVKLNREDLLRKQRTFDNGSIPHQIHLGELHAILRRQEDFYPFLKDNREKIEKILTFRIPYYVGPLARGNSRFAWMTRKSEETITPWNFEEVVDKGASAQSFIERMTNFDKNLPNEKVLPKHSLLYEYFTVYNELTKVKYVTEGMRKPAFLSGEQKKAIVDLLFKTNRKVTVKQLKEDYFKKIECFDSVEISGVEDRFNASLGTYHDLLKIIKDKDFLDNEENEDILEDIVLTLTLFEDREMIEERLKTYAHLFDDKVMKQLKRRRYTGWGRLSRKLINGIRDKQSGKTILDFLKSDGFANRNFMQLIHDDSLTFKEDIQKAQVSGQGDSLHEHIANLAGSPAIKKGILQTVKVVDELVKVMGRHKPENIVIEMARENQTTQKGQKNSRERMKRIEEGIKELGSQILKEHPVENTQLQNEKLYLYYLQNGRDMYVDQELDINRLSDYDVDHIVPQSFLKDDSIDNKVLTRSDKARGKSDNVPSEEVVKKMKNYWRQLLNAKLITQRKFDNLTKAERGGLSELDKAGFIKRQLVETRQITKHVAQILDSRMNTKYDENDKLIREVKVITLKSKLVSDFRKDFQFYKVREINNYHHAHDAYLNAVVGTALIKKYPKLESEFVYGDYKVYDVRKMIAKSEQEIGKATAKYFFYSNIMNFFKTEITLANGEIRKRPLIETNGETGEIVWDKGRDFATVRKVLSMPQVNIVKKTEVQTGGFSKESILPKRNSDKLIARKKDWDPKKYGGFDSPTVAYSVLVVAKVEKGKSKKLKSVKELLGITIMERSSFEKNPIDFLEAKGYKEVKKDLIIKLPKYSLFELENGRKRMLASAGELQKGNELALPSKYVNFLYLASHYEKLKGSPEDNEQKQLFVEQHKHYLDEIIEQISEFSKRVILADANLDKVLSAYNKHRDKPIREQAENIIHLFTLTNLGAPAAFKYFDTTIDRKRYTSTKEVLDATLIHQSITGLYETRIDLSQLGGDGGPAPAPGGTLQLDDEYRLYSPLVKPDQNIQFWLEQFPQAWAETAGMGLAKQVPPQVIQLKASATPVSVRQYPLSKEAQEGIRPHVQRLIQQGILVPVQSPWNTPLLPVRKPGTNDYRPVQDLREVNKRVQDIHPTVPNPYNLLCALPPQRSWYTVLDLKDAFFCLRLHPTSQPLFAFEWRDPGTGRTGQLTWTRLPQGFKNSPTIFNEALHRDLANFRIQHPQVTLLQYVDDLLLAGATKQDCLEGTKALLLELSDLGYRASAKKAQICRREVTYLGYSLRDGQRWLTEARKKTVVQIPAPTTAKQVREFLGTAGFCRLWIPGFATLAAPLYPLTKPKGEFSWAPEHQKAFDAIKKALLSAPALALPDVTKPFTLYVDERKGVARGVLTQTLGPWRRPVAYLSKKLDPVASGWPVCLKAIAAVAILVKDADKLTLGQNITVIAPHALENIVRQPPDRWMTNARMTHYQSLLLTERVTFAPPAALNPATLLPEETDEPVTHDCHQLLIEETGVRKDLTDIPLTGEVLTWFTDGSSYVVEGKRMAGAAVVDGTRTIWASSLPEGTSAQKAELMALTQALRLAEGKSINIYTDSRYAFATAHVHGAIYKQRGWLTSAGREIKNKEEILSLLEALHLPKRLAIIHCPGHQKAKDPISRGNQMADRVAKQAAQGVNLLAGKRTADGSEFEKRTADGSEFESPKKKAKVE

SEQ ID NO: 164 - protein, 2090 aa, synthetic construct
MPAAKRVKLDGGDKKYSIGLDIGTNSVGWAVITDEYKVPSKKFKVLGNTDRHSIKKNLIGALLFDSGETAEATRLKRTARRRYTRRKNRICYLQEIFSNEMAKVDDSFFHRLEESFLVEEDKKHERHPIFGNIVDEVAYHEKYPTIYHLRKKLVDSTDKADLRLIYLALAHMIKFRGHFLIEGDLNPDNSDVDKLFIQLVQTYNQLFEENPINASGVDAKAILSARLSKSRRLENLIAQLPGEKKNGLFGNLIALSLGLTPNFKSNFDLAEDAKLQLSKDTYDDDLDNLLAQIGDQYADLFLAAKNLSDAILLSDILRVNTEITKAPLSASMIKRYDEHHQDLTLLKALVRQQLPEKYKEIFFDQSKNGYAGYIDGGASQEEFYKFIKPILEKMDGTEELLVKLNREDLLRKQRTFDNGSIPHQIHLGELHAILRRQEDFYPFLKDNREKIEKILTFRIPYYVGPLARGNSRFAWMTRKSEETITPWNFEEVVDKGASAQSFIERMTNFDKNLPNEKVLPKHSLLYEYFTVYNELTKVKYVTEGMRKPAFLSGEQKKAIVDLLFKTNRKVTVKQLKEDYFKKIECFDSVEISGVEDRFNASLGTYHDLLKIIKDKDFLDNEENEDILEDIVLTLTLFEDREMIEERLKTYAHLFDDKVMKQLKRRRYTGWGRLSRKLINGIRDKQSGKTILDFLKSDGFANRNFMQLIHDDSLTFKEDIQKAQVSGQGDSLHEHIANLAGSPAIKKGILQTVKVVDELVKVMGRHKPENIVIEMARENQTTQKGQKNSRERMKRIEEGIKELGSQILKEHPVENTQLQNEKLYLYYLQNGRDMYVDQELDINRLSDYDVDHIVPQSFLKDDSIDNKVLTRSDKARGKSDNVPSEEVVKKMKNYWRQLLNAKLITQRKFDNLTKAERGGLSELDKAGFIKRQLVETRQITKHVAQILDSRMNTKYDENDKLIREVKVITLKSKLVSDFRKDFQFYKVREINNYHHAHDAYLNAVVGTALIKKYPKLESEFVYGDYKVYDVRKMIAKSEQEIGKATAKYFFYSNIMNFFKTEITLANGEIRKRPLIETNGETGEIVWDKGRDFATVRKVLSMPQVNIVKKTEVQTGGFSKESILPKRNSDKLIARKKDWDPKKYGGFDSPTVAYSVLVVAKVEKGKSKKLKSVKELLGITIMERSSFEKNPIDFLEAKGYKEVKKDLIIKLPKYSLFELENGRKRMLASAGELQKGNELALPSKYVNFLYLASHYEKLKGSPEDNEQKQLFVEQHKHYLDEIIEQISEFSKRVILADANLDKVLSAYNKHRDKPIREQAENIIHLFTLTNLGAPAAFKYFDTTIDRKRYTSTKEVLDATLIHQSITGLYETRIDLSQLGGDGGGGSPAPEAAAKGGTLQLDDEYRLYSPLVKPDQNIQFWLEQFPQAWAETAGMGLAKQVPPQVIQLKASATPVSVRQYPLSKEAQEGIRPHVQRLIQQGILVPVQSPWNTPLLPVRKPGTNDYRPVQDLREVNKRVQDIHPTVPNPYNLLCALPPQRSWYTVLDLKDAFFCLRLHPTSQPLFAFEWRDPGTGRTGQLTWTRLPQGFKNSPTIFNEALHRDLANFRIQHPQVTLLQYVDDLLLAGATKQDCLEGTKALLLELSDLGYRASAKKAQICRREVTYLGYSLRDGQRWLTEARKKTVVQIPAPTTAKQVREFLGTAGFCRLWIPGFATLAAPLYPLTKPKGEFSWAPEHQKAFDAIKKALLSAPALALPDVTKPFTLYVDERKGVARGVLTQTLGPWRRPVAYLSKKLDPVASGWPVCLKAIAAVAILVKDADKLTLGQNITVIAPHALENIVRQPPDRWMTNARMTHYQSLLLTERVTFAPPAALNPATLLPEETDEPVTHDCHQLLIEETGVRKDLTDIPLTGEVLTWFTDGSSYVVEGKRMAGAAVVDGTRTIWASSLPEGTSAQKAELMALTQALRLAEGKSINIYTDSRYAFATAHVHGAIYKQRGWLTSAGREIKNKEEILSLLEALHLPKRLAIIHCPGHQKAKDPISRGNQMADRVAKQAAQGVNLLAGKRTADGSEFEKRTADGSEFESPKKKAKVE

SEQ ID NO: 165 - protein, 2085 aa, synthetic construct
MPAAKRVKLDGGDKKYSIGLDIGTNSVGWAVITDEYKVPSKKFKVLGNTDRHSIKKNLIGALLFDSGETAEATRLKRTARRRYTRRKNRICYLQEIFSNEMAKVDDSFFHRLEESFLVEEDKKHERHPIFGNIVDEVAYHEKYPTIYHLRKKLVDSTDKADLRLIYLALAHMIKFRGHFLIEGDLNPDNSDVDKLFIQLVQTYNQLFEENPINASGVDAKAILSARLSKSRRLENLIAQLPGEKKNGLFGNLIALSLGLTPNFKSNFDLAEDAKLQLSKDTYDDDLDNLLAQIGDQYADLFLAAKNLSDAILLSDILRVNTEITKAPLSASMIKRYDEHHQDLTLLKALVRQQLPEKYKEIFFDQSKNGYAGYIDGGASQEEFYKFIKPILEKMDGTEELLVKLNREDLLRKQRTFDNGSIPHQIHLGELHAILRRQEDFYPFLKDNREKIEKILTFRIPYYVGPLARGNSRFAWMTRKSEETITPWNFEEVVDKGASAQSFIERMTNFDKNLPNEKVLPKHSLLYEYFTVYNELTKVKYVTEGMRKPAFLSGEQKKAIVDLLFKTNRKVTVKQLKEDYFKKIECFDSVEISGVEDRFNASLGTYHDLLKIIKDKDFLDNEENEDILEDIVLTLTLFEDREMIEERLKTYAHLFDDKVMKQLKRRRYTGWGRLSRKLINGIRDKQSGKTILDFLKSDGFANRNFMQLIHDDSLTFKEDIQKAQVSGQGDSLHEHIANLAGSPAIKKGILQTVKVVDELVKVMGRHKPENIVIEMARENQTTQKGQKNSRERMKRIEEGIKELGSQILKEHPVENTQLQNEKLYLYYLQNGRDMYVDQELDINRLSDYDVDHIVPQSFLKDDSIDNKVLTRSDKARGKSDNVPSEEVVKKMKNYWRQLLNAKLITQRKFDNLTKAERGGLSELDKAGFIKRQLVETRQITKHVAQILDSRMNTKYDENDKLIREVKVITLKSKLVSDFRKDFQFYKVREINNYHHAHDAYLNAVVGTALIKKYPKLESEFVYGDYKVYDVRKMIAKSEQEIGKATAKYFFYSNIMNFFKTEITLANGEIRKRPLIETNGETGEIVWDKGRDFATVRKVLSMPQVNIVKKTEVQTGGFSKESILPKRNSDKLIARKKDWDPKKYGGFDSPTVAYSVLVVAKVEKGKSKKLKSVKELLGITIMERSSFEKNPIDFLEAKGYKEVKKDLIIKLPKYSLFELENGRKRMLASAGELQKGNELALPSKYVNFLYLASHYEKLKGSPEDNEQKQLFVEQHKHYLDEIIEQISEFSKRVILADANLDKVLSAYNKHRDKPIREQAENIIHLFTLTNLGAPAAFKYFDTTIDRKRYTSTKEVLDATLIHQSITGLYETRIDLSQLGGDGGGSSGGSGGTLQLDDEYRLYSPLVKPDQNIQFWLEQFPQAWAETAGMGLAKQVPPQVIQLKASATPVSVRQYPLSKEAQEGIRPHVQRLIQQGILVPVQSPWNTPLLPVRKPGTNDYRPVQDLREVNKRVQDIHPTVPNPYNLLCALPPQRSWYTVLDLKDAFFCLRLHPTSQPLFAFEWRDPGTGRTGQLTWTRLPQGFKNSPTIFNEALHRDLANFRIQHPQVTLLQYVDDLLLAGATKQDCLEGTKALLLELSDLGYRASAKKAQICRREVTYLGYSLRDGQRWLTEARKKTVVQIPAPTTAKQVREFLGTAGFCRLWIPGFATLAAPLYPLTKPKGEFSWAPEHQKAFDAIKKALLSAPALALPDVTKPFTLYVDERKGVARGVLTQTLGPWRRPVAYLSKKLDPVASGWPVCLKAIAAVAILVKDADKLTLGQNITVIAPHALENIVRQPPDRWMTNARMTHYQSLLLTERVTFAPPAALNPATLLPEETDEPVTHDCHQLLIEETGVRKDLTDIPLTGEVLTWFTDGSSYVVEGKRMAGAAVVDGTRTIWASSLPEGTSAQKAELMALTQALRLAEGKSINIYTDSRYAFATAHVHGAIYKQRGWLTSAGREIKNKEEILSLLEALHLPKRLAIIHCPGHQKAKDPISRGNQMADRVAKQAAQGVNLLAGKRTADGSEFEKRTADGSEFESPKKKAKVE

SEQ ID NO: 166 - protein, 2084 aa, synthetic construct
MPAAKRVKLDGGDKKYSIGLDIGTNSVGWAVITDEYKVPSKKFKVLGNTDRHSIKKNLIGALLFDSGETAEATRLKRTARRRYTRRKNRICYLQEIFSNEMAKVDDSFFHRLEESFLVEEDKKHERHPIFGNIVDEVAYHEKYPTIYHLRKKLVDSTDKADLRLIYLALAHMIKFRGHFLIEGDLNPDNSDVDKLFIQLVQTYNQLFEENPINASGVDAKAILSARLSKSRRLENLIAQLPGEKKNGLFGNLIALSLGLTPNFKSNFDLAEDAKLQLSKDTYDDDLDNLLAQIGDQYADLFLAAKNLSDAILLSDILRVNTEITKAPLSASMIKRYDEHHQDLTLLKALVRQQLPEKYKEIFFDQSKNGYAGYIDGGASQEEFYKFIKPILEKMDGTEELLVKLNREDLLRKQRTFDNGSIPHQIHLGELHAILRRQEDFYPFLKDNREKIEKILTFRIPYYVGPLARGNSRFAWMTRKSEETITPWNFEEVVDKGASAQSFIERMTNFDKNLPNEKVLPKHSLLYEYFTVYNELTKVKYVTEGMRKPAFLSGEQKKAIVDLLFKTNRKVTVKQLKEDYFKKIECFDSVEISGVEDRFNASLGTYHDLLKIIKDKDFLDNEENEDILEDIVLTLTLFEDREMIEERLKTYAHLFDDKVMKQLKRRRYTGWGRLSRKLINGIRDKQSGKTILDFLKSDGFANRNFMQLIHDDSLTFKEDIQKAQVSGQGDSLHEHIANLAGSPAIKKGILQTVKVVDELVKVMGRHKPENIVIEMARENQTTQKGQKNSRERMKRIEEGIKELGSQILKEHPVENTQLQNEKLYLYYLQNGRDMYVDQELDINRLSDYDVDHIVPQSFLKDDSIDNKVLTRSDKARGKSDNVPSEEVVKKMKNYWRQLLNAKLITQRKFDNLTKAERGGLSELDKAGFIKRQLVETRQITKHVAQILDSRMNTKYDENDKLIREVKVITLKSKLVSDFRKDFQFYKVREINNYHHAHDAYLNAVVGTALIKKYPKLESEFVYGDYKVYDVRKMIAKSEQEIGKATAKYFFYSNIMNFFKTEITLANGEIRKRPLIETNGETGEIVWDKGRDFATVRKVLSMPQVNIVKKTEVQTGGFSKESILPKRNSDKLIARKKDWDPKKYGGFDSPTVAYSVLVVAKVEKGKSKKLKSVKELLGITIMERSSFEKNPIDFLEAKGYKEVKKDLIIKLPKYSLFELENGRKRMLASAGELQKGNELALPSKYVNFLYLASHYEKLKGSPEDNEQKQLFVEQHKHYLDEIIEQISEFSKRVILADANLDKVLSAYNKHRDKPIREQAENIIHLFTLTNLGAPAAFKYFDTTIDRKRYTSTKEVLDATLIHQSITGLYETRIDLSQLGGDGGGGGGGGGTLQLDDEYRLYSPLVKPDQNIQFWLEQFPQAWAETAGMGLAKQVPPQVIQLKASATPVSVRQYPLSKEAQEGIRPHVQRLIQQGILVPVQSPWNTPLLPVRKPGTNDYRPVQDLREVNKRVQDIHPTVPNPYNLLCALPPQRSWYTVLDLKDAFFCLRLHPTSQPLFAFEWRDPGTGRTGQLTWTRLPQGFKNSPTIFNEALHRDLANFRIQHPQVTLLQYVDDLLLAGATKQDCLEGTKALLLELSDLGYRASAKKAQICRREVTYLGYSLRDGQRWLTEARKKTVVQIPAPTTAKQVREFLGTAGFCRLWIPGFATLAAPLYPLTKPKGEFSWAPEHQKAFDAIKKALLSAPALALPDVTKPFTLYVDERKGVARGVLTQTLGPWRRPVAYLSKKLDPVASGWPVCLKAIAAVAILVKDADKLTLGQNITVIAPHALENIVRQPPDRWMTNARMTHYQSLLLTERVTFAPPAALNPATLLPEETDEPVTHDCHQLLIEETGVRKDLTDIPLTGEVLTWFTDGSSYVVEGKRMAGAAVVDGTRTIWASSLPEGTSAQKAELMALTQALRLAEGKSINIYTDSRYAFATAHVHGAIYKQRGWLTSAGREIKNKEEILSLLEALHLPKRLAIIHCPGHQKAKDPISRGNQMADRVAKQAAQGVNLLAGKRTADGSEFEKRTADGSEFESPKKKAKVE

SEQ ID NO: 167 - protein, 2088 aa, synthetic construct
MPAAKRVKLDGGDKKYSIGLDIGTNSVGWAVITDEYKVPSKKFKVLGNTDRHSIKKNLIGALLFDSGETAEATRLKRTARRRYTRRKNRICYLQEIFSNEMAKVDDSFFHRLEESFLVEEDKKHERHPIFGNIVDEVAYHEKYPTIYHLRKKLVDSTDKADLRLIYLALAHMIKFRGHFLIEGDLNPDNSDVDKLFIQLVQTYNQLFEENPINASGVDAKAILSARLSKSRRLENLIAQLPGEKKNGLFGNLIALSLGLTPNFKSNFDLAEDAKLQLSKDTYDDDLDNLLAQIGDQYADLFLAAKNLSDAILLSDILRVNTEITKAPLSASMIKRYDEHHQDLTLLKALVRQQLPEKYKEIFFDQSKNGYAGYIDGGASQEEFYKFIKPILEKMDGTEELLVKLNREDLLRKQRTFDNGSIPHQIHLGELHAILRRQEDFYPFLKDNREKIEKILTFRIPYYVGPLARGNSRFAWMTRKSEETITPWNFEEVVDKGASAQSFIERMTNFDKNLPNEKVLPKHSLLYEYFTVYNELTKVKYVTEGMRKPAFLSGEQKKAIVDLLFKTNRKVTVKQLKEDYFKKIECFDSVEISGVEDRFNASLGTYHDLLKIIKDKDFLDNEENEDILEDIVLTLTLFEDREMIEERLKTYAHLFDDKVMKQLKRRRYTGWGRLSRKLINGIRDKQSGKTILDFLKSDGFANRNFMQLIHDDSLTFKEDIQKAQVSGQGDSLHEHIANLAGSPAIKKGILQTVKVVDELVKVMGRHKPENIVIEMARENQTTQKGQKNSRERMKRIEEGIKELGSQILKEHPVENTQLQNEKLYLYYLQNGRDMYVDQELDINRLSDYDVDHIVPQSFLKDDSIDNKVLTRSDKARGKSDNVPSEEVVKKMKNYWRQLLNAKLITQRKFDNLTKAERGGLSELDKAGFIKRQLVETRQITKHVAQILDSRMNTKYDENDKLIREVKVITLKSKLVSDFRKDFQFYKVREINNYHHAHDAYLNAVVGTALIKKYPKLESEFVYGDYKVYDVRKMIAKSEQEIGKATAKYFFYSNIMNFFKTEITLANGEIRKRPLIETNGETGEIVWDKGRDFATVRKVLSMPQVNIVKKTEVQTGGFSKESILPKRNSDKLIARKKDWDPKKYGGFDSPTVAYSVLVVAKVEKGKSKKLKSVKELLGITIMERSSFEKNPIDFLEAKGYKEVKKDLIIKLPKYSLFELENGRKRMLASAGELQKGNELALPSKYVNFLYLASHYEKLKGSPEDNEQKQLFVEQHKHYLDEIIEQISEFSKRVILADANLDKVLSAYNKHRDKPIREQAENIIHLFTLTNLGAPAAFKYFDTTIDRKRYTSTKEVLDATLIHQSITGLYETRIDLSQLGGDGGPAPGGSGGGGGTLQLDDEYRLYSPLVKPDQNIQFWLEQFPQAWAETAGMGLAKQVPPQVIQLKASATPVSVRQYPLSKEAQEGIRPHVQRLIQQGILVPVQSPWNTPLLPVRKPGTNDYRPVQDLREVNKRVQDIHPTVPNPYNLLCALPPQRSWYTVLDLKDAFFCLRLHPTSQPLFAFEWRDPGTGRTGQLTWTRLPQGFKNSPTIFNEALHRDLANFRIQHPQVTLLQYVDDLLLAGATKQDCLEGTKALLLELSDLGYRASAKKAQICRREVTYLGYSLRDGQRWLTEARKKTVVQIPAPTTAKQVREFLGTAGFCRLWIPGFATLAAPLYPLTKPKGEFSWAPEHQKAFDAIKKALLSAPALALPDVTKPFTLYVDERKGVARGVLTQTLGPWRRPVAYLSKKLDPVASGWPVCLKAIAAVAILVKDADKLTLGQNITVIAPHALENIVRQPPDRWMTNARMTHYQSLLLTERVTFAPPAALNPATLLPEETDEPVTHDCHQLLIEETGVRKDLTDIPLTGEVLTWFTDGSSYVVEGKRMAGAAVVDGTRTIWASSLPEGTSAQKAELMALTQALRLAEGKSINIYTDSRYAFATAHVHGAIYKQRGWLTSAGREIKNKEEILSLLEALHLPKRLAIIHCPGHQKAKDPISRGNQMADRVAKQAAQGVNLLAGKRTADGSEFEKRTADGSEFESPKKKAKVE

SEQ ID NO: 168 - protein, 2090 aa, synthetic construct
MPAAKRVKLDGGDKKYSIGLDIGTNSVGWAVITDEYKVPSKKFKVLGNTDRHSIKKNLIGALLFDSGETAEATRLKRTARRRYTRRKNRICYLQEIFSNEMAKVDDSFFHRLEESFLVEEDKKHERHPIFGNIVDEVAYHEKYPTIYHLRKKLVDSTDKADLRLIYLALAHMIKFRGHFLIEGDLNPDNSDVDKLFIQLVQTYNQLFEENPINASGVDAKAILSARLSKSRRLENLIAQLPGEKKNGLFGNLIALSLGLTPNFKSNFDLAEDAKLQLSKDTYDDDLDNLLAQIGDQYADLFLAAKNLSDAILLSDILRVNTEITKAPLSASMIKRYDEHHQDLTLLKALVRQQLPEKYKEIFFDQSKNGYAGYIDGGASQEEFYKFIKPILEKMDGTEELLVKLNREDLLRKQRTFDNGSIPHQIHLGELHAILRRQEDFYPFLKDNREKIEKILTFRIPYYVGPLARGNSRFAWMTRKSEETITPWNFEEVVDKGASAQSFIERMTNFDKNLPNEKVLPKHSLLYEYFTVYNELTKVKYVTEGMRKPAFLSGEQKKAIVDLLFKTNRKVTVKQLKEDYFKKIECFDSVEISGVEDRFNASLGTYHDLLKIIKDKDFLDNEENEDILEDIVLTLTLFEDREMIEERLKTYAHLFDDKVMKQLKRRRYTGWGRLSRKLINGIRDKQSGKTILDFLKSDGFANRNFMQLIHDDSLTFKEDIQKAQVSGQGDSLHEHIANLAGSPAIKKGILQTVKVVDELVKVMGRHKPENIVIEMARENQTTQKGQKNSRERMKRIEEGIKELGSQILKEHPVENTQLQNEKLYLYYLQNGRDMYVDQELDINRLSDYDVDHIVPQSFLKDDSIDNKVLTRSDKARGKSDNVPSEEVVKKMKNYWRQLLNAKLITQRKFDNLTKAERGGLSELDKAGFIKRQLVETRQITKHVAQILDSRMNTKYDENDKLIREVKVITLKSKLVSDFRKDFQFYKVREINNYHHAHDAYLNAVVGTALIKKYPKLESEFVYGDYKVYDVRKMIAKSEQEIGKATAKYFFYSNIMNFFKTEITLANGEIRKRPLIETNGETGEIVWDKGRDFATVRKVLSMPQVNIVKKTEVQTGGFSKESILPKRNSDKLIARKKDWDPKKYGGFDSPTVAYSVLVVAKVEKGKSKKLKSVKELLGITIMERSSFEKNPIDFLEAKGYKEVKKDLIIKLPKYSLFELENGRKRMLASAGELQKGNELALPSKYVNFLYLASHYEKLKGSPEDNEQKQLFVEQHKHYLDEIIEQISEFSKRVILADANLDKVLSAYNKHRDKPIREQAENIIHLFTLTNLGAPAAFKYFDTTIDRKRYTSTKEVLDATLIHQSITGLYETRIDLSQLGGDGGEAAAKPAPGGSGGTLQLDDEYRLYSPLVKPDQNIQFWLEQFPQAWAETAGMGLAKQVPPQVIQLKASATPVSVRQYPLSKEAQEGIRPHVQRLIQQGILVPVQSPWNTPLLPVRKPGTNDYRPVQDLREVNKRVQDIHPTVPNPYNLLCALPPQRSWYTVLDLKDAFFCLRLHPTSQPLFAFEWRDPGTGRTGQLTWTRLPQGFKNSPTIFNEALHRDLANFRIQHPQVTLLQYVDDLLLAGATKQDCLEGTKALLLELSDLGYRASAKKAQICRREVTYLGYSLRDGQRWLTEARKKTVVQIPAPTTAKQVREFLGTAGFCRLWIPGFATLAAPLYPLTKPKGEFSWAPEHQKAFDAIKKALLSAPALALPDVTKPFTLYVDERKGVARGVLTQTLGPWRRPVAYLSKKLDPVASGWPVCLKAIAAVAILVKDADKLTLGQNITVIAPHALENIVRQPPDRWMTNARMTHYQSLLLTERVTFAPPAALNPATLLPEETDEPVTHDCHQLLIEETGVRKDLTDIPLTGEVLTWFTDGSSYVVEGKRMAGAAVVDGTRTIWASSLPEGTSAQKAELMALTQALRLAEGKSINIYTDSRYAFATAHVHGAIYKQRGWLTSAGREIKNKEEILSLLEALHLPKRLAIIHCPGHQKAKDPISRGNQMADRVAKQAAQGVNLLAGKRTADGSEFEKRTADGSEFESPKKKAKVE

SEQ ID NO: 169 - protein, 2088 aa, synthetic construct
MPAAKRVKLDGGDKKYSIGLDIGTNSVGWAVITDEYKVPSKKFKVLGNTDRHSIKKNLIGALLFDSGETAEATRLKRTARRRYTRRKNRICYLQEIFSNEMAKVDDSFFHRLEESFLVEEDKKHERHPIFGNIVDEVAYHEKYPTIYHLRKKLVDSTDKADLRLIYLALAHMIKFRGHFLIEGDLNPDNSDVDKLFIQLVQTYNQLFEENPINASGVDAKAILSARLSKSRRLENLIAQLPGEKKNGLFGNLIALSLGLTPNFKSNFDLAEDAKLQLSKDTYDDDLDNLLAQIGDQYADLFLAAKNLSDAILLSDILRVNTEITKAPLSASMIKRYDEHHQDLTLLKALVRQQLPEKYKEIFFDQSKNGYAGYIDGGASQEEFYKFIKPILEKMDGTEELLVKLNREDLLRKQRTFDNGSIPHQIHLGELHAILRRQEDFYPFLKDNREKIEKILTFRIPYYVGPLARGNSRFAWMTRKSEETITPWNFEEVVDKGASAQSFIERMTNFDKNLPNEKVLPKHSLLYEYFTVYNELTKVKYVTEGMRKPAFLSGEQKKAIVDLLFKTNRKVTVKQLKEDYFKKIECFDSVEISGVEDRFNASLGTYHDLLKIIKDKDFLDNEENEDILEDIVLTLTLFEDREMIEERLKTYAHLFDDKVMKQLKRRRYTGWGRLSRKLINGIRDKQSGKTILDFLKSDGFANRNFMQLIHDDSLTFKEDIQKAQVSGQGDSLHEHIANLAGSPAIKKGILQTVKVVDELVKVMGRHKPENIVIEMARENQTTQKGQKNSRERMKRIEEGIKELGSQILKEHPVENTQLQNEKLYLYYLQNGRDMYVDQELDINRLSDYDVDHIVPQSFLKDDSIDNKVLTRSDKARGKSDNVPSEEVVKKMKNYWRQLLNAKLITQRKFDNLTKAERGGLSELDKAGFIKRQLVETRQITKHVAQILDSRMNTKYDENDKLIREVKVITLKSKLVSDFRKDFQFYKVREINNYHHAHDAYLNAVVGTALIKKYPKLESEFVYGDYKVYDVRKMIAKSEQEIGKATAKYFFYSNIMNFFKTEITLANGEIRKRPLIETNGETGEIVWDKGRDFATVRKVLSMPQVNIVKKTEVQTGGFSKESILPKRNSDKLIARKKDWDPKKYGGFDSPTVAYSVLVVAKVEKGKSKKLKSVKELLGITIMERSSFEKNPIDFLEAKGYKEVKKDLIIKLPKYSLFELENGRKRMLASAGELQKGNELALPSKYVNFLYLASHYEKLKGSPEDNEQKQLFVEQHKHYLDEIIEQISEFSKRVILADANLDKVLSAYNKHRDKPIREQAENIIHLFTLTNLGAPAAFKYFDTTIDRKRYTSTKEVLDATLIHQSITGLYETRIDLSQLGGDGGGGGPAPGGSGGTLQLDDEYRLYSPLVKPDQNIQFWLEQFPQAWAETAGMGLAKQVPPQVIQLKASATPVSVRQYPLSKEAQEGIRPHVQRLIQQGILVPVQSPWNTPLLPVRKPGTNDYRPVQDLREVNKRVQDIHPTVPNPYNLLCALPPQRSWYTVLDLKDAFFCLRLHPTSQPLFAFEWRDPGTGRTGQLTWTRLPQGFKNSPTIFNEALHRDLANFRIQHPQVTLLQYVDDLLLAGATKQDCLEGTKALLLELSDLGYRASAKKAQICRREVTYLGYSLRDGQRWLTEARKKTVVQIPAPTTAKQVREFLGTAGFCRLWIPGFATLAAPLYPLTKPKGEFSWAPEHQKAFDAIKKALLSAPALALPDVTKPFTLYVDERKGVARGVLTQTLGPWRRPVAYLSKKLDPVASGWPVCLKAIAAVAILVKDADKLTLGQNITVIAPHALENIVRQPPDRWMTNARMTHYQSLLLTERVTFAPPAALNPATLLPEETDEPVTHDCHQLLIEETGVRKDLTDIPLTGEVLTWFTDGSSYVVEGKRMAGAAVVDGTRTIWASSLPEGTSAQKAELMALTQALRLAEGKSINIYTDSRYAFATAHVHGAIYKQRGWLTSAGREIKNKEEILSLLEALHLPKRLAIIHCPGHQKAKDPISRGNQMADRVAKQAAQGVNLLAGKRTADGSEFEKRTADGSEFESPKKKAKVE

SEQ ID NO: 170 - protein, 2090 aa, synthetic construct
MPAAKRVKLDGGDKKYSIGLDIGTNSVGWAVITDEYKVPSKKFKVLGNTDRHSIKKNLIGALLFDSGETAEATRLKRTARRRYTRRKNRICYLQEIFSNEMAKVDDSFFHRLEESFLVEEDKKHERHPIFGNIVDEVAYHEKYPTIYHLRKKLVDSTDKADLRLIYLALAHMIKFRGHFLIEGDLNPDNSDVDKLFIQLVQTYNQLFEENPINASGVDAKAILSARLSKSRRLENLIAQLPGEKKNGLFGNLIALSLGLTPNFKSNFDLAEDAKLQLSKDTYDDDLDNLLAQIGDQYADLFLAAKNLSDAILLSDILRVNTEITKAPLSASMIKRYDEHHQDLTLLKALVRQQLPEKYKEIFFDQSKNGYAGYIDGGASQEEFYKFIKPILEKMDGTEELLVKLNREDLLRKQRTFDNGSIPHQIHLGELHAILRRQEDFYPFLKDNREKIEKILTFRIPYYVGPLARGNSRFAWMTRKSEETITPWNFEEVVDKGASAQSFIERMTNFDKNLPNEKVLPKHSLLYEYFTVYNELTKVKYVTEGMRKPAFLSGEQKKAIVDLLFKTNRKVTVKQLKEDYFKKIECFDSVEISGVEDRFNASLGTYHDLLKIIKDKDFLDNEENEDILEDIVLTLTLFEDREMIEERLKTYAHLFDDKVMKQLKRRRYTGWGRLSRKLINGIRDKQSGKTILDFLKSDGFANRNFMQLIHDDSLTFKEDIQKAQVSGQGDSLHEHIANLAGSPAIKKGILQTVKVVDELVKVMGRHKPENIVIEMARENQTTQKGQKNSRERMKRIEEGIKELGSQILKEHPVENTQLQNEKLYLYYLQNGRDMYVDQELDINRLSDYDVDHIVPQSFLKDDSIDNKVLTRSDKARGKSDNVPSEEVVKKMKNYWRQLLNAKLITQRKFDNLTKAERGGLSELDKAGFIKRQLVETRQITKHVAQILDSRMNTKYDENDKLIREVKVITLKSKLVSDFRKDFQFYKVREINNYHHAHDAYLNAVVGTALIKKYPKLESEFVYGDYKVYDVRKMIAKSEQEIGKATAKYFFYSNIMNFFKTEITLANGEIRKRPLIETNGETGEIVWDKGRDFATVRKVLSMPQVNIVKKTEVQTGGFSKESILPKRNSDKLIARKKDWDPKKYGGFDSPTVAYSVLVVAKVEKGKSKKLKSVKELLGITIMERSSFEKNPIDFLEAKGYKEVKKDLIIKLPKYSLFELENGRKRMLASAGELQKGNELALPSKYVNFLYLASHYEKLKGSPEDNEQKQLFVEQHKHYLDEIIEQISEFSKRVILADANLDKVLSAYNKHRDKPIREQAENIIHLFTLTNLGAPAAFKYFDTTIDRKRYTSTKEVLDATLIHQSITGLYETRIDLSQLGGDGGGSSGGSEAAAKGGTLQLDDEYRLYSPLVKPDQNIQFWLEQFPQAWAETAGMGLAKQVPPQVIQLKASATPVSVRQYPLSKEAQEGIRPHVQRLIQQGILVPVQSPWNTPLLPVRKPGTNDYRPVQDLREVNKRVQDIHPTVPNPYNLLCALPPQRSWYTVLDLKDAFFCLRLHPTSQPLFAFEWRDPGTGRTGQLTWTRLPQGFKNSPTIFNEALHRDLANFRIQHPQVTLLQYVDDLLLAGATKQDCLEGTKALLLELSDLGYRASAKKAQICRREVTYLGYSLRDGQRWLTEARKKTVVQIPAPTTAKQVREFLGTAGFCRLWIPGFATLAAPLYPLTKPKGEFSWAPEHQKAFDAIKKALLSAPALALPDVTKPFTLYVDERKGVARGVLTQTLGPWRRPVAYLSKKLDPVASGWPVCLKAIAAVAILVKDADKLTLGQNITVIAPHALENIVRQPPDRWMTNARMTHYQSLLLTERVTFAPPAALNPATLLPEETDEPVTHDCHQLLIEETGVRKDLTDIPLTGEVLTWFTDGSSYVVEGKRMAGAAVVDGTRTIWASSLPEGTSAQKAELMALTQALRLAEGKSINIYTDSRYAFATAHVHGAIYKQRGWLTSAGREIKNKEEILSLLEALHLPKRLAIIHCPGHQKAKDPISRGNQMADRVAKQAAQGVNLLAGKRTADGSEFEKRTADGSEFESPKKKAKVE

SEQ ID NO: 171 - protein, 2088 aa, synthetic construct
MPAAKRVKLDGGDKKYSIGLDIGTNSVGWAVITDEYKVPSKKFKVLGNTDRHSIKKNLIGALLFDSGETAEATRLKRTARRRYTRRKNRICYLQEIFSNEMAKVDDSFFHRLEESFLVEEDKKHERHPIFGNIVDEVAYHEKYPTIYHLRKKLVDSTDKADLRLIYLALAHMIKFRGHFLIEGDLNPDNSDVDKLFIQLVQTYNQLFEENPINASGVDAKAILSARLSKSRRLENLIAQLPGEKKNGLFGNLIALSLGLTPNFKSNFDLAEDAKLQLSKDTYDDDLDNLLAQIGDQYADLFLAAKNLSDAILLSDILRVNTEITKAPLSASMIKRYDEHHQDLTLLKALVRQQLPEKYKEIFFDQSKNGYAGYIDGGASQEEFYKFIKPILEKMDGTEELLVKLNREDLLRKQRTFDNGSIPHQIHLGELHAILRRQEDFYPFLKDNREKIEKILTFRIPYYVGPLARGNSRFAWMTRKSEETITPWNFEEVVDKGASAQSFIERMTNFDKNLPNEKVLPKHSLLYEYFTVYNELTKVKYVTEGMRKPAFLSGEQKKAIVDLLFKTNRKVTVKQLKEDYFKKIECFDSVEISGVEDRFNASLGTYHDLLKIIKDKDFLDNEENEDILEDIVLTLTLFEDREMIEERLKTYAHLFDDKVMKQLKRRRYTGWGRLSRKLINGIRDKQSGKTILDFLKSDGFANRNFMQLIHDDSLTFKEDIQKAQVSGQGDSLHEHIANLAGSPAIKKGILQTVKVVDELVKVMGRHKPENIVIEMARENQTTQKGQKNSRERMKRIEEGIKELGSQILKEHPVENTQLQNEKLYLYYLQNGRDMYVDQELDINRLSDYDVDHIVPQSFLKDDSIDNKVLTRSDKARGKSDNVPSEEVVKKMKNYWRQLLNAKLITQRKFDNLTKAERGGLSELDKAGFIKRQLVETRQITKHVAQILDSRMNTKYDENDKLIREVKVITLKSKLVSDFRKDFQFYKVREINNYHHAHDAYLNAVVGTALIKKYPKLESEFVYGDYKVYDVRKMIAKSEQEIGKATAKYFFYSNIMNFFKTEITLANGEIRKRPLIETNGETGEIVWDKGRDFATVRKVLSMPQVNIVKKTEVQTGGFSKESILPKRNSDKLIARKKDWDPKKYGGFDSPTVAYSVLVVAKVEKGKSKKLKSVKELLGITIMERSSFEKNPIDFLEAKGYKEVKKDLIIKLPKYSLFELENGRKRMLASAGELQKGNELALPSKYVNFLYLASHYEKLKGSPEDNEQKQLFVEQHKHYLDEIIEQISEFSKRVILADANLDKVLSAYNKHRDKPIREQAENIIHLFTLTNLGAPAAFKYFDTTIDRKRYTSTKEVLDATLIHQSITGLYETRIDLSQLGGDGGGSSPAPGGSGGTLQLDDEYRLYSPLVKPDQNIQFWLEQFPQAWAETAGMGLAKQVPPQVIQLKASATPVSVRQYPLSKEAQEGIRPHVQRLIQQGILVPVQSPWNTPLLPVRKPGTNDYRPVQDLREVNKRVQDIHPTVPNPYNLLCALPPQRSWYTVLDLKDAFFCLRLHPTSQPLFAFEWRDPGTGRTGQLTWTRLPQGFKNSPTIFNEALHRDLANFRIQHPQVTLLQYVDDLLLAGATKQDCLEGTKALLLELSDLGYRASAKKAQICRREVTYLGYSLRDGQRWLTEARKKTVVQIPAPTTAKQVREFLGTAGFCRLWIPGFATLAAPLYPLTKPKGEFSWAPEHQKAFDAIKKALLSAPALALPDVTKPFTLYVDERKGVARGVLTQTLGPWRRPVAYLSKKLDPVASGWPVCLKAIAAVAILVKDADKLTLGQNITVIAPHALENIVRQPPDRWMTNARMTHYQSLLLTERVTFAPPAALNPATLLPEETDEPVTHDCHQLLIEETGVRKDLTDIPLTGEVLTWFTDGSSYVVEGKRMAGAAVVDGTRTIWASSLPEGTSAQKAELMALTQALRLAEGKSINIYTDSRYAFATAHVHGAIYKQRGWLTSAGREIKNKEEILSLLEALHLPKRLAIIHCPGHQKAKDPISRGNQMADRVAKQAAQGVNLLAGKRTADGSEFEKRTADGSEFESPKKKAKVE

SEQ ID NO: 172 - protein, 2090 aa, synthetic construct
MPAAKRVKLDGGDKKYSIGLDIGTNSVGWAVITDEYKVPSKKFKVLGNTDRHSIKKNLIGALLFDSGETAEATRLKRTARRRYTRRKNRICYLQEIFSNEMAKVDDSFFHRLEESFLVEEDKKHERHPIFGNIVDEVAYHEKYPTIYHLRKKLVDSTDKADLRLIYLALAHMIKFRGHFLIEGDLNPDNSDVDKLFIQLVQTYNQLFEENPINASGVDAKAILSARLSKSRRLENLIAQLPGEKKNGLFGNLIALSLGLTPNFKSNFDLAEDAKLQLSKDTYDDDLDNLLAQIGDQYADLFLAAKNLSDAILLSDILRVNTEITKAPLSASMIKRYDEHHQDLTLLKALVRQQLPEKYKEIFFDQSKNGYAGYIDGGASQEEFYKFIKPILEKMDGTEELLVKLNREDLLRKQRTFDNGSIPHQIHLGELHAILRRQEDFYPFLKDNREKIEKILTFRIPYYVGPLARGNSRFAWMTRKSEETITPWNFEEVVDKGASAQSFIERMTNFDKNLPNEKVLPKHSLLYEYFTVYNELTKVKYVTEGMRKPAFLSGEQKKAIVDLLFKTNRKVTVKQLKEDYFKKIECFDSVEISGVEDRFNASLGTYHDLLKIIKDKDFLDNEENEDILEDIVLTLTLFEDREMIEERLKTYAHLFDDKVMKQLKRRRYTGWGRLSRKLINGIRDKQSGKTILDFLKSDGFANRNFMQLIHDDSLTFKEDIQKAQVSGQGDSLHEHIANLAGSPAIKKGILQTVKVVDELVKVMGRHKPENIVIEMARENQTTQKGQKNSRERMKRIEEGIKELGSQILKEHPVENTQLQNEKLYLYYLQNGRDMYVDQELDINRLSDYDVDHIVPQSFLKDDSIDNKVLTRSDKARGKSDNVPSEEVVKKMKNYWRQLLNAKLITQRKFDNLTKAERGGLSELDKAGFIKRQLVETRQITKHVAQILDSRMNTKYDENDKLIREVKVITLKSKLVSDFRKDFQFYKVREINNYHHAHDAYLNAVVGTALIKKYPKLESEFVYGDYKVYDVRKMIAKSEQEIGKATAKYFFYSNIMNFFKTEITLANGEIRKRPLIETNGETGEIVWDKGRDFATVRKVLSMPQVNIVKKTEVQTGGFSKESILPKRNSDKLIARKKDWDPKKYGGFDSPTVAYSVLVVAKVEKGKSKKLKSVKELLGITIMERSSFEKNPIDFLEAKGYKEVKKDLIIKLPKYSLFELENGRKRMLASAGELQKGNELALPSKYVNFLYLASHYEKLKGSPEDNEQKQLFVEQHKHYLDEIIEQISEFSKRVILADANLDKVLSAYNKHRDKPIREQAENIIHLFTLTNLGAPAAFKYFDTTIDRKRYTSTKEVLDATLIHQSITGLYETRIDLSQLGGDGGGGSGGGEAAAKGGTLQLDDEYRLYSPLVKPDQNIQFWLEQFPQAWAETAGMGLAKQVPPQVIQLKASATPVSVRQYPLSKEAQEGIRPHVQRLIQQGILVPVQSPWNTPLLPVRKPGTNDYRPVQDLREVNKRVQDIHPTVPNPYNLLCALPPQRSWYTVLDLKDAFFCLRLHPTSQPLFAFEWRDPGTGRTGQLTWTRLPQGFKNSPTIFNEALHRDLANFRIQHPQVTLLQYVDDLLLAGATKQDCLEGTKALLLELSDLGYRASAKKAQICRREVTYLGYSLRDGQRWLTEARKKTVVQIPAPTTAKQVREFLGTAGFCRLWIPGFATLAAPLYPLTKPKGEFSWAPEHQKAFDAIKKALLSAPALALPDVTKPFTLYVDERKGVARGVLTQTLGPWRRPVAYLSKKLDPVASGWPVCLKAIAAVAILVKDADKLTLGQNITVIAPHALENIVRQPPDRWMTNARMTHYQSLLLTERVTFAPPAALNPATLLPEETDEPVTHDCHQLLIEETGVRKDLTDIPLTGEVLTWFTDGSSYVVEGKRMAGAAVVDGTRTIWASSLPEGTSAQKAELMALTQALRLAEGKSINIYTDSRYAFATAHVHGAIYKQRGWLTSAGREIKNKEEILSLLEALHLPKRLAIIHCPGHQKAKDPISRGNQMADRVAKQAAQGVNLLAGKRTADGSEFEKRTADGSEFESPKKKAKVE

SEQ ID NO: 173 - protein, 2088 aa, synthetic construct
MPAAKRVKLDGGDKKYSIGLDIGTNSVGWAVITDEYKVPSKKFKVLGNTDRHSIKKNLIGALLFDSGETAEATRLKRTARRRYTRRKNRICYLQEIFSNEMAKVDDSFFHRLEESFLVEEDKKHERHPIFGNIVDEVAYHEKYPTIYHLRKKLVDSTDKADLRLIYLALAHMIKFRGHFLIEGDLNPDNSDVDKLFIQLVQTYNQLFEENPINASGVDAKAILSARLSKSRRLENLIAQLPGEKKNGLFGNLIALSLGLTPNFKSNFDLAEDAKLQLSKDTYDDDLDNLLAQIGDQYADLFLAAKNLSDAILLSDILRVNTEITKAPLSASMIKRYDEHHQDLTLLKALVRQQLPEKYKEIFFDQSKNGYAGYIDGGASQEEFYKFIKPILEKMDGTEELLVKLNREDLLRKQRTFDNGSIPHQIHLGELHAILRRQEDFYPFLKDNREKIEKILTFRIPYYVGPLARGNSRFAWMTRKSEETITPWNFEEVVDKGASAQSFIERMTNFDKNLPNEKVLPKHSLLYEYFTVYNELTKVKYVTEGMRKPAFLSGEQKKAIVDLLFKTNRKVTVKQLKEDYFKKIECFDSVEISGVEDRFNASLGTYHDLLKIIKDKDFLDNEENEDILEDIVLTLTLFEDREMIEERLKTYAHLFDDKVMKQLKRRRYTGWGRLSRKLINGIRDKQSGKTILDFLKSDGFANRNFMQLIHDDSLTFKEDIQKAQVSGQGDSLHEHIANLAGSPAIKKGILQTVKVVDELVKVMGRHKPENIVIEMARENQTTQKGQKNSRERMKRIEEGIKELGSQILKEHPVENTQLQNEKLYLYYLQNGRDMYVDQELDINRLSDYDVDHIVPQSFLKDDSIDNKVLTRSDKARGKSDNVPSEEVVKKMKNYWRQLLNAKLITQRKFDNLTKAERGGLSELDKAGFIKRQLVETRQITKHVAQILDSRMNTKYDENDKLIREVKVITLKSKLVSDFRKDFQFYKVREINNYHHAHDAYLNAVVGTALIKKYPKLESEFVYGDYKVYDVRKMIAKSEQEIGKATAKYFFYSNIMNFFKTEITLANGEIRKRPLIETNGETGEIVWDKGRDFATVRKVLSMPQVNIVKKTEVQTGGFSKESILPKRNSDKLIARKKDWDPKKYGGFDSPTVAYSVLVVAKVEKGKSKKLKSVKELLGITIMERSSFEKNPIDFLEAKGYKEVKKDLIIKLPKYSLFELENGRKRMLASAGELQKGNELALPSKYVNFLYLASHYEKLKGSPEDNEQKQLFVEQHKHYLDEIIEQISEFSKRVILADANLDKVLSAYNKHRDKPIREQAENIIHLFTLTNLGAPAAFKYFDTTIDRKRYTSTKEVLDATLIHQSITGLYETRIDLSQLGGDGGPAPGGGGGSGGTLQLDDEYRLYSPLVKPDQNIQFWLEQFPQAWAETAGMGLAKQVPPQVIQLKASATPVSVRQYPLSKEAQEGIRPHVQRLIQQGILVPVQSPWNTPLLPVRKPGTNDYRPVQDLREVNKRVQDIHPTVPNPYNLLCALPPQRSWYTVLDLKDAFFCLRLHPTSQPLFAFEWRDPGTGRTGQLTWTRLPQGFKNSPTIFNEALHRDLANFRIQHPQVTLLQYVDDLLLAGATKQDCLEGTKALLLELSDLGYRASAKKAQICRREVTYLGYSLRDGQRWLTEARKKTVVQIPAPTTAKQVREFLGTAGFCRLWIPGFATLAAPLYPLTKPKGEFSWAPEHQKAFDAIKKALLSAPALALPDVTKPFTLYVDERKGVARGVLTQTLGPWRRPVAYLSKKLDPVASGWPVCLKAIAAVAILVKDADKLTLGQNITVIAPHALENIVRQPPDRWMTNARMTHYQSLLLTERVTFAPPAALNPATLLPEETDEPVTHDCHQLLIEETGVRKDLTDIPLTGEVLTWFTDGSSYVVEGKRMAGAAVVDGTRTIWASSLPEGTSAQKAELMALTQALRLAEGKSINIYTDSRYAFATAHVHGAIYKQRGWLTSAGREIKNKEEILSLLEALHLPKRLAIIHCPGHQKAKDPISRGNQMADRVAKQAAQGVNLLAGKRTADGSEFEKRTADGSEFESPKKKAKVE

SEQ ID NO: 174 - protein, 2085 aa, synthetic construct
MPAAKRVKLDGGDKKYSIGLDIGTNSVGWAVITDEYKVPSKKFKVLGNTDRHSIKKNLIGALLFDSGETAEATRLKRTARRRYTRRKNRICYLQEIFSNEMAKVDDSFFHRLEESFLVEEDKKHERHPIFGNIVDEVAYHEKYPTIYHLRKKLVDSTDKADLRLIYLALAHMIKFRGHFLIEGDLNPDNSDVDKLFIQLVQTYNQLFEENPINASGVDAKAILSARLSKSRRLENLIAQLPGEKKNGLFGNLIALSLGLTPNFKSNFDLAEDAKLQLSKDTYDDDLDNLLAQIGDQYADLFLAAKNLSDAILLSDILRVNTEITKAPLSASMIKRYDEHHQDLTLLKALVRQQLPEKYKEIFFDQSKNGYAGYIDGGASQEEFYKFIKPILEKMDGTEELLVKLNREDLLRKQRTFDNGSIPHQIHLGELHAILRRQEDFYPFLKDNREKIEKILTFRIPYYVGPLARGNSRFAWMTRKSEETITPWNFEEVVDKGASAQSFIERMTNFDKNLPNEKVLPKHSLLYEYFTVYNELTKVKYVTEGMRKPAFLSGEQKKAIVDLLFKTNRKVTVKQLKEDYFKKIECFDSVEISGVEDRFNASLGTYHDLLKIIKDKDFLDNEENEDILEDIVLTLTLFEDREMIEERLKTYAHLFDDKVMKQLKRRRYTGWGRLSRKLINGIRDKQSGKTILDFLKSDGFANRNFMQLIHDDSLTFKEDIQKAQVSGQGDSLHEHIANLAGSPAIKKGILQTVKVVDELVKVMGRHKPENIVIEMARENQTTQKGQKNSRERMKRIEEGIKELGSQILKEHPVENTQLQNEKLYLYYLQNGRDMYVDQELDINRLSDYDVDHIVPQSFLKDDSIDNKVLTRSDKARGKSDNVPSEEVVKKMKNYWRQLLNAKLITQRKFDNLTKAERGGLSELDKAGFIKRQLVETRQITKHVAQILDSRMNTKYDENDKLIREVKVITLKSKLVSDFRKDFQFYKVREINNYHHAHDAYLNAVVGTALIKKYPKLESEFVYGDYKVYDVRKMIAKSEQEIGKATAKYFFYSNIMNFFKTEITLANGEIRKRPLIETNGETGEIVWDKGRDFATVRKVLSMPQVNIVKKTEVQTGGFSKESILPKRNSDKLIARKKDWDPKKYGGFDSPTVAYSVLVVAKVEKGKSKKLKSVKELLGITIMERSSFEKNPIDFLEAKGYKEVKKDLIIKLPKYSLFELENGRKRMLASAGELQKGNELALPSKYVNFLYLASHYEKLKGSPEDNEQKQLFVEQHKHYLDEIIEQISEFSKRVILADANLDKVLSAYNKHRDKPIREQAENIIHLFTLTNLGAPAAFKYFDTTIDRKRYTSTKEVLDATLIHQSITGLYETRIDLSQLGGDGGGSSGGGGGTLQLDDEYRLYSPLVKPDQNIQFWLEQFPQAWAETAGMGLAKQVPPQVIQLKASATPVSVRQYPLSKEAQEGIRPHVQRLIQQGILVPVQSPWNTPLLPVRKPGTNDYRPVQDLREVNKRVQDIHPTVPNPYNLLCALPPQRSWYTVLDLKDAFFCLRLHPTSQPLFAFEWRDPGTGRTGQLTWTRLPQGFKNSPTIFNEALHRDLANFRIQHPQVTLLQYVDDLLLAGATKQDCLEGTKALLLELSDLGYRASAKKAQICRREVTYLGYSLRDGQRWLTEARKKTVVQIPAPTTAKQVREFLGTAGFCRLWIPGFATLAAPLYPLTKPKGEFSWAPEHQKAFDAIKKALLSAPALALPDVTKPFTLYVDERKGVARGVLTQTLGPWRRPVAYLSKKLDPVASGWPVCLKAIAAVAILVKDADKLTLGQNITVIAPHALENIVRQPPDRWMTNARMTHYQSLLLTERVTFAPPAALNPATLLPEETDEPVTHDCHQLLIEETGVRKDLTDIPLTGEVLTWFTDGSSYVVEGKRMAGAAVVDGTRTIWASSLPEGTSAQKAELMALTQALRLAEGKSINIYTDSRYAFATAHVHGAIYKQRGWLTSAGREIKNKEEILSLLEALHLPKRLAIIHCPGHQKAKDPISRGNQMADRVAKQAAQGVNLLAGKRTADGSEFEKRTADGSEFESPKKKAKVE

SEQ ID NO: 175 - protein, 2088 aa, synthetic construct
MPAAKRVKLDGGDKKYSIGLDIGTNSVGWAVITDEYKVPSKKFKVLGNTDRHSIKKNLIGALLFDSGETAEATRLKRTARRRYTRRKNRICYLQEIFSNEMAKVDDSFFHRLEESFLVEEDKKHERHPIFGNIVDEVAYHEKYPTIYHLRKKLVDSTDKADLRLIYLALAHMIKFRGHFLIEGDLNPDNSDVDKLFIQLVQTYNQLFEENPINASGVDAKAILSARLSKSRRLENLIAQLPGEKKNGLFGNLIALSLGLTPNFKSNFDLAEDAKLQLSKDTYDDDLDNLLAQIGDQYADLFLAAKNLSDAILLSDILRVNTEITKAPLSASMIKRYDEHHQDLTLLKALVRQQLPEKYKEIFFDQSKNGYAGYIDGGASQEEFYKFIKPILEKMDGTEELLVKLNREDLLRKQRTFDNGSIPHQIHLGELHAILRRQEDFYPFLKDNREKIEKILTFRIPYYVGPLARGNSRFAWMTRKSEETITPWNFEEVVDKGASAQSFIERMTNFDKNLPNEKVLPKHSLLYEYFTVYNELTKVKYVTEGMRKPAFLSGEQKKAIVDLLFKTNRKVTVKQLKEDYFKKIECFDSVEISGVEDRFNASLGTYHDLLKIIKDKDFLDNEENEDILEDIVLTLTLFEDREMIEERLKTYAHLFDDKVMKQLKRRRYTGWGRLSRKLINGIRDKQSGKTILDFLKSDGFANRNFMQLIHDDSLTFKEDIQKAQVSGQGDSLHEHIANLAGSPAIKKGILQTVKVVDELVKVMGRHKPENIVIEMARENQTTQKGQKNSRERMKRIEEGIKELGSQILKEHPVENTQLQNEKLYLYYLQNGRDMYVDQELDINRLSDYDVDHIVPQSFLKDDSIDNKVLTRSDKARGKSDNVPSEEVVKKMKNYWRQLLNAKLITQRKFDNLTKAERGGLSELDKAGFIKRQLVETRQITKHVAQILDSRMNTKYDENDKLIREVKVITLKSKLVSDFRKDFQFYKVREINNYHHAHDAYLNAVVGTALIKKYPKLESEFVYGDYKVYDVRKMIAKSEQEIGKATAKYFFYSNIMNFFKTEITLANGEIRKRPLIETNGETGEIVWDKGRDFATVRKVLSMPQVNIVKKTEVQTGGFSKESILPKRNSDKLIARKKDWDPKKYGGFDSPTVAYSVLVVAKVEKGKSKKLKSVKELLGITIMERSSFEKNPIDFLEAKGYKEVKKDLIIKLPKYSLFELENGRKRMLASAGELQKGNELALPSKYVNFLYLASHYEKLKGSPEDNEQKQLFVEQHKHYLDEIIEQISEFSKRVILADANLDKVLSAYNKHRDKPIREQAENIIHLFTLTNLGAPAAFKYFDTTIDRKRYTSTKEVLDATLIHQSITGLYETRIDLSQLGGDGGGGSPAPGSSGGTLQLDDEYRLYSPLVKPDQNIQFWLEQFPQAWAETAGMGLAKQVPPQVIQLKASATPVSVRQYPLSKEAQEGIRPHVQRLIQQGILVPVQSPWNTPLLPVRKPGTNDYRPVQDLREVNKRVQDIHPTVPNPYNLLCALPPQRSWYTVLDLKDAFFCLRLHPTSQPLFAFEWRDPGTGRTGQLTWTRLPQGFKNSPTIFNEALHRDLANFRIQHPQVTLLQYVDDLLLAGATKQDCLEGTKALLLELSDLGYRASAKKAQICRREVTYLGYSLRDGQRWLTEARKKTVVQIPAPTTAKQVREFLGTAGFCRLWIPGFATLAAPLYPLTKPKGEFSWAPEHQKAFDAIKKALLSAPALALPDVTKPFTLYVDERKGVARGVLTQTLGPWRRPVAYLSKKLDPVASGWPVCLKAIAAVAILVKDADKLTLGQNITVIAPHALENIVRQPPDRWMTNARMTHYQSLLLTERVTFAPPAALNPATLLPEETDEPVTHDCHQLLIEETGVRKDLTDIPLTGEVLTWFTDGSSYVVEGKRMAGAAVVDGTRTIWASSLPEGTSAQKAELMALTQALRLAEGKSINIYTDSRYAFATAHVHGAIYKQRGWLTSAGREIKNKEEILSLLEALHLPKRLAIIHCPGHQKAKDPISRGNQMADRVAKQAAQGVNLLAGKRTADGSEFEKRTADGSEFESPKKKAKVE

SEQ ID NO: 176 - protein, 2085 aa, synthetic construct
MPAAKRVKLDGGDKKYSIGLDIGTNSVGWAVITDEYKVPSKKFKVLGNTDRHSIKKNLIGALLFDSGETAEATRLKRTARRRYTRRKNRICYLQEIFSNEMAKVDDSFFHRLEESFLVEEDKKHERHPIFGNIVDEVAYHEKYPTIYHLRKKLVDSTDKADLRLIYLALAHMIKFRGHFLIEGDLNPDNSDVDKLFIQLVQTYNQLFEENPINASGVDAKAILSARLSKSRRLENLIAQLPGEKKNGLFGNLIALSLGLTPNFKSNFDLAEDAKLQLSKDTYDDDLDNLLAQIGDQYADLFLAAKNLSDAILLSDILRVNTEITKAPLSASMIKRYDEHHQDLTLLKALVRQQLPEKYKEIFFDQSKNGYAGYIDGGASQEEFYKFIKPILEKMDGTEELLVKLNREDLLRKQRTFDNGSIPHQIHLGELHAILRRQEDFYPFLKDNREKIEKILTFRIPYYVGPLARGNSRFAWMTRKSEETITPWNFEEVVDKGASAQSFIERMTNFDKNLPNEKVLPKHSLLYEYFTVYNELTKVKYVTEGMRKPAFLSGEQKKAIVDLLFKTNRKVTVKQLKEDYFKKIECFDSVEISGVEDRFNASLGTYHDLLKIIKDKDFLDNEENEDILEDIVLTLTLFEDREMIEERLKTYAHLFDDKVMKQLKRRRYTGWGRLSRKLINGIRDKQSGKTILDFLKSDGFANRNFMQLIHDDSLTFKEDIQKAQVSGQGDSLHEHIANLAGSPAIKKGILQTVKVVDELVKVMGRHKPENIVIEMARENQTTQKGQKNSRERMKRIEEGIKELGSQILKEHPVENTQLQNEKLYLYYLQNGRDMYVDQELDINRLSDYDVDHIVPQSFLKDDSIDNKVLTRSDKARGKSDNVPSEEVVKKMKNYWRQLLNAKLITQRKFDNLTKAERGGLSELDKAGFIKRQLVETRQITKHVAQILDSRMNTKYDENDKLIREVKVITLKSKLVSDFRKDFQFYKVREINNYHHAHDAYLNAVVGTALIKKYPKLESEFVYGDYKVYDVRKMIAKSEQEIGKATAKYFFYSNIMNFFKTEITLANGEIRKRPLIETNGETGEIVWDKGRDFATVRKVLSMPQVNIVKKTEVQTGGFSKESILPKRNSDKLIARKKDWDPKKYGGFDSPTVAYSVLVVAKVEKGKSKKLKSVKELLGITIMERSSFEKNPIDFLEAKGYKEVKKDLIIKLPKYSLFELENGRKRMLASAGELQKGNELALPSKYVNFLYLASHYEKLKGSPEDNEQKQLFVEQHKHYLDEIIEQISEFSKRVILADANLDKVLSAYNKHRDKPIREQAENIIHLFTLTNLGAPAAFKYFDTTIDRKRYTSTKEVLDATLIHQSITGLYETRIDLSQLGGDGGGGSGSSGGTLQLDDEYRLYSPLVKPDQNIQFWLEQFPQAWAETAGMGLAKQVPPQVIQLKASATPVSVRQYPLSKEAQEGIRPHVQRLIQQGILVPVQSPWNTPLLPVRKPGTNDYRPVQDLREVNKRVQDIHPTVPNPYNLLCALPPQRSWYTVLDLKDAFFCLRLHPTSQPLFAFEWRDPGTGRTGQLTWTRLPQGFKNSPTIFNEALHRDLANFRIQHPQVTLLQYVDDLLLAGATKQDCLEGTKALLLELSDLGYRASAKKAQICRREVTYLGYSLRDGQRWLTEARKKTVVQIPAPTTAKQVREFLGTAGFCRLWIPGFATLAAPLYPLTKPKGEFSWAPEHQKAFDAIKKALLSAPALALPDVTKPFTLYVDERKGVARGVLTQTLGPWRRPVAYLSKKLDPVASGWPVCLKAIAAVAILVKDADKLTLGQNITVIAPHALENIVRQPPDRWMTNARMTHYQSLLLTERVTFAPPAALNPATLLPEETDEPVTHDCHQLLIEETGVRKDLTDIPLTGEVLTWFTDGSSYVVEGKRMAGAAVVDGTRTIWASSLPEGTSAQKAELMALTQALRLAEGKSINIYTDSRYAFATAHVHGAIYKQRGWLTSAGREIKNKEEILSLLEALHLPKRLAIIHCPGHQKAKDPISRGNQMADRVAKQAAQGVNLLAGKRTADGSEFEKRTADGSEFESPKKKAKVE

SEQ ID NO: 177 - protein, 2082 aa, synthetic construct
MPAAKRVKLDGGDKKYSIGLDIGTNSVGWAVITDEYKVPSKKFKVLGNTDRHSIKKNLIGALLFDSGETAEATRLKRTARRRYTRRKNRICYLQEIFSNEMAKVDDSFFHRLEESFLVEEDKKHERHPIFGNIVDEVAYHEKYPTIYHLRKKLVDSTDKADLRLIYLALAHMIKFRGHFLIEGDLNPDNSDVDKLFIQLVQTYNQLFEENPINASGVDAKAILSARLSKSRRLENLIAQLPGEKKNGLFGNLIALSLGLTPNFKSNFDLAEDAKLQLSKDTYDDDLDNLLAQIGDQYADLFLAAKNLSDAILLSDILRVNTEITKAPLSASMIKRYDEHHQDLTLLKALVRQQLPEKYKEIFFDQSKNGYAGYIDGGASQEEFYKFIKPILEKMDGTEELLVKLNREDLLRKQRTFDNGSIPHQIHLGELHAILRRQEDFYPFLKDNREKIEKILTFRIPYYVGPLARGNSRFAWMTRKSEETITPWNFEEVVDKGASAQSFIERMTNFDKNLPNEKVLPKHSLLYEYFTVYNELTKVKYVTEGMRKPAFLSGEQKKAIVDLLFKTNRKVTVKQLKEDYFKKIECFDSVEISGVEDRFNASLGTYHDLLKIIKDKDFLDNEENEDILEDIVLTLTLFEDREMIEERLKTYAHLFDDKVMKQLKRRRYTGWGRLSRKLINGIRDKQSGKTILDFLKSDGFANRNFMQLIHDDSLTFKEDIQKAQVSGQGDSLHEHIANLAGSPAIKKGILQTVKVVDELVKVMGRHKPENIVIEMARENQTTQKGQKNSRERMKRIEEGIKELGSQILKEHPVENTQLQNEKLYLYYLQNGRDMYVDQELDINRLSDYDVDHIVPQSFLKDDSIDNKVLTRSDKARGKSDNVPSEEVVKKMKNYWRQLLNAKLITQRKFDNLTKAERGGLSELDKAGFIKRQLVETRQITKHVAQILDSRMNTKYDENDKLIREVKVITLKSKLVSDFRKDFQFYKVREINNYHHAHDAYLNAVVGTALIKKYPKLESEFVYGDYKVYDVRKMIAKSEQEIGKATAKYFFYSNIMNFFKTEITLANGEIRKRPLIETNGETGEIVWDKGRDFATVRKVLSMPQVNIVKKTEVQTGGFSKESILPKRNSDKLIARKKDWDPKKYGGFDSPTVAYSVLVVAKVEKGKSKKLKSVKELLGITIMERSSFEKNPIDFLEAKGYKEVKKDLIIKLPKYSLFELENGRKRMLASAGELQKGNELALPSKYVNFLYLASHYEKLKGSPEDNEQKQLFVEQHKHYLDEIIEQISEFSKRVILADANLDKVLSAYNKHRDKPIREQAENIIHLFTLTNLGAPAAFKYFDTTIDRKRYTSTKEVLDATLIHQSITGLYETRIDLSQLGGDGGPAPGGTLQLDDEYRLYSPLVKPDQNIQFWLEQFPQAWAETAGMGLAKQVPPQVIQLKASATPVSVRQYPLSKEAQEGIRPHVQRLIQQGILVPVQSPWNTPLLPVRKPGTNDYRPVQDLREVNKRVQDIHPTVPNPYNLLCALPPQRSWYTVLDLKDAFFCLRLHPTSQPLFAFEWRDPGTGRTGQLTWTRLPQGFKNSPTIFNEALHRDLANFRIQHPQVTLLQYVDDLLLAGATKQDCLEGTKALLLELSDLGYRASAKKAQICRREVTYLGYSLRDGQRWLTEARKKTVVQIPAPTTAKQVREFLGTAGFCRLWIPGFATLAAPLYPLTKPKGEFSWAPEHQKAFDAIKKALLSAPALALPDVTKPFTLYVDERKGVARGVLTQTLGPWRRPVAYLSKKLDPVASGWPVCLKAIAAVAILVKDADKLTLGQNITVIAPHALENIVRQPPDRWMTNARMTHYQSLLLTERVTFAPPAALNPATLLPEETDEPVTHDCHQLLIEETGVRKDLTDIPLTGEVLTWFTDGSSYVVEGKRMAGAAVVDGTRTIWASSLPEGTSAQKAELMALTQALRLAEGKSINIYTDSRYAFATAHVHGAIYKQRGWLTSAGREIKNKEEILSLLEALHLPKRLAIIHCPGHQKAKDPISRGNQMADRVAKQAAQGVNLLAGKRTADGSEFEKRTADGSEFESPKKKAKVE

SEQ ID NO: 178 - protein, 2085 aa, synthetic construct
MPAAKRVKLDGGDKKYSIGLDIGTNSVGWAVITDEYKVPSKKFKVLGNTDRHSIKKNLIGALLFDSGETAEATRLKRTARRRYTRRKNRICYLQEIFSNEMAKVDDSFFHRLEESFLVEEDKKHERHPIFGNIVDEVAYHEKYPTIYHLRKKLVDSTDKADLRLIYLALAHMIKFRGHFLIEGDLNPDNSDVDKLFIQLVQTYNQLFEENPINASGVDAKAILSARLSKSRRLENLIAQLPGEKKNGLFGNLIALSLGLTPNFKSNFDLAEDAKLQLSKDTYDDDLDNLLAQIGDQYADLFLAAKNLSDAILLSDILRVNTEITKAPLSASMIKRYDEHHQDLTLLKALVRQQLPEKYKEIFFDQSKNGYAGYIDGGASQEEFYKFIKPILEKMDGTEELLVKLNREDLLRKQRTFDNGSIPHQIHLGELHAILRRQEDFYPFLKDNREKIEKILTFRIPYYVGPLARGNSRFAWMTRKSEETITPWNFEEVVDKGASAQSFIERMTNFDKNLPNEKVLPKHSLLYEYFTVYNELTKVKYVTEGMRKPAFLSGEQKKAIVDLLFKTNRKVTVKQLKEDYFKKIECFDSVEISGVEDRFNASLGTYHDLLKIIKDKDFLDNEENEDILEDIVLTLTLFEDREMIEERLKTYAHLFDDKVMKQLKRRRYTGWGRLSRKLINGIRDKQSGKTILDFLKSDGFANRNFMQLIHDDSLTFKEDIQKAQVSGQGDSLHEHIANLAGSPAIKKGILQTVKVVDELVKVMGRHKPENIVIEMARENQTTQKGQKNSRERMKRIEEGIKELGSQILKEHPVENTQLQNEKLYLYYLQNGRDMYVDQELDINRLSDYDVDHIVPQSFLKDDSIDNKVLTRSDKARGKSDNVPSEEVVKKMKNYWRQLLNAKLITQRKFDNLTKAERGGLSELDKAGFIKRQLVETRQITKHVAQILDSRMNTKYDENDKLIREVKVITLKSKLVSDFRKDFQFYKVREINNYHHAHDAYLNAVVGTALIKKYPKLESEFVYGDYKVYDVRKMIAKSEQEIGKATAKYFFYSNIMNFFKTEITLANGEIRKRPLIETNGETGEIVWDKGRDFATVRKVLSMPQVNIVKKTEVQTGGFSKESILPKRNSDKLIARKKDWDPKKYGGFDSPTVAYSVLVVAKVEKGKSKKLKSVKELLGITIMERSSFEKNPIDFLEAKGYKEVKKDLIIKLPKYSLFELENGRKRMLASAGELQKGNELALPSKYVNFLYLASHYEKLKGSPEDNEQKQLFVEQHKHYLDEIIEQISEFSKRVILADANLDKVLSAYNKHRDKPIREQAENIIHLFTLTNLGAPAAFKYFDTTIDRKRYTSTKEVLDATLIHQSITGLYETRIDLSQLGGDGGGSSGSSGGTLQLDDEYRLYSPLVKPDQNIQFWLEQFPQAWAETAGMGLAKQVPPQVIQLKASATPVSVRQYPLSKEAQEGIRPHVQRLIQQGILVPVQSPWNTPLLPVRKPGTNDYRPVQDLREVNKRVQDIHPTVPNPYNLLCALPPQRSWYTVLDLKDAFFCLRLHPTSQPLFAFEWRDPGTGRTGQLTWTRLPQGFKNSPTIFNEALHRDLANFRIQHPQVTLLQYVDDLLLAGATKQDCLEGTKALLLELSDLGYRASAKKAQICRREVTYLGYSLRDGQRWLTEARKKTVVQIPAPTTAKQVREFLGTAGFCRLWIPGFATLAAPLYPLTKPKGEFSWAPEHQKAFDAIKKALLSAPALALPDVTKPFTLYVDERKGVARGVLTQTLGPWRRPVAYLSKKLDPVASGWPVCLKAIAAVAILVKDADKLTLGQNITVIAPHALENIVRQPPDRWMTNARMTHYQSLLLTERVTFAPPAALNPATLLPEETDEPVTHDCHQLLIEETGVRKDLTDIPLTGEVLTWFTDGSSYVVEGKRMAGAAVVDGTRTIWASSLPEGTSAQKAELMALTQALRLAEGKSINIYTDSRYAFATAHVHGAIYKQRGWLTSAGREIKNKEEILSLLEALHLPKRLAIIHCPGHQKAKDPISRGNQMADRVAKQAAQGVNLLAGKRTADGSEFEKRTADGSEFESPKKKAKVE

SEQ ID NO: 179 - protein, 2085 aa, synthetic construct
MPAAKRVKLDGGDKKYSIGLDIGTNSVGWAVITDEYKVPSKKFKVLGNTDRHSIKKNLIGALLFDSGETAEATRLKRTARRRYTRRKNRICYLQEIFSNEMAKVDDSFFHRLEESFLVEEDKKHERHPIFGNIVDEVAYHEKYPTIYHLRKKLVDSTDKADLRLIYLALAHMIKFRGHFLIEGDLNPDNSDVDKLFIQLVQTYNQLFEENPINASGVDAKAILSARLSKSRRLENLIAQLPGEKKNGLFGNLIALSLGLTPNFKSNFDLAEDAKLQLSKDTYDDDLDNLLAQIGDQYADLFLAAKNLSDAILLSDILRVNTEITKAPLSASMIKRYDEHHQDLTLLKALVRQQLPEKYKEIFFDQSKNGYAGYIDGGASQEEFYKFIKPILEKMDGTEELLVKLNREDLLRKQRTFDNGSIPHQIHLGELHAILRRQEDFYPFLKDNREKIEKILTFRIPYYVGPLARGNSRFAWMTRKSEETITPWNFEEVVDKGASAQSFIERMTNFDKNLPNEKVLPKHSLLYEYFTVYNELTKVKYVTEGMRKPAFLSGEQKKAIVDLLFKTNRKVTVKQLKEDYFKKIECFDSVEISGVEDRFNASLGTYHDLLKIIKDKDFLDNEENEDILEDIVLTLTLFEDREMIEERLKTYAHLFDDKVMKQLKRRRYTGWGRLSRKLINGIRDKQSGKTILDFLKSDGFANRNFMQLIHDDSLTFKEDIQKAQVSGQGDSLHEHIANLAGSPAIKKGILQTVKVVDELVKVMGRHKPENIVIEMARENQTTQKGQKNSRERMKRIEEGIKELGSQILKEHPVENTQLQNEKLYLYYLQNGRDMYVDQELDINRLSDYDVDHIVPQSFLKDDSIDNKVLTRSDKARGKSDNVPSEEVVKKMKNYWRQLLNAKLITQRKFDNLTKAERGGLSELDKAGFIKRQLVETRQITKHVAQILDSRMNTKYDENDKLIREVKVITLKSKLVSDFRKDFQFYKVREINNYHHAHDAYLNAVVGTALIKKYPKLESEFVYGDYKVYDVRKMIAKSEQEIGKATAKYFFYSNIMNFFKTEITLANGEIRKRPLIETNGETGEIVWDKGRDFATVRKVLSMPQVNIVKKTEVQTGGFSKESILPKRNSDKLIARKKDWDPKKYGGFDSPTVAYSVLVVAKVEKGKSKKLKSVKELLGITIMERSSFEKNPIDFLEAKGYKEVKKDLIIKLPKYSLFELENGRKRMLASAGELQKGNELALPSKYVNFLYLASHYEKLKGSPEDNEQKQLFVEQHKHYLDEIIEQISEFSKRVILADANLDKVLSAYNKHRDKPIREQAENIIHLFTLTNLGAPAAFKYFDTTIDRKRYTSTKEVLDATLIHQSITGLYETRIDLSQLGGDGGGGGGGSGGTLQLDDEYRLYSPLVKPDQNIQFWLEQFPQAWAETAGMGLAKQVPPQVIQLKASATPVSVRQYPLSKEAQEGIRPHVQRLIQQGILVPVQSPWNTPLLPVRKPGTNDYRPVQDLREVNKRVQDIHPTVPNPYNLLCALPPQRSWYTVLDLKDAFFCLRLHPTSQPLFAFEWRDPGTGRTGQLTWTRLPQGFKNSPTIFNEALHRDLANFRIQHPQVTLLQYVDDLLLAGATKQDCLEGTKALLLELSDLGYRASAKKAQICRREVTYLGYSLRDGQRWLTEARKKTVVQIPAPTTAKQVREFLGTAGFCRLWIPGFATLAAPLYPLTKPKGEFSWAPEHQKAFDAIKKALLSAPALALPDVTKPFTLYVDERKGVARGVLTQTLGPWRRPVAYLSKKLDPVASGWPVCLKAIAAVAILVKDADKLTLGQNITVIAPHALENIVRQPPDRWMTNARMTHYQSLLLTERVTFAPPAALNPATLLPEETDEPVTHDCHQLLIEETGVRKDLTDIPLTGEVLTWFTDGSSYVVEGKRMAGAAVVDGTRTIWASSLPEGTSAQKAELMALTQALRLAEGKSINIYTDSRYAFATAHVHGAIYKQRGWLTSAGREIKNKEEILSLLEALHLPKRLAIIHCPGHQKAKDPISRGNQMADRVAKQAAQGVNLLAGKRTADGSEFEKRTADGSEFESPKKKAKVE

SEQ ID NO: 180 - protein, 2088 aa, synthetic construct
MPAAKRVKLDGGDKKYSIGLDIGTNSVGWAVITDEYKVPSKKFKVLGNTDRHSIKKNLIGALLFDSGETAEATRLKRTARRRYTRRKNRICYLQEIFSNEMAKVDDSFFHRLEESFLVEEDKKHERHPIFGNIVDEVAYHEKYPTIYHLRKKLVDSTDKADLRLIYLALAHMIKFRGHFLIEGDLNPDNSDVDKLFIQLVQTYNQLFEENPINASGVDAKAILSARLSKSRRLENLIAQLPGEKKNGLFGNLIALSLGLTPNFKSNFDLAEDAKLQLSKDTYDDDLDNLLAQIGDQYADLFLAAKNLSDAILLSDILRVNTEITKAPLSASMIKRYDEHHQDLTLLKALVRQQLPEKYKEIFFDQSKNGYAGYIDGGASQEEFYKFIKPILEKMDGTEELLVKLNREDLLRKQRTFDNGSIPHQIHLGELHAILRRQEDFYPFLKDNREKIEKILTFRIPYYVGPLARGNSRFAWMTRKSEETITPWNFEEVVDKGASAQSFIERMTNFDKNLPNEKVLPKHSLLYEYFTVYNELTKVKYVTEGMRKPAFLSGEQKKAIVDLLFKTNRKVTVKQLKEDYFKKIECFDSVEISGVEDRFNASLGTYHDLLKIIKDKDFLDNEENEDILEDIVLTLTLFEDREMIEERLKTYAHLFDDKVMKQLKRRRYTGWGRLSRKLINGIRDKQSGKTILDFLKSDGFANRNFMQLIHDDSLTFKEDIQKAQVSGQGDSLHEHIANLAGSPAIKKGILQTVKVVDELVKVMGRHKPENIVIEMARENQTTQKGQKNSRERMKRIEEGIKELGSQILKEHPVENTQLQNEKLYLYYLQNGRDMYVDQELDINRLSDYDVDHIVPQSFLKDDSIDNKVLTRSDKARGKSDNVPSEEVVKKMKNYWRQLLNAKLITQRKFDNLTKAERGGLSELDKAGFIKRQLVETRQITKHVAQILDSRMNTKYDENDKLIREVKVITLKSKLVSDFRKDFQFYKVREINNYHHAHDAYLNAVVGTALIKKYPKLESEFVYGDYKVYDVRKMIAKSEQEIGKATAKYFFYSNIMNFFKTEITLANGEIRKRPLIETNGETGEIVWDKGRDFATVRKVLSMPQVNIVKKTEVQTGGFSKESILPKRNSDKLIARKKDWDPKKYGGFDSPTVAYSVLVVAKVEKGKSKKLKSVKELLGITIMERSSFEKNPIDFLEAKGYKEVKKDLIIKLPKYSLFELENGRKRMLASAGELQKGNELALPSKYVNFLYLASHYEKLKGSPEDNEQKQLFVEQHKHYLDEIIEQISEFSKRVILADANLDKVLSAYNKHRDKPIREQAENIIHLFTLTNLGAPAAFKYFDTTIDRKRYTSTKEVLDATLIHQSITGLYETRIDLSQLGGDGGGGGGSSGGSGGTLQLDDEYRLYSPLVKPDQNIQFWLEQFPQAWAETAGMGLAKQVPPQVIQLKASATPVSVRQYPLSKEAQEGIRPHVQRLIQQGILVPVQSPWNTPLLPVRKPGTNDYRPVQDLREVNKRVQDIHPTVPNPYNLLCALPPQRSWYTVLDLKDAFFCLRLHPTSQPLFAFEWRDPGTGRTGQLTWTRLPQGFKNSPTIFNEALHRDLANFRIQHPQVTLLQYVDDLLLAGATKQDCLEGTKALLLELSDLGYRASAKKAQICRREVTYLGYSLRDGQRWLTEARKKTVVQIPAPTTAKQVREFLGTAGFCRLWIPGFATLAAPLYPLTKPKGEFSWAPEHQKAFDAIKKALLSAPALALPDVTKPFTLYVDERKGVARGVLTQTLGPWRRPVAYLSKKLDPVASGWPVCLKAIAAVAILVKDADKLTLGQNITVIAPHALENIVRQPPDRWMTNARMTHYQSLLLTERVTFAPPAALNPATLLPEETDEPVTHDCHQLLIEETGVRKDLTDIPLTGEVLTWFTDGSSYVVEGKRMAGAAVVDGTRTIWASSLPEGTSAQKAELMALTQALRLAEGKSINIYTDSRYAFATAHVHGAIYKQRGWLTSAGREIKNKEEILSLLEALHLPKRLAIIHCPGHQKAKDPISRGNQMADRVAKQAAQGVNLLAGKRTADGSEFEKRTADGSEFESPKKKAKVE

SEQ ID NO: 181 - protein, 2088 aa, synthetic construct
MPAAKRVKLDGGDKKYSIGLDIGTNSVGWAVITDEYKVPSKKFKVLGNTDRHSIKKNLIGALLFDSGETAEATRLKRTARRRYTRRKNRICYLQEIFSNEMAKVDDSFFHRLEESFLVEEDKKHERHPIFGNIVDEVAYHEKYPTIYHLRKKLVDSTDKADLRLIYLALAHMIKFRGHFLIEGDLNPDNSDVDKLFIQLVQTYNQLFEENPINASGVDAKAILSARLSKSRRLENLIAQLPGEKKNGLFGNLIALSLGLTPNFKSNFDLAEDAKLQLSKDTYDDDLDNLLAQIGDQYADLFLAAKNLSDAILLSDILRVNTEITKAPLSASMIKRYDEHHQDLTLLKALVRQQLPEKYKEIFFDQSKNGYAGYIDGGASQEEFYKFIKPILEKMDGTEELLVKLNREDLLRKQRTFDNGSIPHQIHLGELHAILRRQEDFYPFLKDNREKIEKILTFRIPYYVGPLARGNSRFAWMTRKSEETITPWNFEEVVDKGASAQSFIERMTNFDKNLPNEKVLPKHSLLYEYFTVYNELTKVKYVTEGMRKPAFLSGEQKKAIVDLLFKTNRKVTVKQLKEDYFKKIECFDSVEISGVEDRFNASLGTYHDLLKIIKDKDFLDNEENEDILEDIVLTLTLFEDREMIEERLKTYAHLFDDKVMKQLKRRRYTGWGRLSRKLINGIRDKQSGKTILDFLKSDGFANRNFMQLIHDDSLTFKEDIQKAQVSGQGDSLHEHIANLAGSPAIKKGILQTVKVVDELVKVMGRHKPENIVIEMARENQTTQKGQKNSRERMKRIEEGIKELGSQILKEHPVENTQLQNEKLYLYYLQNGRDMYVDQELDINRLSDYDVDHIVPQSFLKDDSIDNKVLTRSDKARGKSDNVPSEEVVKKMKNYWRQLLNAKLITQRKFDNLTKAERGGLSELDKAGFIKRQLVETRQITKHVAQILDSRMNTKYDENDKLIREVKVITLKSKLVSDFRKDFQFYKVREINNYHHAHDAYLNAVVGTALIKKYPKLESEFVYGDYKVYDVRKMIAKSEQEIGKATAKYFFYSNIMNFFKTEITLANGEIRKRPLIETNGETGEIVWDKGRDFATVRKVLSMPQVNIVKKTEVQTGGFSKESILPKRNSDKLIARKKDWDPKKYGGFDSPTVAYSVLVVAKVEKGKSKKLKSVKELLGITIMERSSFEKNPIDFLEAKGYKEVKKDLIIKLPKYSLFELENGRKRMLASAGELQKGNELALPSKYVNFLYLASHYEKLKGSPEDNEQKQLFVEQHKHYLDEIIEQISEFSKRVILADANLDKVLSAYNKHRDKPIREQAENIIHLFTLTNLGAPAAFKYFDTTIDRKRYTSTKEVLDATLIHQSITGLYETRIDLSQLGGDGGGSSGSSGSSGGTLQLDDEYRLYSPLVKPDQNIQFWLEQFPQAWAETAGMGLAKQVPPQVIQLKASATPVSVRQYPLSKEAQEGIRPHVQRLIQQGILVPVQSPWNTPLLPVRKPGTNDYRPVQDLREVNKRVQDIHPTVPNPYNLLCALPPQRSWYTVLDLKDAFFCLRLHPTSQPLFAFEWRDPGTGRTGQLTWTRLPQGFKNSPTIFNEALHRDLANFRIQHPQVTLLQYVDDLLLAGATKQDCLEGTKALLLELSDLGYRASAKKAQICRREVTYLGYSLRDGQRWLTEARKKTVVQIPAPTTAKQVREFLGTAGFCRLWIPGFATLAAPLYPLTKPKGEFSWAPEHQKAFDAIKKALLSAPALALPDVTKPFTLYVDERKGVARGVLTQTLGPWRRPVAYLSKKLDPVASGWPVCLKAIAAVAILVKDADKLTLGQNITVIAPHALENIVRQPPDRWMTNARMTHYQSLLLTERVTFAPPAALNPATLLPEETDEPVTHDCHQLLIEETGVRKDLTDIPLTGEVLTWFTDGSSYVVEGKRMAGAAVVDGTRTIWASSLPEGTSAQKAELMALTQALRLAEGKSINIYTDSRYAFATAHVHGAIYKQRGWLTSAGREIKNKEEILSLLEALHLPKRLAIIHCPGHQKAKDPISRGNQMADRVAKQAAQGVNLLAGKRTADGSEFEKRTADGSEFESPKKKAKVE

SEQ ID NO: 182 - protein, 2088 aa, synthetic construct
MPAAKRVKLDGGDKKYSIGLDIGTNSVGWAVITDEYKVPSKKFKVLGNTDRHSIKKNLIGALLFDSGETAEATRLKRTARRRYTRRKNRICYLQEIFSNEMAKVDDSFFHRLEESFLVEEDKKHERHPIFGNIVDEVAYHEKYPTIYHLRKKLVDSTDKADLRLIYLALAHMIKFRGHFLIEGDLNPDNSDVDKLFIQLVQTYNQLFEENPINASGVDAKAILSARLSKSRRLENLIAQLPGEKKNGLFGNLIALSLGLTPNFKSNFDLAEDAKLQLSKDTYDDDLDNLLAQIGDQYADLFLAAKNLSDAILLSDILRVNTEITKAPLSASMIKRYDEHHQDLTLLKALVRQQLPEKYKEIFFDQSKNGYAGYIDGGASQEEFYKFIKPILEKMDGTEELLVKLNREDLLRKQRTFDNGSIPHQIHLGELHAILRRQEDFYPFLKDNREKIEKILTFRIPYYVGPLARGNSRFAWMTRKSEETITPWNFEEVVDKGASAQSFIERMTNFDKNLPNEKVLPKHSLLYEYFTVYNELTKVKYVTEGMRKPAFLSGEQKKAIVDLLFKTNRKVTVKQLKEDYFKKIECFDSVEISGVEDRFNASLGTYHDLLKIIKDKDFLDNEENEDILEDIVLTLTLFEDREMIEERLKTYAHLFDDKVMKQLKRRRYTGWGRLSRKLINGIRDKQSGKTILDFLKSDGFANRNFMQLIHDDSLTFKEDIQKAQVSGQGDSLHEHIANLAGSPAIKKGILQTVKVVDELVKVMGRHKPENIVIEMARENQTTQKGQKNSRERMKRIEEGIKELGSQILKEHPVENTQLQNEKLYLYYLQNGRDMYVDQELDINRLSDYDVDHIVPQSFLKDDSIDNKVLTRSDKARGKSDNVPSEEVVKKMKNYWRQLLNAKLITQRKFDNLTKAERGGLSELDKAGFIKRQLVETRQITKHVAQILDSRMNTKYDENDKLIREVKVITLKSKLVSDFRKDFQFYKVREINNYHHAHDAYLNAVVGTALIKKYPKLESEFVYGDYKVYDVRKMIAKSEQEIGKATAKYFFYSNIMNFFKTEITLANGEIRKRPLIETNGETGEIVWDKGRDFATVRKVLSMPQVNIVKKTEVQTGGFSKESILPKRNSDKLIARKKDWDPKKYGGFDSPTVAYSVLVVAKVEKGKSKKLKSVKELLGITIMERSSFEKNPIDFLEAKGYKEVKKDLIIKLPKYSLFELENGRKRMLASAGELQKGNELALPSKYVNFLYLASHYEKLKGSPEDNEQKQLFVEQHKHYLDEIIEQISEFSKRVILADANLDKVLSAYNKHRDKPIREQAENIIHLFTLTNLGAPAAFKYFDTTIDRKRYTSTKEVLDATLIHQSITGLYETRIDLSQLGGDGGGSSGGSGGGGGTLQLDDEYRLYSPLVKPDQNIQFWLEQFPQAWAETAGMGLAKQVPPQVIQLKASATPVSVRQYPLSKEAQEGIRPHVQRLIQQGILVPVQSPWNTPLLPVRKPGTNDYRPVQDLREVNKRVQDIHPTVPNPYNLLCALPPQRSWYTVLDLKDAFFCLRLHPTSQPLFAFEWRDPGTGRTGQLTWTRLPQGFKNSPTIFNEALHRDLANFRIQHPQVTLLQYVDDLLLAGATKQDCLEGTKALLLELSDLGYRASAKKAQICRREVTYLGYSLRDGQRWLTEARKKTVVQIPAPTTAKQVREFLGTAGFCRLWIPGFATLAAPLYPLTKPKGEFSWAPEHQKAFDAIKKALLSAPALALPDVTKPFTLYVDERKGVARGVLTQTLGPWRRPVAYLSKKLDPVASGWPVCLKAIAAVAILVKDADKLTLGQNITVIAPHALENIVRQPPDRWMTNARMTHYQSLLLTERVTFAPPAALNPATLLPEETDEPVTHDCHQLLIEETGVRKDLTDIPLTGEVLTWFTDGSSYVVEGKRMAGAAVVDGTRTIWASSLPEGTSAQKAELMALTQALRLAEGKSINIYTDSRYAFATAHVHGAIYKQRGWLTSAGREIKNKEEILSLLEALHLPKRLAIIHCPGHQKAKDPISRGNQMADRVAKQAAQGVNLLAGKRTADGSEFEKRTADGSEFESPKKKAKVE

SEQ ID NO: 183 - protein, 2085 aa, synthetic construct
MPAAKRVKLDGGDKKYSIGLDIGTNSVGWAVITDEYKVPSKKFKVLGNTDRHSIKKNLIGALLFDSGETAEATRLKRTARRRYTRRKNRICYLQEIFSNEMAKVDDSFFHRLEESFLVEEDKKHERHPIFGNIVDEVAYHEKYPTIYHLRKKLVDSTDKADLRLIYLALAHMIKFRGHFLIEGDLNPDNSDVDKLFIQLVQTYNQLFEENPINASGVDAKAILSARLSKSRRLENLIAQLPGEKKNGLFGNLIALSLGLTPNFKSNFDLAEDAKLQLSKDTYDDDLDNLLAQIGDQYADLFLAAKNLSDAILLSDILRVNTEITKAPLSASMIKRYDEHHQDLTLLKALVRQQLPEKYKEIFFDQSKNGYAGYIDGGASQEEFYKFIKPILEKMDGTEELLVKLNREDLLRKQRTFDNGSIPHQIHLGELHAILRRQEDFYPFLKDNREKIEKILTFRIPYYVGPLARGNSRFAWMTRKSEETITPWNFEEVVDKGASAQSFIERMTNFDKNLPNEKVLPKHSLLYEYFTVYNELTKVKYVTEGMRKPAFLSGEQKKAIVDLLFKTNRKVTVKQLKEDYFKKIECFDSVEISGVEDRFNASLGTYHDLLKIIKDKDFLDNEENEDILEDIVLTLTLFEDREMIEERLKTYAHLFDDKVMKQLKRRRYTGWGRLSRKLINGIRDKQSGKTILDFLKSDGFANRNFMQLIHDDSLTFKEDIQKAQVSGQGDSLHEHIANLAGSPAIKKGILQTVKVVDELVKVMGRHKPENIVIEMARENQTTQKGQKNSRERMKRIEEGIKELGSQILKEHPVENTQLQNEKLYLYYLQNGRDMYVDQELDINRLSDYDVDHIVPQSFLKDDSIDNKVLTRSDKARGKSDNVPSEEVVKKMKNYWRQLLNAKLITQRKFDNLTKAERGGLSELDKAGFIKRQLVETRQITKHVAQILDSRMNTKYDENDKLIREVKVITLKSKLVSDFRKDFQFYKVREINNYHHAHDAYLNAVVGTALIKKYPKLESEFVYGDYKVYDVRKMIAKSEQEIGKATAKYFFYSNIMNFFKTEITLANGEIRKRPLIETNGETGEIVWDKGRDFATVRKVLSMPQVNIVKKTEVQTGGFSKESILPKRNSDKLIARKKDWDPKKYGGFDSPTVAYSVLVVAKVEKGKSKKLKSVKELLGITIMERSSFEKNPIDFLEAKGYKEVKKDLIIKLPKYSLFELENGRKRMLASAGELQKGNELALPSKYVNFLYLASHYEKLKGSPEDNEQKQLFVEQHKHYLDEIIEQISEFSKRVILADANLDKVLSAYNKHRDKPIREQAENIIHLFTLTNLGAPAAFKYFDTTIDRKRYTSTKEVLDATLIHQSITGLYETRIDLSQLGGDGGGGGGGGGGTLQLDDEYRLYSPLVKPDQNIQFWLEQFPQAWAETAGMGLAKQVPPQVIQLKASATPVSVRQYPLSKEAQEGIRPHVQRLIQQGILVPVQSPWNTPLLPVRKPGTNDYRPVQDLREVNKRVQDIHPTVPNPYNLLCALPPQRSWYTVLDLKDAFFCLRLHPTSQPLFAFEWRDPGTGRTGQLTWTRLPQGFKNSPTIFNEALHRDLANFRIQHPQVTLLQYVDDLLLAGATKQDCLEGTKALLLELSDLGYRASAKKAQICRREVTYLGYSLRDGQRWLTEARKKTVVQIPAPTTAKQVREFLGTAGFCRLWIPGFATLAAPLYPLTKPKGEFSWAPEHQKAFDAIKKALLSAPALALPDVTKPFTLYVDERKGVARGVLTQTLGPWRRPVAYLSKKLDPVASGWPVCLKAIAAVAILVKDADKLTLGQNITVIAPHALENIVRQPPDRWMTNARMTHYQSLLLTERVTFAPPAALNPATLLPEETDEPVTHDCHQLLIEETGVRKDLTDIPLTGEVLTWFTDGSSYVVEGKRMAGAAVVDGTRTIWASSLPEGTSAQKAELMALTQALRLAEGKSINIYTDSRYAFATAHVHGAIYKQRGWLTSAGREIKNKEEILSLLEALHLPKRLAIIHCPGHQKAKDPISRGNQMADRVAKQAAQGVNLLAGKRTADGSEFEKRTADGSEFESPKKKAKVE

SEQ ID NO: 184 - protein, 2085 aa, synthetic construct
MPAAKRVKLDGGDKKYSIGLDIGTNSVGWAVITDEYKVPSKKFKVLGNTDRHSIKKNLIGALLFDSGETAEATRLKRTARRRYTRRKNRICYLQEIFSNEMAKVDDSFFHRLEESFLVEEDKKHERHPIFGNIVDEVAYHEKYPTIYHLRKKLVDSTDKADLRLIYLALAHMIKFRGHFLIEGDLNPDNSDVDKLFIQLVQTYNQLFEENPINASGVDAKAILSARLSKSRRLENLIAQLPGEKKNGLFGNLIALSLGLTPNFKSNFDLAEDAKLQLSKDTYDDDLDNLLAQIGDQYADLFLAAKNLSDAILLSDILRVNTEITKAPLSASMIKRYDEHHQDLTLLKALVRQQLPEKYKEIFFDQSKNGYAGYIDGGASQEEFYKFIKPILEKMDGTEELLVKLNREDLLRKQRTFDNGSIPHQIHLGELHAILRRQEDFYPFLKDNREKIEKILTFRIPYYVGPLARGNSRFAWMTRKSEETITPWNFEEVVDKGASAQSFIERMTNFDKNLPNEKVLPKHSLLYEYFTVYNELTKVKYVTEGMRKPAFLSGEQKKAIVDLLFKTNRKVTVKQLKEDYFKKIECFDSVEISGVEDRFNASLGTYHDLLKIIKDKDFLDNEENEDILEDIVLTLTLFEDREMIEERLKTYAHLFDDKVMKQLKRRRYTGWGRLSRKLINGIRDKQSGKTILDFLKSDGFANRNFMQLIHDDSLTFKEDIQKAQVSGQGDSLHEHIANLAGSPAIKKGILQTVKVVDELVKVMGRHKPENIVIEMARENQTTQKGQKNSRERMKRIEEGIKELGSQILKEHPVENTQLQNEKLYLYYLQNGRDMYVDQELDINRLSDYDVDHIVPQSFLKDDSIDNKVLTRSDKARGKSDNVPSEEVVKKMKNYWRQLLNAKLITQRKFDNLTKAERGGLSELDKAGFIKRQLVETRQITKHVAQILDSRMNTKYDENDKLIREVKVITLKSKLVSDFRKDFQFYKVREINNYHHAHDAYLNAVVGTALIKKYPKLESEFVYGDYKVYDVRKMIAKSEQEIGKATAKYFFYSNIMNFFKTEITLANGEIRKRPLIETNGETGEIVWDKGRDFATVRKVLSMPQVNIVKKTEVQTGGFSKESILPKRNSDKLIARKKDWDPKKYGGFDSPTVAYSVLVVAKVEKGKSKKLKSVKELLGITIMERSSFEKNPIDFLEAKGYKEVKKDLIIKLPKYSLFELENGRKRMLASAGELQKGNELALPSKYVNFLYLASHYEKLKGSPEDNEQKQLFVEQHKHYLDEIIEQISEFSKRVILADANLDKVLSAYNKHRDKPIREQAENIIHLFTLTNLGAPAAFKYFDTTIDRKRYTSTKEVLDATLIHQSITGLYETRIDLSQLGGDGGGGSGGGGGTLQLDDEYRLYSPLVKPDQNIQFWLEQFPQAWAETAGMGLAKQVPPQVIQLKASATPVSVRQYPLSKEAQEGIRPHVQRLIQQGILVPVQSPWNTPLLPVRKPGTNDYRPVQDLREVNKRVQDIHPTVPNPYNLLCALPPQRSWYTVLDLKDAFFCLRLHPTSQPLFAFEWRDPGTGRTGQLTWTRLPQGFKNSPTIFNEALHRDLANFRIQHPQVTLLQYVDDLLLAGATKQDCLEGTKALLLELSDLGYRASAKKAQICRREVTYLGYSLRDGQRWLTEARKKTVVQIPAPTTAKQVREFLGTAGFCRLWIPGFATLAAPLYPLTKPKGEFSWAPEHQKAFDAIKKALLSAPALALPDVTKPFTLYVDERKGVARGVLTQTLGPWRRPVAYLSKKLDPVASGWPVCLKAIAAVAILVKDADKLTLGQNITVIAPHALENIVRQPPDRWMTNARMTHYQSLLLTERVTFAPPAALNPATLLPEETDEPVTHDCHQLLIEETGVRKDLTDIPLTGEVLTWFTDGSSYVVEGKRMAGAAVVDGTRTIWASSLPEGTSAQKAELMALTQALRLAEGKSINIYTDSRYAFATAHVHGAIYKQRGWLTSAGREIKNKEEILSLLEALHLPKRLAIIHCPGHQKAKDPISRGNQMADRVAKQAAQGVNLLAGKRTADGSEFEKRTADGSEFESPKKKAKVE

SEQ ID NO: 185 - protein, 2087 aa, synthetic construct
MPAAKRVKLDGGDKKYSIGLDIGTNSVGWAVITDEYKVPSKKFKVLGNTDRHSIKKNLIGALLFDSGETAEATRLKRTARRRYTRRKNRICYLQEIFSNEMAKVDDSFFHRLEESFLVEEDKKHERHPIFGNIVDEVAYHEKYPTIYHLRKKLVDSTDKADLRLIYLALAHMIKFRGHFLIEGDLNPDNSDVDKLFIQLVQTYNQLFEENPINASGVDAKAILSARLSKSRRLENLIAQLPGEKKNGLFGNLIALSLGLTPNFKSNFDLAEDAKLQLSKDTYDDDLDNLLAQIGDQYADLFLAAKNLSDAILLSDILRVNTEITKAPLSASMIKRYDEHHQDLTLLKALVRQQLPEKYKEIFFDQSKNGYAGYIDGGASQEEFYKFIKPILEKMDGTEELLVKLNREDLLRKQRTFDNGSIPHQIHLGELHAILRRQEDFYPFLKDNREKIEKILTFRIPYYVGPLARGNSRFAWMTRKSEETITPWNFEEVVDKGASAQSFIERMTNFDKNLPNEKVLPKHSLLYEYFTVYNELTKVKYVTEGMRKPAFLSGEQKKAIVDLLFKTNRKVTVKQLKEDYFKKIECFDSVEISGVEDRFNASLGTYHDLLKIIKDKDFLDNEENEDILEDIVLTLTLFEDREMIEERLKTYAHLFDDKVMKQLKRRRYTGWGRLSRKLINGIRDKQSGKTILDFLKSDGFANRNFMQLIHDDSLTFKEDIQKAQVSGQGDSLHEHIANLAGSPAIKKGILQTVKVVDELVKVMGRHKPENIVIEMARENQTTQKGQKNSRERMKRIEEGIKELGSQILKEHPVENTQLQNEKLYLYYLQNGRDMYVDQELDINRLSDYDVDHIVPQSFLKDDSIDNKVLTRSDKARGKSDNVPSEEVVKKMKNYWRQLLNAKLITQRKFDNLTKAERGGLSELDKAGFIKRQLVETRQITKHVAQILDSRMNTKYDENDKLIREVKVITLKSKLVSDFRKDFQFYKVREINNYHHAHDAYLNAVVGTALIKKYPKLESEFVYGDYKVYDVRKMIAKSEQEIGKATAKYFFYSNIMNFFKTEITLANGEIRKRPLIETNGETGEIVWDKGRDFATVRKVLSMPQVNIVKKTEVQTGGFSKESILPKRNSDKLIARKKDWDPKKYGGFDSPTVAYSVLVVAKVEKGKSKKLKSVKELLGITIMERSSFEKNPIDFLEAKGYKEVKKDLIIKLPKYSLFELENGRKRMLASAGELQKGNELALPSKYVNFLYLASHYEKLKGSPEDNEQKQLFVEQHKHYLDEIIEQISEFSKRVILADANLDKVLSAYNKHRDKPIREQAENIIHLFTLTNLGAPAAFKYFDTTIDRKRYTSTKEVLDATLIHQSITGLYETRIDLSQLGGDGGGGGEAAAKGGTLQLDDEYRLYSPLVKPDQNIQFWLEQFPQAWAETAGMGLAKQVPPQVIQLKASATPVSVRQYPLSKEAQEGIRPHVQRLIQQGILVPVQSPWNTPLLPVRKPGTNDYRPVQDLREVNKRVQDIHPTVPNPYNLLCALPPQRSWYTVLDLKDAFFCLRLHPTSQPLFAFEWRDPGTGRTGQLTWTRLPQGFKNSPTIFNEALHRDLANFRIQHPQVTLLQYVDDLLLAGATKQDCLEGTKALLLELSDLGYRASAKKAQICRREVTYLGYSLRDGQRWLTEARKKTVVQIPAPTTAKQVREFLGTAGFCRLWIPGFATLAAPLYPLTKPKGEFSWAPEHQKAFDAIKKALLSAPALALPDVTKPFTLYVDERKGVARGVLTQTLGPWRRPVAYLSKKLDPVASGWPVCLKAIAAVAILVKDADKLTLGQNITVIAPHALENIVRQPPDRWMTNARMTHYQSLLLTERVTFAPPAALNPATLLPEETDEPVTHDCHQLLIEETGVRKDLTDIPLTGEVLTWFTDGSSYVVEGKRMAGAAVVDGTRTIWASSLPEGTSAQKAELMALTQALRLAEGKSINIYTDSRYAFATAHVHGAIYKQRGWLTSAGREIKNKEEILSLLEALHLPKRLAIIHCPGHQKAKDPISRGNQMADRVAKQAAQGVNLLAGKRTADGSEFEKRTADGSEFESPKKKAKVE

SEQ ID NO: 186 - protein, 2085 aa, synthetic construct
MPAAKRVKLDGGDKKYSIGLDIGTNSVGWAVITDEYKVPSKKFKVLGNTDRHSIKKNLIGALLFDSGETAEATRLKRTARRRYTRRKNRICYLQEIFSNEMAKVDDSFFHRLEESFLVEEDKKHERHPIFGNIVDEVAYHEKYPTIYHLRKKLVDSTDKADLRLIYLALAHMIKFRGHFLIEGDLNPDNSDVDKLFIQLVQTYNQLFEENPINASGVDAKAILSARLSKSRRLENLIAQLPGEKKNGLFGNLIALSLGLTPNFKSNFDLAEDAKLQLSKDTYDDDLDNLLAQIGDQYADLFLAAKNLSDAILLSDILRVNTEITKAPLSASMIKRYDEHHQDLTLLKALVRQQLPEKYKEIFFDQSKNGYAGYIDGGASQEEFYKFIKPILEKMDGTEELLVKLNREDLLRKQRTFDNGSIPHQIHLGELHAILRRQEDFYPFLKDNREKIEKILTFRIPYYVGPLARGNSRFAWMTRKSEETITPWNFEEVVDKGASAQSFIERMTNFDKNLPNEKVLPKHSLLYEYFTVYNELTKVKYVTEGMRKPAFLSGEQKKAIVDLLFKTNRKVTVKQLKEDYFKKIECFDSVEISGVEDRFNASLGTYHDLLKIIKDKDFLDNEENEDILEDIVLTLTLFEDREMIEERLKTYAHLFDDKVMKQLKRRRYTGWGRLSRKLINGIRDKQSGKTILDFLKSDGFANRNFMQLIHDDSLTFKEDIQKAQVSGQGDSLHEHIANLAGSPAIKKGILQTVKVVDELVKVMGRHKPENIVIEMARENQTTQKGQKNSRERMKRIEEGIKELGSQILKEHPVENTQLQNEKLYLYYLQNGRDMYVDQELDINRLSDYDVDHIVPQSFLKDDSIDNKVLTRSDKARGKSDNVPSEEVVKKMKNYWRQLLNAKLITQRKFDNLTKAERGGLSELDKAGFIKRQLVETRQITKHVAQILDSRMNTKYDENDKLIREVKVITLKSKLVSDFRKDFQFYKVREINNYHHAHDAYLNAVVGTALIKKYPKLESEFVYGDYKVYDVRKMIAKSEQEIGKATAKYFFYSNIMNFFKTEITLANGEIRKRPLIETNGETGEIVWDKGRDFATVRKVLSMPQVNIVKKTEVQTGGFSKESILPKRNSDKLIARKKDWDPKKYGGFDSPTVAYSVLVVAKVEKGKSKKLKSVKELLGITIMERSSFEKNPIDFLEAKGYKEVKKDLIIKLPKYSLFELENGRKRMLASAGELQKGNELALPSKYVNFLYLASHYEKLKGSPEDNEQKQLFVEQHKHYLDEIIEQISEFSKRVILADANLDKVLSAYNKHRDKPIREQAENIIHLFTLTNLGAPAAFKYFDTTIDRKRYTSTKEVLDATLIHQSITGLYETRIDLSQLGGDGGGGSGGSGGTLQLDDEYRLYSPLVKPDQNIQFWLEQFPQAWAETAGMGLAKQVPPQVIQLKASATPVSVRQYPLSKEAQEGIRPHVQRLIQQGILVPVQSPWNTPLLPVRKPGTNDYRPVQDLREVNKRVQDIHPTVPNPYNLLCALPPQRSWYTVLDLKDAFFCLRLHPTSQPLFAFEWRDPGTGRTGQLTWTRLPQGFKNSPTIFNEALHRDLANFRIQHPQVTLLQYVDDLLLAGATKQDCLEGTKALLLELSDLGYRASAKKAQICRREVTYLGYSLRDGQRWLTEARKKTVVQIPAPTTAKQVREFLGTAGFCRLWIPGFATLAAPLYPLTKPKGEFSWAPEHQKAFDAIKKALLSAPALALPDVTKPFTLYVDERKGVARGVLTQTLGPWRRPVAYLSKKLDPVASGWPVCLKAIAAVAILVKDADKLTLGQNITVIAPHALENIVRQPPDRWMTNARMTHYQSLLLTERVTFAPPAALNPATLLPEETDEPVTHDCHQLLIEETGVRKDLTDIPLTGEVLTWFTDGSSYVVEGKRMAGAAVVDGTRTIWASSLPEGTSAQKAELMALTQALRLAEGKSINIYTDSRYAFATAHVHGAIYKQRGWLTSAGREIKNKEEILSLLEALHLPKRLAIIHCPGHQKAKDPISRGNQMADRVAKQAAQGVNLLAGKRTADGSEFEKRTADGSEFESPKKKAKVE

SEQ ID NO: 187 - protein, 1999 aa, synthetic construct
MPAAKRVKLDGGDKKYSIGLDIGTNSVGWAVITDEYKVPSKKFKVLGNTDRHSIKKNLIGALLFDSGETAEATRLKRTARRRYTRRKNRICYLQEIFSNEMAKVDDSFFHRLEESFLVEEDKKHERHPIFGNIVDEVAYHEKYPTIYHLRKKLVDSTDKADLRLIYLALAHMIKFRGHFLIEGDLNPDNSDVDKLFIQLVQTYNQLFEENPINASGVDAKAILSARLSKSRRLENLIAQLPGEKKNGLFGNLIALSLGLTPNFKSNFDLAEDAKLQLSKDTYDDDLDNLLAQIGDQYADLFLAAKNLSDAILLSDILRVNTEITKAPLSASMIKRYDEHHQDLTLLKALVRQQLPEKYKEIFFDQSKNGYAGYIDGGASQEEFYKFIKPILEKMDGTEELLVKLNREDLLRKQRTFDNGSIPHQIHLGELHAILRRQEDFYPFLKDNREKIEKILTFRIPYYVGPLARGNSRFAWMTRKSEETITPWNFEEVVDKGASAQSFIERMTNFDKNLPNEKVLPKHSLLYEYFTVYNELTKVKYVTEGMRKPAFLSGEQKKAIVDLLFKTNRKVTVKQLKEDYFKKIECFDSVEISGVEDRFNASLGTYHDLLKIIKDKDFLDNEENEDILEDIVLTLTLFEDREMIEERLKTYAHLFDDKVMKQLKRRRYTGWGRLSRKLINGIRDKQSGKTILDFLKSDGFANRNFMQLIHDDSLTFKEDIQKAQVSGQGDSLHEHIANLAGSPAIKKGILQTVKVVDELVKVMGRHKPENIVIEMARENQTTQKGQKNSRERMKRIEEGIKELGSQILKEHPVENTQLQNEKLYLYYLQNGRDMYVDQELDINRLSDYDVDHIVPQSFLKDDSIDNKVLTRSDKARGKSDNVPSEEVVKKMKNYWRQLLNAKLITQRKFDNLTKAERGGLSELDKAGFIKRQLVETRQITKHVAQILDSRMNTKYDENDKLIREVKVITLKSKLVSDFRKDFQFYKVREINNYHHAHDAYLNAVVGTALIKKYPKLESEFVYGDYKVYDVRKMIAKSEQEIGKATAKYFFYSNIMNFFKTEITLANGEIRKRPLIETNGETGEIVWDKGRDFATVRKVLSMPQVNIVKKTEVQTGGFSKESILPKRNSDKLIARKKDWDPKKYGGFDSPTVAYSVLVVAKVEKGKSKKLKSVKELLGITIMERSSFEKNPIDFLEAKGYKEVKKDLIIKLPKYSLFELENGRKRMLASAGELQKGNELALPSKYVNFLYLASHYEKLKGSPEDNEQKQLFVEQHKHYLDEIIEQISEFSKRVILADANLDKVLSAYNKHRDKPIREQAENIIHLFTLTNLGAPAAFKYFDTTIDRKRYTSTKEVLDATLIHQSITGLYETRIDLSQLGGDGGGGSGGGGSSGGGVLDTPPSHIGLEHLPPPPEVPQFPLNLERLQALQDLVHRSLEAGYISPWDGPGNNPVFPVRKPNGAWRFVHDLRATNALTKPIPALSPGPPDLTAIPTHPPHIICLDLKDAFFQIPVEDRFRFYLSFTLPSPGGLQPHRRFAWRVLPQGFINSPALFNRALQEPLRQVSAAFSQSLLVSYMDDILYASPTEEQRSQCYQALAARLRDLGFQVASEKTSQTPSPVPFLGQMVHEQIVTYQSLPTLQISSPISLHQLQAVLGDLQWVSRGTPTTRRPLQLLYSSLKRHHDPRAIIQLSPEQLQGIAELRQALSHNARSRYNEQEPLLAYVHLTRAGSTLVLFQKGAQFPLAYFQTPLTDNQASPWGLLLLLGCQYLQTQALSSYAKPILKYYHNLPKTSLDNWIQSSEDPRVQELLQLWPQISSQGIQPPGPWKTLITRAEVFLTPQFSPDPIPAALCLFSDGATGRGAYCLWKDHLLDFQAVPAPESAQKGELAGLLAGLAAAPPEPVNIWVDSKYLYSLLRTWVLGAWLQPDPVPSYALLYKSLLRHPAIVVGHVRSHSSASHPIASLNNYVDQLAGKRTADGSEFEKRTADGSEFESPKKKAKVE

SEQ ID NO: 188 - protein, 2015 aa, synthetic construct
MPAAKRVKLDGGDKKYSIGLDIGTNSVGWAVITDEYKVPSKKFKVLGNTDRHSIKKNLIGALLFDSGETAEATRLKRTARRRYTRRKNRICYLQEIFSNEMAKVDDSFFHRLEESFLVEEDKKHERHPIFGNIVDEVAYHEKYPTIYHLRKKLVDSTDKADLRLIYLALAHMIKFRGHFLIEGDLNPDNSDVDKLFIQLVQTYNQLFEENPINASGVDAKAILSARLSKSRRLENLIAQLPGEKKNGLFGNLIALSLGLTPNFKSNFDLAEDAKLQLSKDTYDDDLDNLLAQIGDQYADLFLAAKNLSDAILLSDILRVNTEITKAPLSASMIKRYDEHHQDLTLLKALVRQQLPEKYKEIFFDQSKNGYAGYIDGGASQEEFYKFIKPILEKMDGTEELLVKLNREDLLRKQRTFDNGSIPHQIHLGELHAILRRQEDFYPFLKDNREKIEKILTFRIPYYVGPLARGNSRFAWMTRKSEETITPWNFEEVVDKGASAQSFIERMTNFDKNLPNEKVLPKHSLLYEYFTVYNELTKVKYVTEGMRKPAFLSGEQKKAIVDLLFKTNRKVTVKQLKEDYFKKIECFDSVEISGVEDRFNASLGTYHDLLKIIKDKDFLDNEENEDILEDIVLTLTLFEDREMIEERLKTYAHLFDDKVMKQLKRRRYTGWGRLSRKLINGIRDKQSGKTILDFLKSDGFANRNFMQLIHDDSLTFKEDIQKAQVSGQGDSLHEHIANLAGSPAIKKGILQTVKVVDELVKVMGRHKPENIVIEMARENQTTQKGQKNSRERMKRIEEGIKELGSQILKEHPVENTQLQNEKLYLYYLQNGRDMYVDQELDINRLSDYDVDHIVPQSFLKDDSIDNKVLTRSDKARGKSDNVPSEEVVKKMKNYWRQLLNAKLITQRKFDNLTKAERGGLSELDKAGFIKRQLVETRQITKHVAQILDSRMNTKYDENDKLIREVKVITLKSKLVSDFRKDFQFYKVREINNYHHAHDAYLNAVVGTALIKKYPKLESEFVYGDYKVYDVRKMIAKSEQEIGKATAKYFFYSNIMNFFKTEITLANGEIRKRPLIETNGETGEIVWDKGRDFATVRKVLSMPQVNIVKKTEVQTGGFSKESILPKRNSDKLIARKKDWDPKKYGGFDSPTVAYSVLVVAKVEKGKSKKLKSVKELLGITIMERSSFEKNPIDFLEAKGYKEVKKDLIIKLPKYSLFELENGRKRMLASAGELQKGNELALPSKYVNFLYLASHYEKLKGSPEDNEQKQLFVEQHKHYLDEIIEQISEFSKRVILADANLDKVLSAYNKHRDKPIREQAENIIHLFTLTNLGAPAAFKYFDTTIDRKRYTSTKEVLDATLIHQSITGLYETRIDLSQLGGDGGGGGGSGGGGSGGGGSGGGGSGGGGSGGGVLDTPPSHIGLEHLPPPPEVPQFPLNLERLQALQDLVHRSLEAGYISPWDGPGNNPVFPVRKPNGAWRFVHDLRATNALTKPIPALSPGPPDLTAIPTHPPHIICLDLKDAFFQIPVEDRFRFYLSFTLPSPGGLQPHRRFAWRVLPQGFINSPALFNRALQEPLRQVSAAFSQSLLVSYMDDILYASPTEEQRSQCYQALAARLRDLGFQVASEKTSQTPSPVPFLGQMVHEQIVTYQSLPTLQISSPISLHQLQAVLGDLQWVSRGTPTTRRPLQLLYSSLKRHHDPRAIIQLSPEQLQGIAELRQALSHNARSRYNEQEPLLAYVHLTRAGSTLVLFQKGAQFPLAYFQTPLTDNQASPWGLLLLLGCQYLQTQALSSYAKPILKYYHNLPKTSLDNWIQSSEDPRVQELLQLWPQISSQGIQPPGPWKTLITRAEVFLTPQFSPDPIPAALCLFSDGATGRGAYCLWKDHLLDFQAVPAPESAQKGELAGLLAGLAAAPPEPVNIWVDSKYLYSLLRTWVLGAWLQPDPVPSYALLYKSLLRHPAIVVGHVRSHSSASHPIASLNNYVDQLAGKRTADGSEFEKRTADGSEFESPKKKAKVE

SEQ ID NO: 189 - protein, 1996 aa, synthetic construct
MPAAKRVKLDGGDKKYSIGLDIGTNSVGWAVITDEYKVPSKKFKVLGNTDRHSIKKNLIGALLFDSGETAEATRLKRTARRRYTRRKNRICYLQEIFSNEMAKVDDSFFHRLEESFLVEEDKKHERHPIFGNIVDEVAYHEKYPTIYHLRKKLVDSTDKADLRLIYLALAHMIKFRGHFLIEGDLNPDNSDVDKLFIQLVQTYNQLFEENPINASGVDAKAILSARLSKSRRLENLIAQLPGEKKNGLFGNLIALSLGLTPNFKSNFDLAEDAKLQLSKDTYDDDLDNLLAQIGDQYADLFLAAKNLSDAILLSDILRVNTEITKAPLSASMIKRYDEHHQDLTLLKALVRQQLPEKYKEIFFDQSKNGYAGYIDGGASQEEFYKFIKPILEKMDGTEELLVKLNREDLLRKQRTFDNGSIPHQIHLGELHAILRRQEDFYPFLKDNREKIEKILTFRIPYYVGPLARGNSRFAWMTRKSEETITPWNFEEVVDKGASAQSFIERMTNFDKNLPNEKVLPKHSLLYEYFTVYNELTKVKYVTEGMRKPAFLSGEQKKAIVDLLFKTNRKVTVKQLKEDYFKKIECFDSVEISGVEDRFNASLGTYHDLLKIIKDKDFLDNEENEDILEDIVLTLTLFEDREMIEERLKTYAHLFDDKVMKQLKRRRYTGWGRLSRKLINGIRDKQSGKTILDFLKSDGFANRNFMQLIHDDSLTFKEDIQKAQVSGQGDSLHEHIANLAGSPAIKKGILQTVKVVDELVKVMGRHKPENIVIEMARENQTTQKGQKNSRERMKRIEEGIKELGSQILKEHPVENTQLQNEKLYLYYLQNGRDMYVDQELDINRLSDYDVDHIVPQSFLKDDSIDNKVLTRSDKARGKSDNVPSEEVVKKMKNYWRQLLNAKLITQRKFDNLTKAERGGLSELDKAGFIKRQLVETRQITKHVAQILDSRMNTKYDENDKLIREVKVITLKSKLVSDFRKDFQFYKVREINNYHHAHDAYLNAVVGTALIKKYPKLESEFVYGDYKVYDVRKMIAKSEQEIGKATAKYFFYSNIMNFFKTEITLANGEIRKRPLIETNGETGEIVWDKGRDFATVRKVLSMPQVNIVKKTEVQTGGFSKESILPKRNSDKLIARKKDWDPKKYGGFDSPTVAYSVLVVAKVEKGKSKKLKSVKELLGITIMERSSFEKNPIDFLEAKGYKEVKKDLIIKLPKYSLFELENGRKRMLASAGELQKGNELALPSKYVNFLYLASHYEKLKGSPEDNEQKQLFVEQHKHYLDEIIEQISEFSKRVILADANLDKVLSAYNKHRDKPIREQAENIIHLFTLTNLGAPAAFKYFDTTIDRKRYTSTKEVLDATLIHQSITGLYETRIDLSQLGGDGGGGGGSSGGGVLDTPPSHIGLEHLPPPPEVPQFPLNLERLQALQDLVHRSLEAGYISPWDGPGNNPVFPVRKPNGAWRFVHDLRATNALTKPIPALSPGPPDLTAIPTHPPHIICLDLKDAFFQIPVEDRFRFYLSFTLPSPGGLQPHRRFAWRVLPQGFINSPALFNRALQEPLRQVSAAFSQSLLVSYMDDILYASPTEEQRSQCYQALAARLRDLGFQVASEKTSQTPSPVPFLGQMVHEQIVTYQSLPTLQISSPISLHQLQAVLGDLQWVSRGTPTTRRPLQLLYSSLKRHHDPRAIIQLSPEQLQGIAELRQALSHNARSRYNEQEPLLAYVHLTRAGSTLVLFQKGAQFPLAYFQTPLTDNQASPWGLLLLLGCQYLQTQALSSYAKPILKYYHNLPKTSLDNWIQSSEDPRVQELLQLWPQISSQGIQPPGPWKTLITRAEVFLTPQFSPDPIPAALCLFSDGATGRGAYCLWKDHLLDFQAVPAPESAQKGELAGLLAGLAAAPPEPVNIWVDSKYLYSLLRTWVLGAWLQPDPVPSYALLYKSLLRHPAIVVGHVRSHSSASHPIASLNNYVDQLAGKRTADGSEFEKRTADGSEFESPKKKAKVE

SEQ ID NO: 190 - protein, 2123 aa, synthetic construct; identical to SEQ ID NO: 36

SEQ ID NO: 191 - protein, 2095 aa, synthetic construct
MPAAKRVKLDGGDKKYSIGLDIGTNSVGWAVITDEYKVPSKKFKVLGNTDRHSIKKNLIGALLFDSGETAEATRLKRTARRRYTRRKNRICYLQEIFSNEMAKVDDSFFHRLEESFLVEEDKKHERHPIFGNIVDEVAYHEKYPTIYHLRKKLVDSTDKADLRLIYLALAHMIKFRGHFLIEGDLNPDNSDVDKLFIQLVQTYNQLFEENPINASGVDAKAILSARLSKSRRLENLIAQLPGEKKNGLFGNLIALSLGLTPNFKSNFDLAEDAKLQLSKDTYDDDLDNLLAQIGDQYADLFLAAKNLSDAILLSDILRVNTEITKAPLSASMIKRYDEHHQDLTLLKALVRQQLPEKYKEIFFDQSKNGYAGYIDGGASQEEFYKFIKPILEKMDGTEELLVKLNREDLLRKQRTFDNGSIPHQIHLGELHAILRRQEDFYPFLKDNREKIEKILTFRIPYYVGPLARGNSRFAWMTRKSEETITPWNFEEVVDKGASAQSFIERMTNFDKNLPNEKVLPKHSLLYEYFTVYNELTKVKYVTEGMRKPAFLSGEQKKAIVDLLFKTNRKVTVKQLKEDYFKKIECFDSVEISGVEDRFNASLGTYHDLLKIIKDKDFLDNEENEDILEDIVLTLTLFEDREMIEERLKTYAHLFDDKVMKQLKRRRYTGWGRLSRKLINGIRDKQSGKTILDFLKSDGFANRNFMQLIHDDSLTFKEDIQKAQVSGQGDSLHEHIANLAGSPAIKKGILQTVKVVDELVKVMGRHKPENIVIEMARENQTTQKGQKNSRERMKRIEEGIKELGSQILKEHPVENTQLQNEKLYLYYLQNGRDMYVDQELDINRLSDYDVDHIVPQSFLKDDSIDNKVLTRSDKARGKSDNVPSEEVVKKMKNYWRQLLNAKLITQRKFDNLTKAERGGLSELDKAGFIKRQLVETRQITKHVAQILDSRMNTKYDENDKLIREVKVITLKSKLVSDFRKDFQFYKVREINNYHHAHDAYLNAVVGTALIKKYPKLESEFVYGDYKVYDVRKMIAKSEQEIGKATAKYFFYSNIMNFFKTEITLANGEIRKRPLIETNGETGEIVWDKGRDFATVRKVLSMPQVNIVKKTEVQTGGFSKESILPKRNSDKLIARKKDWDPKKYGGFDSPTVAYSVLVVAKVEKGKSKKLKSVKELLGITIMERSSFEKNPIDFLEAKGYKEVKKDLIIKLPKYSLFELENGRKRMLASAGELQKGNELALPSKYVNFLYLASHYEKLKGSPEDNEQKQLFVEQHKHYLDEIIEQISEFSKRVILADANLDKVLSAYNKHRDKPIREQAENIIHLFTLTNLGAPAAFKYFDTTIDRKRYTSTKEVLDATLIHQSITGLYETRIDLSQLGGDGGGGSGGSGGSGGSGGSGGSGGLDDEYRLYSPLVKPDQNIQFWLEQFPQAWAETAGMGLAKQVPPQVIQLKASATPVSVRQYPLSKEAQEGIRPHVQRLIQQGILVPVQSPWNTPLLPVRKPGTNDYRPVQDLREVNKRVQDIHPTVPNPYNLLCALPPQRSWYTVLDLKDAFFCLRLHPTSQPLFAFEWRDPGTGRTGQLTWTRLPQGFKNSPTIFNEALHRDLANFRIQHPQVTLLQYVDDLLLAGATKQDCLEGTKALLLELSDLGYRASAKKAQICRREVTYLGYSLRDGQRWLTEARKKTVVQIPAPTTAKQVREFLGKAGFCRLFIPGFATLAAPLYPLTKPKGEFSWAPEHQKAFDAIKKALLSAPALALPDVTKPFTLYVDERKGVARGVLTQTLGPWRRPVAYLSKKLDPVASGWPVCLKAIAAVAILVKDADKLTLGQNITVIAPHALENIVRQPPDRWMTNARMTHYQSLLLTERVTFAPPAALNPATLLPEETDEPVTHDCHQLLIEETGVRKDLTDIPLTGEVLTWFTDGSSYVVEGKRMAGAAVVDGTRTIWASSLPEGTSAQKAELMALTQALRLAEGKSINIYTDSRYAFATAHVHGAIYKQRGWLTSAGREIKNKEEILSLLEALHLPKRLAIIHCPGHQKAKDPISRGNQMADRVAKQAAQGVNLLPAGKRTADGSEFEKRTADGSEFESPKKKAKVE

SEQ ID NO: 192 - protein, 2088 aa, synthetic construct
MPAAKRVKLDGGDKKYSIGLDIGTNSVGWAVITDEYKVPSKKFKVLGNTDRHSIKKNLIGALLFDSGETAEATRLKRTARRRYTRRKNRICYLQEIFSNEMAKVDDSFFHRLEESFLVEEDKKHERHPIFGNIVDEVAYHEKYPTIYHLRKKLVDSTDKADLRLIYLALAHMIKFRGHFLIEGDLNPDNSDVDKLFIQLVQTYNQLFEENPINASGVDAKAILSARLSKSRRLENLIAQLPGEKKNGLFGNLIALSLGLTPNFKSNFDLAEDAKLQLSKDTYDDDLDNLLAQIGDQYADLFLAAKNLSDAILLSDILRVNTEITKAPLSASMIKRYDEHHQDLTLLKALVRQQLPEKYKEIFFDQSKNGYAGYIDGGASQEEFYKFIKPILEKMDGTEELLVKLNREDLLRKQRTFDNGSIPHQIHLGELHAILRRQEDFYPFLKDNREKIEKILTFRIPYYVGPLARGNSRFAWMTRKSEETITPWNFEEVVDKGASAQSFIERMTNFDKNLPNEKVLPKHSLLYEYFTVYNELTKVKYVTEGMRKPAFLSGEQKKAIVDLLFKTNRKVTVKQLKEDYFKKIECFDSVEISGVEDRFNASLGTYHDLLKIIKDKDFLDNEENEDILEDIVLTLTLFEDREMIEERLKTYAHLFDDKVMKQLKRRRYTGWGRLSRKLINGIRDKQSGKTILDFLKSDGFANRNFMQLIHDDSLTFKEDIQKAQVSGQGDSLHEHIANLAGSPAIKKGILQTVKVVDELVKVMGRHKPENIVIEMARENQTTQKGQKNSRERMKRIEEGIKELGSQILKEHPVENTQLQNEKLYLYYLQNGRDMYVDQELDINRLSDYDVDHIVPQSFLKDDSIDNKVLTRSDKARGKSDNVPSEEVVKKMKNYWRQLLNAKLITQRKFDNLTKAERGGLSELDKAGFIKRQLVETRQITKHVAQILDSRMNTKYDENDKLIREVKVITLKSKLVSDFRKDFQFYKVREINNYHHAHDAYLNAVVGTALIKKYPKLESEFVYGDYKVYDVRKMIAKSEQEIGKATAKYFFYSNIMNFFKTEITLANGEIRKRPLIETNGETGEIVWDKGRDFATVRKVLSMPQVNIVKKTEVQTGGFSKESILPKRNSDKLIARKKDWDPKKYGGFDSPTVAYSVLVVAKVEKGKSKKLKSVKELLGITIMERSSFEKNPIDFLEAKGYKEVKKDLIIKLPKYSLFELENGRKRMLASAGELQKGNELALPSKYVNFLYLASHYEKLKGSPEDNEQKQLFVEQHKHYLDEIIEQISEFSKRVILADANLDKVLSAYNKHRDKPIREQAENIIHLFTLTNLGAPAAFKYFDTTIDRKRYTSTKEVLDATLIHQSITGLYETRIDLSQLGGDGGPAPEAAAKGGGGGLDDEYRLYSPLVKPDQNIQFWLEQFPQAWAETAGMGLAKQVPPQVIQLKASATPVSVRQYPLSKEAQEGIRPHVQRLIQQGILVPVQSPWNTPLLPVRKPGTNDYRPVQDLREVNKRVQDIHPTVPNPYNLLCALPPQRSWYTVLDLKDAFFCLRLHPTSQPLFAFEWRDPGTGRTGQLTWTRLPQGFKNSPTIFNEALHRDLANFRIQHPQVTLLQYVDDLLLAGATKQDCLEGTKALLLELSDLGYRASAKKAQICRREVTYLGYSLRDGQRWLTEARKKTVVQIPAPTTAKQVREFLGKAGFCRLFIPGFATLAAPLYPLTKPKGEFSWAPEHQKAFDAIKKALLSAPALALPDVTKPFTLYVDERKGVARGVLTQTLGPWRRPVAYLSKKLDPVASGWPVCLKAIAAVAILVKDADKLTLGQNITVIAPHALENIVRQPPDRWMTNARMTHYQSLLLTERVTFAPPAALNPATLLPEETDEPVTHDCHQLLIEETGVRKDLTDIPLTGEVLTWFTDGSSYVVEGKRMAGAAVVDGTRTIWASSLPEGTSAQKAELMALTQALRLAEGKSINIYTDSRYAFATAHVHGAIYKQRGWLTSAGREIKNKEEILSLLEALHLPKRLAIIHCPGHQKAKDPISRGNQMADRVAKQAAQGVNLLPAGKRTADGSEFEKRTADGSEFESPKKKAKVE

SEQ ID NO: 193 - protein, 2107 aa, synthetic construct
MPAAKRVKLDGGDKKYSIGLDIGTNSVGWAVITDEYKVPSKKFKVLGNTDRHSIKKNLIGALLFDSGETAEATRLKRTARRRYTRRKNRICYLQEIFSNEMAKVDDSFFHRLEESFLVEEDKKHERHPIFGNIVDEVAYHEKYPTIYHLRKKLVDSTDKADLRLIYLALAHMIKFRGHFLIEGDLNPDNSDVDKLFIQLVQTYNQLFEENPINASGVDAKAILSARLSKSRRLENLIAQLPGEKKNGLFGNLIALSLGLTPNFKSNFDLAEDAKLQLSKDTYDDDLDNLLAQIGDQYADLFLAAKNLSDAILLSDILRVNTEITKAPLSASMIKRYDEHHQDLTLLKALVRQQLPEKYKEIFFDQSKNGYAGYIDGGASQEEFYKFIKPILEKMDGTEELLVKLNREDLLRKQRTFDNGSIPHQIHLGELHAILRRQEDFYPFLKDNREKIEKILTFRIPYYVGPLARGNSRFAWMTRKSEETITPWNFEEVVDKGASAQSFIERMTNFDKNLPNEKVLPKHSLLYEYFTVYNELTKVKYVTEGMRKPAFLSGEQKKAIVDLLFKTNRKVTVKQLKEDYFKKIECFDSVEISGVEDRFNASLGTYHDLLKIIKDKDFLDNEENEDILEDIVLTLTLFEDREMIEERLKTYAHLFDDKVMKQLKRRRYTGWGRLSRKLINGIRDKQSGKTILDFLKSDGFANRNFMQLIHDDSLTFKEDIQKAQVSGQGDSLHEHIANLAGSPAIKKGILQTVKVVDELVKVMGRHKPENIVIEMARENQTTQKGQKNSRERMKRIEEGIKELGSQILKEHPVENTQLQNEKLYLYYLQNGRDMYVDQELDINRLSDYDVDHIVPQSFLKDDSIDNKVLTRSDKARGKSDNVPSEEVVKKMKNYWRQLLNAKLITQRKFDNLTKAERGGLSELDKAGFIKRQLVETRQITKHVAQILDSRMNTKYDENDKLIREVKVITLKSKLVSDFRKDFQFYKVREINNYHHAHDAYLNAVVGTALIKKYPKLESEFVYGDYKVYDVRKMIAKSEQEIGKATAKYFFYSNIMNFFKTEITLANGEIRKRPLIETNGETGEIVWDKGRDFATVRKVLSMPQVNIVKKTEVQTGGFSKESILPKRNSDKLIARKKDWDPKKYGGFDSPTVAYSVLVVAKVEKGKSKKLKSVKELLGITIMERSSFEKNPIDFLEAKGYKEVKKDLIIKLPKYSLFELENGRKRMLASAGELQKGNELALPSKYVNFLYLASHYEKLKGSPEDNEQKQLFVEQHKHYLDEIIEQISEFSKRVILADANLDKVLSAYNKHRDKPIREQAENIIHLFTLTNLGAPAAFKYFDTTIDRKRYTSTKEVLDATLIHQSITGLYETRIDLSQLGGDGGEAAAKEAAAKEAAAKEAAAKEAAAKEAAAKGGLDDEYRLYSPLVKPDQNIQFWLEQFPQAWAETAGMGLAKQVPPQVIQLKASATPVSVRQYPLSKEAQEGIRPHVQRLIQQGILVPVQSPWNTPLLPVRKPGTNDYRPVQDLREVNKRVQDIHPTVPNPYNLLCALPPQRSWYTVLDLKDAFFCLRLHPTSQPLFAFEWRDPGTGRTGQLTWTRLPQGFKNSPTIFNEALHRDLANFRIQHPQVTLLQYVDDLLLAGATKQDCLEGTKALLLELSDLGYRASAKKAQICRREVTYLGYSLRDGQRWLTEARKKTVVQIPAPTTAKQVREFLGKAGFCRLFIPGFATLAAPLYPLTKPKGEFSWAPEHQKAFDAIKKALLSAPALALPDVTKPFTLYVDERKGVARGVLTQTLGPWRRPVAYLSKKLDPVASGWPVCLKAIAAVAILVKDADKLTLGQNITVIAPHALENIVRQPPDRWMTNARMTHYQSLLLTERVTFAPPAALNPATLLPEETDEPVTHDCHQLLIEETGVRKDLTDIPLTGEVLTWFTDGSSYVVEGKRMAGAAVVDGTRTIWASSLPEGTSAQKAELMALTQALRLAEGKSINIYTDSRYAFATAHVHGAIYKQRGWLTSAGREIKNKEEILSLLEALHLPKRLAIIHCPGHQKAKDPISRGNQMADRVAKQAAQGVNLLPAGKRTADGSEFEKRTADGSEFESPKKKAKVE

SEQ ID NO: 194 - protein, 2090 aa, synthetic construct; identical to SEQ ID NO: 54

SEQ ID NO: 195 - protein, 2088 aa, synthetic construct; identical to SEQ ID NO: 35

SEQ ID NO: 196 - protein, 2093 aa, synthetic construct; identical to SEQ ID NO: 90

SEQ ID NO: 197 - protein, 2086 aa, synthetic construct
MPAAKRVKLDGGDKKYSIGLDIGTNSVGWAVITDEYKVPSKKFKVLGNTDRHSIKKNLIGALLFDSGETAEATRLKRTARRRYTRRKNRICYLQEIFSNEMAKVDDSFFHRLEESFLVEEDKKHERHPIFGNIVDEVAYHEKYPTIYHLRKKLVDSTDKADLRLIYLALAHMIKFRGHFLIEGDLNPDNSDVDKLFIQLVQTYNQLFEENPINASGVDAKAILSARLSKSRRLENLIAQLPGEKKNGLFGNLIALSLGLTPNFKSNFDLAEDAKLQLSKDTYDDDLDNLLAQIGDQYADLFLAAKNLSDAILLSDILRVNTEITKAPLSASMIKRYDEHHQDLTLLKALVRQQLPEKYKEIFFDQSKNGYAGYIDGGASQEEFYKFIKPILEKMDGTEELLVKLNREDLLRKQRTFDNGSIPHQIHLGELHAILRRQEDFYPFLKDNREKIEKILTFRIPYYVGPLARGNSRFAWMTRKSEETITPWNFEEVVDKGASAQSFIERMTNFDKNLPNEKVLPKHSLLYEYFTVYNELTKVKYVTEGMRKPAFLSGEQKKAIVDLLFKTNRKVTVKQLKEDYFKKIECFDSVEISGVEDRFNASLGTYHDLLKIIKDKDFLDNEENEDILEDIVLTLTLFEDREMIEERLKTYAHLFDDKVMKQLKRRRYTGWGRLSRKLINGIRDKQSGKTILDFLKSDGFANRNFMQLIHDDSLTFKEDIQKAQVSGQGDSLHEHIANLAGSPAIKKGILQTVKVVDELVKVMGRHKPENIVIEMARENQTTQKGQKNSRERMKRIEEGIKELGSQILKEHPVENTQLQNEKLYLYYLQNGRDMYVDQELDINRLSDYDVDHIVPQSFLKDDSIDNKVLTRSDKARGKSDNVPSEEVVKKMKNYWRQLLNAKLITQRKFDNLTKAERGGLSELDKAGFIKRQLVETRQITKHVAQILDSRMNTKYDENDKLIREVKVITLKSKLVSDFRKDFQFYKVREINNYHHAHDAYLNAVVGTALIKKYPKLESEFVYGDYKVYDVRKMIAKSEQEIGKATAKYFFYSNIMNFFKTEITLANGEIRKRPLIETNGETGEIVWDKGRDFATVRKVLSMPQVNIVKKTEVQTGGFSKESILPKRNSDKLIARKKDWDPKKYGGFDSPTVAYSVLVVAKVEKGKSKKLKSVKELLGITIMERSSFEKNPIDFLEAKGYKEVKKDLIIKLPKYSLFELENGRKRMLASAGELQKGNELALPSKYVNFLYLASHYEKLKGSPEDNEQKQLFVEQHKHYLDEIIEQISEFSKRVILADANLDKVLSAYNKHRDKPIREQAENIIHLFTLTNLGAPAAFKYFDTTIDRKRYTSTKEVLDATLIHQSITGLYETRIDLSQLGGDGGGGGGGSPAPGGLDDEYRLYSPLVKPDQNIQFWLEQFPQAWAETAGMGLAKQVPPQVIQLKASATPVSVRQYPLSKEAQEGIRPHVQRLIQQGILVPVQSPWNTPLLPVRKPGTNDYRPVQDLREVNKRVQDIHPTVPNPYNLLCALPPQRSWYTVLDLKDAFFCLRLHPTSQPLFAFEWRDPGTGRTGQLTWTRLPQGFKNSPTIFNEALHRDLANFRIQHPQVTLLQYVDDLLLAGATKQDCLEGTKALLLELSDLGYRASAKKAQICRREVTYLGYSLRDGQRWLTEARKKTVVQIPAPTTAKQVREFLGKAGFCRLFIPGFATLAAPLYPLTKPKGEFSWAPEHQKAFDAIKKALLSAPALALPDVTKPFTLYVDERKGVARGVLTQTLGPWRRPVAYLSKKLDPVASGWPVCLKAIAAVAILVKDADKLTLGQNITVIAPHALENIVRQPPDRWMTNARMTHYQSLLLTERVTFAPPAALNPATLLPEETDEPVTHDCHQLLIEETGVRKDLTDIPLTGEVLTWFTDGSSYVVEGKRMAGAAVVDGTRTIWASSLPEGTSAQKAELMALTQALRLAEGKSINIYTDSRYAFATAHVHGAIYKQRGWLTSAGREIKNKEEILSLLEALHLPKRLAIIHCPGHQKAKDPISRGNQMADRVAKQAAQGVNLLPAGKRTADGSEFEKRTADGSEFESPKKKAKVE

SEQ ID NO: 198 - protein, 2086 aa, synthetic construct; identical to SEQ ID NO: 58

SEQ ID NO: 199 - protein, 2088 aa, synthetic construct; identical to SEQ ID NO: 40

SEQ ID NO: 200 - protein, 2088 aa, synthetic construct; identical to SEQ ID NO: 63

SEQ ID NO: 201 - protein, 2089 aa, synthetic construct; identical to SEQ ID NO: 74

SEQ ID NO: 202 - protein, 2092 aa, synthetic construct
MPAAKRVKLDGGDKKYSIGLDIGTNSVGWAVITDEYKVPSKKFKVLGNTDRHSIKKNLIGALLFDSGETAEATRLKRTARRRYTRRKNRICYLQEIFSNEMAKVDDSFFHRLEESFLVEEDKKHERHPIFGNIVDEVAYHEKYPTIYHLRKKLVDSTDKADLRLIYLALAHMIKFRGHFLIEGDLNPDNSDVDKLFIQLVQTYNQLFEENPINASGVDAKAILSARLSKSRRLENLIAQLPGEKKNGLFGNLIALSLGLTPNFKSNFDLAEDAKLQLSKDTYDDDLDNLLAQIGDQYADLFLAAKNLSDAILLSDILRVNTEITKAPLSASMIKRYDEHHQDLTLLKALVRQQLPEKYKEIFFDQSKNGYAGYIDGGASQEEFYKFIKPILEKMDGTEELLVKLNREDLLRKQRTFDNGSIPHQIHLGELHAILRRQEDFYPFLKDNREKIEKILTFRIPYYVGPLARGNSRFAWMTRKSEETITPWNFEEVVDKGASAQSFIERMTNFDKNLPNEKVLPKHSLLYEYFTVYNELTKVKYVTEGMRKPAFLSGEQKKAIVDLLFKTNRKVTVKQLKEDYFKKIECFDSVEISGVEDRFNASLGTYHDLLKIIKDKDFLDNEENEDILEDIVLTLTLFEDREMIEERLKTYAHLFDDKVMKQLKRRRYTGWGRLSRKLINGIRDKQSGKTILDFLKSDGFANRNFMQLIHDDSLTFKEDIQKAQVSGQGDSLHEHIANLAGSPAIKKGILQTVKVVDELVKVMGRHKPENIVIEMARENQTTQKGQKNSRERMKRIEEGIKELGSQILKEHPVENTQLQNEKLYLYYLQNGRDMYVDQELDINRLSDYDVDHIVPQSFLKDDSIDNKVLTRSDKARGKSDNVPSEEVVKKMKNYWRQLLNAKLITQRKFDNLTKAERGGLSELDKAGFIKRQLVETRQITKHVAQILDSRMNTKYDENDKLIREVKVITLKSKLVSDFRKDFQFYKVREINNYHHAHDAYLNAVVGTALIKKYPKLESEFVYGDYKVYDVRKMIAKSEQEIGKATAKYFFYSNIMNFFKTEITLANGEIRKRPLIETNGETGEIVWDKGRDFATVRKVLSMPQVNIVKKTEVQTGGFSKESILPKRNSDKLIARKKDWDPKKYGGFDSPTVAYSVLVVAKVEKGKSKKLKSVKELLGITIMERSSFEKNPIDFLEAKGYKEVKKDLIIKLPKYSLFELENGRKRMLASAGELQKGNELALPSKYVNFLYLASHYEKLKGSPEDNEQKQLFVEQHKHYLDEIIEQISEFSKRVILADANLDKVLSAYNKHRDKPIREQAENIIHLFTLTNLGAPAAFKYFDTTIDRKRYTSTKEVLDATLIHQSITGLYETRIDLSQLGGDGGGSSGSSGSSGSSGSSGGLDDEYRLYSPLVKPDQNIQFWLEQFPQAWAETAGMGLAKQVPPQVIQLKASATPVSVRQYPLSKEAQEGIRPHVQRLIQQGILVPVQSPWNTPLLPVRKPGTNDYRPVQDLREVNKRVQDIHPTVPNPYNLLCALPPQRSWYTVLDLKDAFFCLRLHPTSQPLFAFEWRDPGTGRTGQLTWTRLPQGFKNSPTIFNEALHRDLANFRIQHPQVTLLQYVDDLLLAGATKQDCLEGTKALLLELSDLGYRASAKKAQICRREVTYLGYSLRDGQRWLTEARKKTVVQIPAPTTAKQVREFLGKAGFCRLFIPGFATLAAPLYPLTKPKGEFSWAPEHQKAFDAIKKALLSAPALALPDVTKPFTLYVDERKGVARGVLTQTLGPWRRPVAYLSKKLDPVASGWPVCLKAIAAVAILVKDADKLTLGQNITVIAPHALENIVRQPPDRWMTNARMTHYQSLLLTERVTFAPPAALNPATLLPEETDEPVTHDCHQLLIEETGVRKDLTDIPLTGEVLTWFTDGSSYVVEGKRMAGAAVVDGTRTIWASSLPEGTSAQKAELMALTQALRLAEGKSINIYTDSRYAFATAHVHGAIYKQRGWLTSAGREIKNKEEILSLLEALHLPKRLAIIHCPGHQKAKDPISRGNQMADRVAKQAAQGVNLLPAGKRTADGSEFEKRTADGSEFESPKKKAKVE

SEQ ID NO: 203 - protein, 2083 aa, synthetic construct; identical to SEQ ID NO: 76

SEQ ID NO: 204 - protein, 2088 aa, synthetic construct; identical to SEQ ID NO: 71

SEQ ID NO: 205 - protein, 2086 aa, synthetic construct; identical to SEQ ID NO: 73

SEQ ID NO: 206 - protein, 2085 aa, synthetic construct; identical to SEQ ID NO: 57

SEQ ID NO: 207 - protein, 2086 aa, synthetic construct; identical to SEQ ID NO: 43

SEQ ID NO: 208 - protein, 2086 aa, synthetic construct
MPAAKRVKLDGGDKKYSIGLDIGTNSVGWAVITDEYKVPSKKFKVLGNTDRHSIKKNLIGALLFDSGETAEATRLKRTARRRYTRRKNRICYLQEIFSNEMAKVDDSFFHRLEESFLVEEDKKHERHPIFGNIVDEVAYHEKYPTIYHLRKKLVDSTDKADLRLIYLALAHMIKFRGHFLIEGDLNPDNSDVDKLFIQLVQTYNQLFEENPINASGVDAKAILSARLSKSRRLENLIAQLPGEKKNGLFGNLIALSLGLTPNFKSNFDLAEDAKLQLSKDTYDDDLDNLLAQIGDQYADLFLAAKNLSDAILLSDILRVNTEITKAPLSASMIKRYDEHHQDLTLLKALVRQQLPEKYKEIFFDQSKNGYAGYIDGGASQEEFYKFIKPILEKMDGTEELLVKLNREDLLRKQRTFDNGSIPHQIHLGELHAILRRQEDFYPFLKDNREKIEKILTFRIPYYVGPLARGNSRFAWMTRKSEETITPWNFEEVVDKGASAQSFIERMTNFDKNLPNEKVLPKHSLLYEYFTVYNELTKVKYVTEGMRKPAFLSGEQKKAIVDLLFKTNRKVTVKQLKEDYFKKIECFDSVEISGVEDRFNASLGTYHDLLKIIKDKDFLDNEENEDILEDIVLTLTLFEDREMIEERLKTYAHLFDDKVMKQLKRRRYTGWGRLSRKLINGIRDKQSGKTILDFLKSDGFANRNFMQLIHDDSLTFKEDIQKAQVSGQGDSLHEHIANLAGSPAIKKGILQTVKVVDELVKVMGRHKPENIVIEMARENQTTQKGQKNSRERMKRIEEGIKELGSQILKEHPVENTQLQNEKLYLYYLQNGRDMYVDQELDINRLSDYDVDHIVPQSFLKDDSIDNKVLTRSDKARGKSDNVPSEEVVKKMKNYWRQLLNAKLITQRKFDNLTKAERGGLSELDKAGFIKRQLVETRQITKHVAQILDSRMNTKYDENDKLIREVKVITLKSKLVSDFRKDFQFYKVREINNYHHAHDAYLNAVVGTALIKKYPKLESEFVYGDYKVYDVRKMIAKSEQEIGKATAKYFFYSNIMNFFKTEITLANGEIRKRPLIETNGETGEIVWDKGRDFATVRKVLSMPQVNIVKKTEVQTGGFSKESILPKRNSDKLIARKKDWDPKKYGGFDSPTVAYSVLVVAKVEKGKSKKLKSVKELLGITIMERSSFEKNPIDFLEAKGYKEVKKDLIIKLPKYSLFELENGRKRMLASAGELQKGNELALPSKYVNFLYLASHYEKLKGSPEDNEQKQLFVEQHKHYLDEIIEQISEFSKRVILADANLDKVLSAYNKHRDKPIREQAENIIHLFTLTNLGAPAAFKYFDTTIDRKRYTSTKEVLDATLIHQSITGLYETRIDLSQLGGDGGGSSGSSGSSGGLDDEYRLYSPLVKPDQNIQFWLEQFPQAWAETAGMGLAKQVPPQVIQLKASATPVSVRQYPLSKEAQEGIRPHVQRLIQQGILVPVQSPWNTPLLPVRKPGTNDYRPVQDLREVNKRVQDIHPTVPNPYNLLCALPPQRSWYTVLDLKDAFFCLRLHPTSQPLFAFEWRDPGTGRTGQLTWTRLPQGFKNSPTIFNEALHRDLANFRIQHPQVTLLQYVDDLLLAGATKQDCLEGTKALLLELSDLGYRASAKKAQICRREVTYLGYSLRDGQRWLTEARKKTVVQIPAPTTAKQVREFLGKAGFCRLFIPGFATLAAPLYPLTKPKGEFSWAPEHQKAFDAIKKALLSAPALALPDVTKPFTLYVDERKGVARGVLTQTLGPWRRPVAYLSKKLDPVASGWPVCLKAIAAVAILVKDADKLTLGQNITVIAPHALENIVRQPPDRWMTNARMTHYQSLLLTERVTFAPPAALNPATLLPEETDEPVTHDCHQLLIEETGVRKDLTDIPLTGEVLTWFTDGSSYVVEGKRMAGAAVVDGTRTIWASSLPEGTSAQKAELMALTQALRLAEGKSINIYTDSRYAFATAHVHGAIYKQRGWLTSAGREIKNKEEILSLLEALHLPKRLAIIHCPGHQKAKDPISRGNQMADRVAKQAAQGVNLLPAGKRTADGSEFEKRTADGSEFESPKKKAKVE

SEQ ID NO: 209 - protein, 2088 aa, synthetic construct
MPAAKRVKLDGGDKKYSIGLDIGTNSVGWAVITDEYKVPSKKFKVLGNTDRHSIKKNLIGALLFDSGETAEATRLKRTARRRYTRRKNRICYLQEIFSNEMAKVDDSFFHRLEESFLVEEDKKHERHPIFGNIVDEVAYHEKYPTIYHLRKKLVDSTDKADLRLIYLALAHMIKFRGHFLIEGDLNPDNSDVDKLFIQLVQTYNQLFEENPINASGVDAKAILSARLSKSRRLENLIAQLPGEKKNGLFGNLIALSLGLTPNFKSNFDLAEDAKLQLSKDTYDDDLDNLLAQIGDQYADLFLAAKNLSDAILLSDILRVNTEITKAPLSASMIKRYDEHHQDLTLLKALVRQQLPEKYKEIFFDQSKNGYAGYIDGGASQEEFYKFIKPILEKMDGTEELLVKLNREDLLRKQRTFDNGSIPHQIHLGELHAILRRQEDFYPFLKDNREKIEKILTFRIPYYVGPLARGNSRFAWMTRKSEETITPWNFEEVVDKGASAQSFIERMTNFDKNLPNEKVLPKHSLLYEYFTVYNELTKVKYVTEGMRKPAFLSGEQKKAIVDLLFKTNRKVTVKQLKEDYFKKIECFDSVEISGVEDRFNASLGTYHDLLKIIKDKDFLDNEENEDILEDIVLTLTLFEDREMIEERLKTYAHLFDDKVMKQLKRRRYTGWGRLSRKLINGIRDKQSGKTILDFLKSDGFANRNFMQLIHDDSLTFKEDIQKAQVSGQGDSLHEHIANLAGSPAIKKGILQTVKVVDELVKVMGRHKPENIVIEMARENQTTQKGQKNSRERMKRIEEGIKELGSQILKEHPVENTQLQNEKLYLYYLQNGRDMYVDQELDINRLSDYDVDHIVPQSFLKDDSIDNKVLTRSDKARGKSDNVPSEEVVKKMKNYWRQLLNAKLITQRKFDNLTKAERGGLSELDKAGFIKRQLVETRQITKHVAQILDSRMNTKYDENDKLIREVKVITLKSKLVSDFRKDFQFYKVREINNYHHAHDAYLNAVVGTALIKKYPKLESEFVYGDYKVYDVRKMIAKSEQEIGKATAKYFFYSNIMNFFKTEITLANGEIRKRPLIETNGETGEIVWDKGRDFATVRKVLSMPQVNIVKKTEVQTGGFSKESILPKRNSDKLIARKKDWDPKKYGGFDSPTVAYSVLVVAKVEKGKSKKLKSVKELLGITIMERSSFEKNPIDFLEAKGYKEVKKDLIIKLPKYSLFELENGRKRMLASAGELQKGNELALPSKYVNFLYLASHYEKLKGSPEDNEQKQLFVEQHKHYLDEIIEQISEFSKRVILADANLDKVLSAYNKHRDKPIREQAENIIHLFTLTNLGAPAAFKYFDTTIDRKRYTSTKEVLDATLIHQSITGLYETRIDLSQLGGDGGGSSEAAAKPAPGGLDDEYRLYSPLVKPDQNIQFWLEQFPQAWAETAGMGLAKQVPPQVIQLKASATPVSVRQYPLSKEAQEGIRPHVQRLIQQGILVPVQSPWNTPLLPVRKPGTNDYRPVQDLREVNKRVQDIHPTVPNPYNLLCALPPQRSWYTVLDLKDAFFCLRLHPTSQPLFAFEWRDPGTGRTGQLTWTRLPQGFKNSPTIFNEALHRDLANFRIQHPQVTLLQYVDDLLLAGATKQDCLEGTKALLLELSDLGYRASAKKAQICRREVTYLGYSLRDGQRWLTEARKKTVVQIPAPTTAKQVREFLGKAGFCRLFIPGFATLAAPLYPLTKPKGEFSWAPEHQKAFDAIKKALLSAPALALPDVTKPFTLYVDERKGVARGVLTQTLGPWRRPVAYLSKKLDPVASGWPVCLKAIAAVAILVKDADKLTLGQNITVIAPHALENIVRQPPDRWMTNARMTHYQSLLLTERVTFAPPAALNPATLLPEETDEPVTHDCHQLLIEETGVRKDLTDIPLTGEVLTWFTDGSSYVVEGKRMAGAAVVDGTRTIWASSLPEGTSAQKAELMALTQALRLAEGKSINIYTDSRYAFATAHVHGAIYKQRGWLTSAGREIKNKEEILSLLEALHLPKRLAIIHCPGHQKAKDPISRGNQMADRVAKQAAQGVNLLPAGKRTADGSEFEKRTADGSEFESPKKKAKVE

SEQ ID NO: 210 - protein, 2086 aa, synthetic construct; identical to SEQ ID NO: 89

SEQ ID NO: 211 - protein, 2088 aa, synthetic construct; identical to SEQ ID NO: 42

SEQ ID NO: 212 - protein, 2083 aa, synthetic construct
MPAAKRVKLDGGDKKYSIGLDIGTNSVGWAVITDEYKVPSKKFKVLGNTDRHSIKKNLIGALLFDSGETAEATRLKRTARRRYTRRKNRICYLQEIFSNEMAKVDDSFFHRLEESFLVEEDKKHERHPIFGNIVDEVAYHEKYPTIYHLRKKLVDSTDKADLRLIYLALAHMIKFRGHFLIEGDLNPDNSDVDKLFIQLVQTYNQLFEENPINASGVDAKAILSARLSKSRRLENLIAQLPGEKKNGLFGNLIALSLGLTPNFKSNFDLAEDAKLQLSKDTYDDDLDNLLAQIGDQYADLFLAAKNLSDAILLSDILRVNTEITKAPLSASMIKRYDEHHQDLTLLKALVRQQLPEKYKEIFFDQSKNGYAGYIDGGASQEEFYKFIKPILEKMDGTEELLVKLNREDLLRKQRTFDNGSIPHQIHLGELHAILRRQEDFYPFLKDNREKIEKILTFRIPYYVGPLARGNSRFAWMTRKSEETITPWNFEEVVDKGASAQSFIERMTNFDKNLPNEKVLPKHSLLYEYFTVYNELTKVKYVTEGMRKPAFLSGEQKKAIVDLLFKTNRKVTVKQLKEDYFKKIECFDSVEISGVEDRFNASLGTYHDLLKIIKDKDFLDNEENEDILEDIVLTLTLFEDREMIEERLKTYAHLFDDKVMKQLKRRRYTGWGRLSRKLINGIRDKQSGKTILDFLKSDGFANRNFMQLIHDDSLTFKEDIQKAQVSGQGDSLHEHIANLAGSPAIKKGILQTVKVVDELVKVMGRHKPENIVIEMARENQTTQKGQKNSRERMKRIEEGIKELGSQILKEHPVENTQLQNEKLYLYYLQNGRDMYVDQELDINRLSDYDVDHIVPQSFLKDDSIDNKVLTRSDKARGKSDNVPSEEVVKKMKNYWRQLLNAKLITQRKFDNLTKAERGGLSELDKAGFIKRQLVETRQITKHVAQILDSRMNTKYDENDKLIREVKVITLKSKLVSDFRKDFQFYKVREINNYHHAHDAYLNAVVGTALIKKYPKLESEFVYGDYKVYDVRKMIAKSEQEIGKATAKYFFYSNIMNFFKTEITLANGEIRKRPLIETNGETGEIVWDKGRDFATVRKVLSMPQVNIVKKTEVQTGGFSKESILPKRNSDKLIARKKDWDPKKYGGFDSPTVAYSVLVVAKVEKGKSKKLKSVKELLGITIMERSSFEKNPIDFLEAKGYKEVKKDLIIKLPKYSLFELENGRKRMLASAGELQKGNELALPSKYVNFLYLASHYEKLKGSPEDNEQKQLFVEQHKHYLDEIIEQISEFSKRVILADANLDKVLSAYNKHRDKPIREQAENIIHLFTLTNLGAPAAFKYFDTTIDRKRYTSTKEVLDATLIHQSITGLYETRIDLSQLGGDGGGGSGSSGGLDDEYRLYSPLVKPDQNIQFWLEQFPQAWAETAGMGLAKQVPPQVIQLKASATPVSVRQYPLSKEAQEGIRPHVQRLIQQGILVPVQSPWNTPLLPVRKPGTNDYRPVQDLREVNKRVQDIHPTVPNPYNLLCALPPQRSWYTVLDLKDAFFCLRLHPTSQPLFAFEWRDPGTGRTGQLTWTRLPQGFKNSPTIFNEALHRDLANFRIQHPQVTLLQYVDDLLLAGATKQDCLEGTKALLLELSDLGYRASAKKAQICRREVTYLGYSLRDGQRWLTEARKKTVVQIPAPTTAKQVREFLGKAGFCRLFIPGFATLAAPLYPLTKPKGEFSWAPEHQKAFDAIKKALLSAPALALPDVTKPFTLYVDERKGVARGVLTQTLGPWRRPVAYLSKKLDPVASGWPVCLKAIAAVAILVKDADKLTLGQNITVIAPHALENIVRQPPDRWMTNARMTHYQSLLLTERVTFAPPAALNPATLLPEETDEPVTHDCHQLLIEETGVRKDLTDIPLTGEVLTWFTDGSSYVVEGKRMAGAAVVDGTRTIWASSLPEGTSAQKAELMALTQALRLAEGKSINIYTDSRYAFATAHVHGAIYKQRGWLTSAGREIKNKEEILSLLEALHLPKRLAIIHCPGHQKAKDPISRGNQMADRVAKQAAQGVNLLPAGKRTADGSEFEKRTADGSEFESPKKKAKVE

SEQ ID NO: 213 - protein, 2086 aa, synthetic construct
MPAAKRVKLDGGDKKYSIGLDIGTNSVGWAVITDEYKVPSKKFKVLGNTDRHSIKKNLIGALLFDSGETAEATRLKRTARRRYTRRKNRICYLQEIFSNEMAKVDDSFFHRLEESFLVEEDKKHERHPIFGNIVDEVAYHEKYPTIYHLRKKLVDSTDKADLRLIYLALAHMIKFRGHFLIEGDLNPDNSDVDKLFIQLVQTYNQLFEENPINASGVDAKAILSARLSKSRRLENLIAQLPGEKKNGLFGNLIALSLGLTPNFKSNFDLAEDAKLQLSKDTYDDDLDNLLAQIGDQYADLFLAAKNLSDAILLSDILRVNTEITKAPLSASMIKRYDEHHQDLTLLKALVRQQLPEKYKEIFFDQSKNGYAGYIDGGASQEEFYKFIKPILEKMDGTEELLVKLNREDLLRKQRTFDNGSIPHQIHLGELHAILRRQEDFYPFLKDNREKIEKILTFRIPYYVGPLARGNSRFAWMTRKSEETITPWNFEEVVDKGASAQSFIERMTNFDKNLPNEKVLPKHSLLYEYFTVYNELTKVKYVTEGMRKPAFLSGEQKKAIVDLLFKTNRKVTVKQLKEDYFKKIECFDSVEISGVEDRFNASLGTYHDLLKIIKDKDFLDNEENEDILEDIVLTLTLFEDREMIEERLKTYAHLFDDKVMKQLKRRRYTGWGRLSRKLINGIRDKQSGKTILDFLKSDGFANRNFMQLIHDDSLTFKEDIQKAQVSGQGDSLHEHIANLAGSPAIKKGILQTVKVVDELVKVMGRHKPENIVIEMARENQTTQKGQKNSRERMKRIEEGIKELGSQILKEHPVENTQLQNEKLYLYYLQNGRDMYVDQELDINRLSDYDVDHIVPQSFLKDDSIDNKVLTRSDKARGKSDNVPSEEVVKKMKNYWRQLLNAKLITQRKFDNLTKAERGGLSELDKAGFIKRQLVETRQITKHVAQILDSRMNTKYDENDKLIREVKVITLKSKLVSDFRKDFQFYKVREINNYHHAHDAYLNAVVGTALIKKYPKLESEFVYGDYKVYDVRKMIAKSEQEIGKATAKYFFYSNIMNFFKTEITLANGEIRKRPLIETNGETGEIVWDKGRDFATVRKVLSMPQVNIVKKTEVQTGGFSKESILPKRNSDKLIARKKDWDPKKYGGFDSPTVAYSVLVVAKVEKGKSKKLKSVKELLGITIMERSSFEKNPIDFLEAKGYKEVKKDLIIKLPKYSLFELENGRKRMLASAGELQKGNELALPSKYVNFLYLASHYEKLKGSPEDNEQKQLFVEQHKHYLDEIIEQISEFSKRVILADANLDKVLSAYNKHRDKPIREQAENIIHLFTLTNLGAPAAFKYFDTTIDRKRYTSTKEVLDATLIHQSITGLYETRIDLSQLGGDGGGGSGGGPAPGGLDDEYRLYSPLVKPDQNIQFWLEQFPQAWAETAGMGLAKQVPPQVIQLKASATPVSVRQYPLSKEAQEGIRPHVQRLIQQGILVPVQSPWNTPLLPVRKPGTNDYRPVQDLREVNKRVQDIHPTVPNPYNLLCALPPQRSWYTVLDLKDAFFCLRLHPTSQPLFAFEWRDPGTGRTGQLTWTRLPQGFKNSPTIFNEALHRDLANFRIQHPQVTLLQYVDDLLLAGATKQDCLEGTKALLLELSDLGYRASAKKAQICRREVTYLGYSLRDGQRWLTEARKKTVVQIPAPTTAKQVREFLGKAGFCRLFIPGFATLAAPLYPLTKPKGEFSWAPEHQKAFDAIKKALLSAPALALPDVTKPFTLYVDERKGVARGVLTQTLGPWRRPVAYLSKKLDPVASGWPVCLKAIAAVAILVKDADKLTLGQNITVIAPHALENIVRQPPDRWMTNARMTHYQSLLLTERVTFAPPAALNPATLLPEETDEPVTHDCHQLLIEETGVRKDLTDIPLTGEVLTWFTDGSSYVVEGKRMAGAAVVDGTRTIWASSLPEGTSAQKAELMALTQALRLAEGKSINIYTDSRYAFATAHVHGAIYKQRGWLTSAGREIKNKEEILSLLEALHLPKRLAIIHCPGHQKAKDPISRGNQMADRVAKQAAQGVNLLPAGKRTADGSEFEKRTADGSEFESPKKKAKVE

SEQ ID NO: 214 - protein, 2095 aa, synthetic construct
MPAAKRVKLDGGDKKYSIGLDIGTNSVGWAVITDEYKVPSKKFKVLGNTDRHSIKKNLIGALLFDSGETAEATRLKRTARRRYTRRKNRICYLQEIFSNEMAKVDDSFFHRLEESFLVEEDKKHERHPIFGNIVDEVAYHEKYPTIYHLRKKLVDSTDKADLRLIYLALAHMIKFRGHFLIEGDLNPDNSDVDKLFIQLVQTYNQLFEENPINASGVDAKAILSARLSKSRRLENLIAQLPGEKKNGLFGNLIALSLGLTPNFKSNFDLAEDAKLQLSKDTYDDDLDNLLAQIGDQYADLFLAAKNLSDAILLSDILRVNTEITKAPLSASMIKRYDEHHQDLTLLKALVRQQLPEKYKEIFFDQSKNGYAGYIDGGASQEEFYKFIKPILEKMDGTEELLVKLNREDLLRKQRTFDNGSIPHQIHLGELHAILRRQEDFYPFLKDNREKIEKILTFRIPYYVGPLARGNSRFAWMTRKSEETITPWNFEEVVDKGASAQSFIERMTNFDKNLPNEKVLPKHSLLYEYFTVYNELTKVKYVTEGMRKPAFLSGEQKKAIVDLLFKTNRKVTVKQLKEDYFKKIECFDSVEISGVEDRFNASLGTYHDLLKIIKDKDFLDNEENEDILEDIVLTLTLFEDREMIEERLKTYAHLFDDKVMKQLKRRRYTGWGRLSRKLINGIRDKQSGKTILDFLKSDGFANRNFMQLIHDDSLTFKEDIQKAQVSGQGDSLHEHIANLAGSPAIKKGILQTVKVVDELVKVMGRHKPENIVIEMARENQTTQKGQKNSRERMKRIEEGIKELGSQILKEHPVENTQLQNEKLYLYYLQNGRDMYVDQELDINRLSDYDVDHIVPQSFLKDDSIDNKVLTRSDKARGKSDNVPSEEVVKKMKNYWRQLLNAKLITQRKFDNLTKAERGGLSELDKAGFIKRQLVETRQITKHVAQILDSRMNTKYDENDKLIREVKVITLKSKLVSDFRKDFQFYKVREINNYHHAHDAYLNAVVGTALIKKYPKLESEFVYGDYKVYDVRKMIAKSEQEIGKATAKYFFYSNIMNFFKTEITLANGEIRKRPLIETNGETGEIVWDKGRDFATVRKVLSMPQVNIVKKTEVQTGGFSKESILPKRNSDKLIARKKDWDPKKYGGFDSPTVAYSVLVVAKVEKGKSKKLKSVKELLGITIMERSSFEKNPIDFLEAKGYKEVKKDLIIKLPKYSLFELENGRKRMLASAGELQKGNELALPSKYVNFLYLASHYEKLKGSPEDNEQKQLFVEQHKHYLDEIIEQISEFSKRVILADANLDKVLSAYNKHRDKPIREQAENIIHLFTLTNLGAPAAFKYFDTTIDRKRYTSTKEVLDATLIHQSITGLYETRIDLSQLGGDGGGSSGSSGSSGSSGSSGSSGGLDDEYRLYSPLVKPDQNIQFWLEQFPQAWAETAGMGLAKQVPPQVIQLKASATPVSVRQYPLSKEAQEGIRPHVQRLIQQGILVPVQSPWNTPLLPVRKPGTNDYRPVQDLREVNKRVQDIHPTVPNPYNLLCALPPQRSWYTVLDLKDAFFCLRLHPTSQPLFAFEWRDPGTGRTGQLTWTRLPQGFKNSPTIFNEALHRDLANFRIQHPQVTLLQYVDDLLLAGATKQDCLEGTKALLLELSDLGYRASAKKAQICRREVTYLGYSLRDGQRWLTEARKKTVVQIPAPTTAKQVREFLGKAGFCRLFIPGFATLAAPLYPLTKPKGEFSWAPEHQKAFDAIKKALLSAPALALPDVTKPFTLYVDERKGVARGVLTQTLGPWRRPVAYLSKKLDPVASGWPVCLKAIAAVAILVKDADKLTLGQNITVIAPHALENIVRQPPDRWMTNARMTHYQSLLLTERVTFAPPAALNPATLLPEETDEPVTHDCHQLLIEETGVRKDLTDIPLTGEVLTWFTDGSSYVVEGKRMAGAAVVDGTRTIWASSLPEGTSAQKAELMALTQALRLAEGKSINIYTDSRYAFATAHVHGAIYKQRGWLTSAGREIKNKEEILSLLEALHLPKRLAIIHCPGHQKAKDPISRGNQMADRVAKQAAQGVNLLPAGKRTADGSEFEKRTADGSEFESPKKKAKVE

SEQ ID NO: 215 - protein, 2097 aa, synthetic construct; identical to SEQ ID NO: 46

SEQ ID NO: 216 - protein, 2092 aa, synthetic construct; identical to SEQ ID NO: 51

SEQ ID NO: 217 - protein, 2088 aa, synthetic construct
MPAAKRVKLDGGDKKYSIGLDIGTNSVGWAVITDEYKVPSKKFKVLGNTDRHSIKKNLIGALLFDSGETAEATRLKRTARRRYTRRKNRICYLQEIFSNEMAKVDDSFFHRLEESFLVEEDKKHERHPIFGNIVDEVAYHEKYPTIYHLRKKLVDSTDKADLRLIYLALAHMIKFRGHFLIEGDLNPDNSDVDKLFIQLVQTYNQLFEENPINASGVDAKAILSARLSKSRRLENLIAQLPGEKKNGLFGNLIALSLGLTPNFKSNFDLAEDAKLQLSKDTYDDDLDNLLAQIGDQYADLFLAAKNLSDAILLSDILRVNTEITKAPLSASMIKRYDEHHQDLTLLKALVRQQLPEKYKEIFFDQSKNGYAGYIDGGASQEEFYKFIKPILEKMDGTEELLVKLNREDLLRKQRTFDNGSIPHQIHLGELHAILRRQEDFYPFLKDNREKIEKILTFRIPYYVGPLARGNSRFAWMTRKSEETITPWNFEEVVDKGASAQSFIERMTNFDKNLPNEKVLPKHSLLYEYFTVYNELTKVKYVTEGMRKPAFLSGEQKKAIVDLLFKTNRKVTVKQLKEDYFKKIECFDSVEISGVEDRFNASLGTYHDLLKIIKDKDFLDNEENEDILEDIVLTLTLFEDREMIEERLKTYAHLFDDKVMKQLKRRRYTGWGRLSRKLINGIRDKQSGKTILDFLKSDGFANRNFMQLIHDDSLTFKEDIQKAQVSGQGDSLHEHIANLAGSPAIKKGILQTVKVVDELVKVMGRHKPENIVIEMARENQTTQKGQKNSRERMKRIEEGIKELGSQILKEHPVENTQLQNEKLYLYYLQNGRDMYVDQELDINRLSDYDVDHIVPQSFLKDDSIDNKVLTRSDKARGKSDNVPSEEVVKKMKNYWRQLLNAKLITQRKFDNLTKAERGGLSELDKAGFIKRQLVETRQITKHVAQILDSRMNTKYDENDKLIREVKVITLKSKLVSDFRKDFQFYKVREINNYHHAHDAYLNAVVGTALIKKYPKLESEFVYGDYKVYDVRKMIAKSEQEIGKATAKYFFYSNIMNFFKTEITLANGEIRKRPLIETNGETGEIVWDKGRDFATVRKVLSMPQVNIVKKTEVQTGGFSKESILPKRNSDKLIARKKDWDPKKYGGFDSPTVAYSVLVVAKVEKGKSKKLKSVKELLGITIMERSSFEKNPIDFLEAKGYKEVKKDLIIKLPKYSLFELENGRKRMLASAGELQKGNELALPSKYVNFLYLASHYEKLKGSPEDNEQKQLFVEQHKHYLDEIIEQISEFSKRVILADANLDKVLSAYNKHRDKPIREQAENIIHLFTLTNLGAPAAFKYFDTTIDRKRYTSTKEVLDATLIHQSITGLYETRIDLSQLGGDGGPAPGGSEAAAKGGLDDEYRLYSPLVKPDQNIQFWLEQFPQAWAETAGMGLAKQVPPQVIQLKASATPVSVRQYPLSKEAQEGIRPHVQRLIQQGILVPVQSPWNTPLLPVRKPGTNDYRPVQDLREVNKRVQDIHPTVPNPYNLLCALPPQRSWYTVLDLKDAFFCLRLHPTSQPLFAFEWRDPGTGRTGQLTWTRLPQGFKNSPTIFNEALHRDLANFRIQHPQVTLLQYVDDLLLAGATKQDCLEGTKALLLELSDLGYRASAKKAQICRREVTYLGYSLRDGQRWLTEARKKTVVQIPAPTTAKQVREFLGKAGFCRLFIPGFATLAAPLYPLTKPKGEFSWAPEHQKAFDAIKKALLSAPALALPDVTKPFTLYVDERKGVARGVLTQTLGPWRRPVAYLSKKLDPVASGWPVCLKAIAAVAILVKDADKLTLGQNITVIAPHALENIVRQPPDRWMTNARMTHYQSLLLTERVTFAPPAALNPATLLPEETDEPVTHDCHQLLIEETGVRKDLTDIPLTGEVLTWFTDGSSYVVEGKRMAGAAVVDGTRTIWASSLPEGTSAQKAELMALTQALRLAEGKSINIYTDSRYAFATAHVHGAIYKQRGWLTSAGREIKNKEEILSLLEALHLPKRLAIIHCPGHQKAKDPISRGNQMADRVAKQAAQGVNLLPAGKRTADGSEFEKRTADGSEFESPKKKAKVE

SEQ ID NO: 218 - protein, 2082 aa, synthetic construct; identical to SEQ ID NO: 70

SEQ ID NO: 219 - protein, 2085 aa, synthetic construct; identical to SEQ ID NO: 48

SEQ ID NO: 220 - protein, 2086 aa, synthetic construct
MPAAKRVKLDGGDKKYSIGLDIGTNSVGWAVITDEYKVPSKKFKVLGNTDRHSIKKNLIGALLFDSGETAEATRLKRTARRRYTRRKNRICYLQEIFSNEMAKVDDSFFHRLEESFLVEEDKKHERHPIFGNIVDEVAYHEKYPTIYHLRKKLVDSTDKADLRLIYLALAHMIKFRGHFLIEGDLNPDNSDVDKLFIQLVQTYNQLFEENPINASGVDAKAILSARLSKSRRLENLIAQLPGEKKNGLFGNLIALSLGLTPNFKSNFDLAEDAKLQLSKDTYDDDLDNLLAQIGDQYADLFLAAKNLSDAILLSDILRVNTEITKAPLSASMIKRYDEHHQDLTLLKALVRQQLPEKYKEIFFDQSKNGYAGYIDGGASQEEFYKFIKPILEKMDGTEELLVKLNREDLLRKQRTFDNGSIPHQIHLGELHAILRRQEDFYPFLKDNREKIEKILTFRIPYYVGPLARGNSRFAWMTRKSEETITPWNFEEVVDKGASAQSFIERMTNFDKNLPNEKVLPKHSLLYEYFTVYNELTKVKYVTEGMRKPAFLSGEQKKAIVDLLFKTNRKVTVKQLKEDYFKKIECFDSVEISGVEDRFNASLGTYHDLLKIIKDKDFLDNEENEDILEDIVLTLTLFEDREMIEERLKTYAHLFDDKVMKQLKRRRYTGWGRLSRKLINGIRDKQSGKTILDFLKSDGFANRNFMQLIHDDSLTFKEDIQKAQVSGQGDSLHEHIANLAGSPAIKKGILQTVKVVDELVKVMGRHKPENIVIEMARENQTTQKGQKNSRERMKRIEEGIKELGSQILKEHPVENTQLQNEKLYLYYLQNGRDMYVDQELDINRLSDYDVDHIVPQSFLKDDSIDNKVLTRSDKARGKSDNVPSEEVVKKMKNYWRQLLNAKLITQRKFDNLTKAERGGLSELDKAGFIKRQLVETRQITKHVAQILDSRMNTKYDENDKLIREVKVITLKSKLVSDFRKDFQFYKVREINNYHHAHDAYLNAVVGTALIKKYPKLESEFVYGDYKVYDVRKMIAKSEQEIGKATAKYFFYSNIMNFFKTEITLANGEIRKRPLIETNGETGEIVWDKGRDFATVRKVLSMPQVNIVKKTEVQTGGFSKESILPKRNSDKLIARKKDWDPKKYGGFDSPTVAYSVLVVAKVEKGKSKKLKSVKELLGITIMERSSFEKNPIDFLEAKGYKEVKKDLIIKLPKYSLFELENGRKRMLASAGELQKGNELALPSKYVNFLYLASHYEKLKGSPEDNEQKQLFVEQHKHYLDEIIEQISEFSKRVILADANLDKVLSAYNKHRDKPIREQAENIIHLFTLTNLGAPAAFKYFDTTIDRKRYTSTKEVLDATLIHQSITGLYETRIDLSQLGGDGGGGGPAPGSSGGLDDEYRLYSPLVKPDQNIQFWLEQFPQAWAETAGMGLAKQVPPQVIQLKASATPVSVRQYPLSKEAQEGIRPHVQRLIQQGILVPVQSPWNTPLLPVRKPGTNDYRPVQDLREVNKRVQDIHPTVPNPYNLLCALPPQRSWYTVLDLKDAFFCLRLHPTSQPLFAFEWRDPGTGRTGQLTWTRLPQGFKNSPTIFNEALHRDLANFRIQHPQVTLLQYVDDLLLAGATKQDCLEGTKALLLELSDLGYRASAKKAQICRREVTYLGYSLRDGQRWLTEARKKTVVQIPAPTTAKQVREFLGKAGFCRLFIPGFATLAAPLYPLTKPKGEFSWAPEHQKAFDAIKKALLSAPALALPDVTKPFTLYVDERKGVARGVLTQTLGPWRRPVAYLSKKLDPVASGWPVCLKAIAAVAILVKDADKLTLGQNITVIAPHALENIVRQPPDRWMTNARMTHYQSLLLTERVTFAPPAALNPATLLPEETDEPVTHDCHQLLIEETGVRKDLTDIPLTGEVLTWFTDGSSYVVEGKRMAGAAVVDGTRTIWASSLPEGTSAQKAELMALTQALRLAEGKSINIYTDSRYAFATAHVHGAIYKQRGWLTSAGREIKNKEEILSLLEALHLPKRLAIIHCPGHQKAKDPISRGNQMADRVAKQAAQGVNLLPAGKRTADGSEFEKRTADGSEFESPKKKAKVE

SEQ ID NO: 221 - protein, 2085 aa, synthetic construct
MPAAKRVKLDGGDKKYSIGLDIGTNSVGWAVITDEYKVPSKKFKVLGNTDRHSIKKNLIGALLFDSGETAEATRLKRTARRRYTRRKNRICYLQEIFSNEMAKVDDSFFHRLEESFLVEEDKKHERHPIFGNIVDEVAYHEKYPTIYHLRKKLVDSTDKADLRLIYLALAHMIKFRGHFLIEGDLNPDNSDVDKLFIQLVQTYNQLFEENPINASGVDAKAILSARLSKSRRLENLIAQLPGEKKNGLFGNLIALSLGLTPNFKSNFDLAEDAKLQLSKDTYDDDLDNLLAQIGDQYADLFLAAKNLSDAILLSDILRVNTEITKAPLSASMIKRYDEHHQDLTLLKALVRQQLPEKYKEIFFDQSKNGYAGYIDGGASQEEFYKFIKPILEKMDGTEELLVKLNREDLLRKQRTFDNGSIPHQIHLGELHAILRRQEDFYPFLKDNREKIEKILTFRIPYYVGPLARGNSRFAWMTRKSEETITPWNFEEVVDKGASAQSFIERMTNFDKNLPNEKVLPKHSLLYEYFTVYNELTKVKYVTEGMRKPAFLSGEQKKAIVDLLFKTNRKVTVKQLKEDYFKKIECFDSVEISGVEDRFNASLGTYHDLLKIIKDKDFLDNEENEDILEDIVLTLTLFEDREMIEERLKTYAHLFDDKVMKQLKRRRYTGWGRLSRKLINGIRDKQSGKTILDFLKSDGFANRNFMQLIHDDSLTFKEDIQKAQVSGQGDSLHEHIANLAGSPAIKKGILQTVKVVDELVKVMGRHKPENIVIEMARENQTTQKGQKNSRERMKRIEEGIKELGSQILKEHPVENTQLQNEKLYLYYLQNGRDMYVDQELDINRLSDYDVDHIVPQSFLKDDSIDNKVLTRSDKARGKSDNVPSEEVVKKMKNYWRQLLNAKLITQRKFDNLTKAERGGLSELDKAGFIKRQLVETRQITKHVAQILDSRMNTKYDENDKLIREVKVITLKSKLVSDFRKDFQFYKVREINNYHHAHDAYLNAVVGTALIKKYPKLESEFVYGDYKVYDVRKMIAKSEQEIGKATAKYFFYSNIMNFFKTEITLANGEIRKRPLIETNGETGEIVWDKGRDFATVRKVLSMPQVNIVKKTEVQTGGFSKESILPKRNSDKLIARKKDWDPKKYGGFDSPTVAYSVLVVAKVEKGKSKKLKSVKELLGITIMERSSFEKNPIDFLEAKGYKEVKKDLIIKLPKYSLFELENGRKRMLASAGELQKGNELALPSKYVNFLYLASHYEKLKGSPEDNEQKQLFVEQHKHYLDEIIEQISEFSKRVILADANLDKVLSAYNKHRDKPIREQAENIIHLFTLTNLGAPAAFKYFDTTIDRKRYTSTKEVLDATLIHQSITGLYETRIDLSQLGGDGGEAAAKGGSGGLDDEYRLYSPLVKPDQNIQFWLEQFPQAWAETAGMGLAKQVPPQVIQLKASATPVSVRQYPLSKEAQEGIRPHVQRLIQQGILVPVQSPWNTPLLPVRKPGTNDYRPVQDLREVNKRVQDIHPTVPNPYNLLCALPPQRSWYTVLDLKDAFFCLRLHPTSQPLFAFEWRDPGTGRTGQLTWTRLPQGFKNSPTIFNEALHRDLANFRIQHPQVTLLQYVDDLLLAGATKQDCLEGTKALLLELSDLGYRASAKKAQICRREVTYLGYSLRDGQRWLTEARKKTVVQIPAPTTAKQVREFLGKAGFCRLFIPGFATLAAPLYPLTKPKGEFSWAPEHQKAFDAIKKALLSAPALALPDVTKPFTLYVDERKGVARGVLTQTLGPWRRPVAYLSKKLDPVASGWPVCLKAIAAVAILVKDADKLTLGQNITVIAPHALENIVRQPPDRWMTNARMTHYQSLLLTERVTFAPPAALNPATLLPEETDEPVTHDCHQLLIEETGVRKDLTDIPLTGEVLTWFTDGSSYVVEGKRMAGAAVVDGTRTIWASSLPEGTSAQKAELMALTQALRLAEGKSINIYTDSRYAFATAHVHGAIYKQRGWLTSAGREIKNKEEILSLLEALHLPKRLAIIHCPGHQKAKDPISRGNQMADRVAKQAAQGVNLLPAGKRTADGSEFEKRTADGSEFESPKKKAKVE

SEQ ID NO: 222 - protein, 2083 aa, synthetic construct
MPAAKRVKLDGGDKKYSIGLDIGTNSVGWAVITDEYKVPSKKFKVLGNTDRHSIKKNLIGALLFDSGETAEATRLKRTARRRYTRRKNRICYLQEIFSNEMAKVDDSFFHRLEESFLVEEDKKHERHPIFGNIVDEVAYHEKYPTIYHLRKKLVDSTDKADLRLIYLALAHMIKFRGHFLIEGDLNPDNSDVDKLFIQLVQTYNQLFEENPINASGVDAKAILSARLSKSRRLENLIAQLPGEKKNGLFGNLIALSLGLTPNFKSNFDLAEDAKLQLSKDTYDDDLDNLLAQIGDQYADLFLAAKNLSDAILLSDILRVNTEITKAPLSASMIKRYDEHHQDLTLLKALVRQQLPEKYKEIFFDQSKNGYAGYIDGGASQEEFYKFIKPILEKMDGTEELLVKLNREDLLRKQRTFDNGSIPHQIHLGELHAILRRQEDFYPFLKDNREKIEKILTFRIPYYVGPLARGNSRFAWMTRKSEETITPWNFEEVVDKGASAQSFIERMTNFDKNLPNEKVLPKHSLLYEYFTVYNELTKVKYVTEGMRKPAFLSGEQKKAIVDLLFKTNRKVTVKQLKEDYFKKIECFDSVEISGVEDRFNASLGTYHDLLKIIKDKDFLDNEENEDILEDIVLTLTLFEDREMIEERLKTYAHLFDDKVMKQLKRRRYTGWGRLSRKLINGIRDKQSGKTILDFLKSDGFANRNFMQLIHDDSLTFKEDIQKAQVSGQGDSLHEHIANLAGSPAIKKGILQTVKVVDELVKVMGRHKPENIVIEMARENQTTQKGQKNSRERMKRIEEGIKELGSQILKEHPVENTQLQNEKLYLYYLQNGRDMYVDQELDINRLSDYDVDHIVPQSFLKDDSIDNKVLTRSDKARGKSDNVPSEEVVKKMKNYWRQLLNAKLITQRKFDNLTKAERGGLSELDKAGFIKRQLVETRQITKHVAQILDSRMNTKYDENDKLIREVKVITLKSKLVSDFRKDFQFYKVREINNYHHAHDAYLNAVVGTALIKKYPKLESEFVYGDYKVYDVRKMIAKSEQEIGKATAKYFFYSNIMNFFKTEITLANGEIRKRPLIETNGETGEIVWDKGRDFATVRKVLSMPQVNIVKKTEVQTGGFSKESILPKRNSDKLIARKKDWDPKKYGGFDSPTVAYSVLVVAKVEKGKSKKLKSVKELLGITIMERSSFEKNPIDFLEAKGYKEVKKDLIIKLPKYSLFELENGRKRMLASAGELQKGNELALPSKYVNFLYLASHYEKLKGSPEDNEQKQLFVEQHKHYLDEIIEQISEFSKRVILADANLDKVLSAYNKHRDKPIREQAENIIHLFTLTNLGAPAAFKYFDTTIDRKRYTSTKEVLDATLIHQSITGLYETRIDLSQLGGDGGGGSGGGGGLDDEYRLYSPLVKPDQNIQFWLEQFPQAWAETAGMGLAKQVPPQVIQLKASATPVSVRQYPLSKEAQEGIRPHVQRLIQQGILVPVQSPWNTPLLPVRKPGTNDYRPVQDLREVNKRVQDIHPTVPNPYNLLCALPPQRSWYTVLDLKDAFFCLRLHPTSQPLFAFEWRDPGTGRTGQLTWTRLPQGFKNSPTIFNEALHRDLANFRIQHPQVTLLQYVDDLLLAGATKQDCLEGTKALLLELSDLGYRASAKKAQICRREVTYLGYSLRDGQRWLTEARKKTVVQIPAPTTAKQVREFLGKAGFCRLFIPGFATLAAPLYPLTKPKGEFSWAPEHQKAFDAIKKALLSAPALALPDVTKPFTLYVDERKGVARGVLTQTLGPWRRPVAYLSKKLDPVASGWPVCLKAIAAVAILVKDADKLTLGQNITVIAPHALENIVRQPPDRWMTNARMTHYQSLLLTERVTFAPPAALNPATLLPEETDEPVTHDCHQLLIEETGVRKDLTDIPLTGEVLTWFTDGSSYVVEGKRMAGAAVVDGTRTIWASSLPEGTSAQKAELMALTQALRLAEGKSINIYTDSRYAFATAHVHGAIYKQRGWLTSAGREIKNKEEILSLLEALHLPKRLAIIHCPGHQKAKDPISRGNQMADRVAKQAAQGVNLLPAGKRTADGSEFEKRTADGSEFESPKKKAKVE

SEQ ID NO: 223 - protein, 2083 aa, synthetic construct; identical to SEQ ID NO: 47

SEQ ID NO: 224 - protein, 2088 aa, synthetic construct
MPAAKRVKLDGGDKKYSIGLDIGTNSVGWAVITDEYKVPSKKFKVLGNTDRHSIKKNLIGALLFDSGETAEATRLKRTARRRYTRRKNRICYLQEIFSNEMAKVDDSFFHRLEESFLVEEDKKHERHPIFGNIVDEVAYHEKYPTIYHLRKKLVDSTDKADLRLIYLALAHMIKFRGHFLIEGDLNPDNSDVDKLFIQLVQTYNQLFEENPINASGVDAKAILSARLSKSRRLENLIAQLPGEKKNGLFGNLIALSLGLTPNFKSNFDLAEDAKLQLSKDTYDDDLDNLLAQIGDQYADLFLAAKNLSDAILLSDILRVNTEITKAPLSASMIKRYDEHHQDLTLLKALVRQQLPEKYKEIFFDQSKNGYAGYIDGGASQEEFYKFIKPILEKMDGTEELLVKLNREDLLRKQRTFDNGSIPHQIHLGELHAILRRQEDFYPFLKDNREKIEKILTFRIPYYVGPLARGNSRFAWMTRKSEETITPWNFEEVVDKGASAQSFIERMTNFDKNLPNEKVLPKHSLLYEYFTVYNELTKVKYVTEGMRKPAFLSGEQKKAIVDLLFKTNRKVTVKQLKEDYFKKIECFDSVEISGVEDRFNASLGTYHDLLKIIKDKDFLDNEENEDILEDIVLTLTLFEDREMIEERLKTYAHLFDDKVMKQLKRRRYTGWGRLSRKLINGIRDKQSGKTILDFLKSDGFANRNFMQLIHDDSLTFKEDIQKAQVSGQGDSLHEHIANLAGSPAIKKGILQTVKVVDELVKVMGRHKPENIVIEMARENQTTQKGQKNSRERMKRIEEGIKELGSQILKEHPVENTQLQNEKLYLYYLQNGRDMYVDQELDINRLSDYDVDHIVPQSFLKDDSIDNKVLTRSDKARGKSDNVPSEEVVKKMKNYWRQLLNAKLITQRKFDNLTKAERGGLSELDKAGFIKRQLVETRQITKHVAQILDSRMNTKYDENDKLIREVKVITLKSKLVSDFRKDFQFYKVREINNYHHAHDAYLNAVVGTALIKKYPKLESEFVYGDYKVYDVRKMIAKSEQEIGKATAKYFFYSNIMNFFKTEITLANGEIRKRPLIETNGETGEIVWDKGRDFATVRKVLSMPQVNIVKKTEVQTGGFSKESILPKRNSDKLIARKKDWDPKKYGGFDSPTVAYSVLVVAKVEKGKSKKLKSVKELLGITIMERSSFEKNPIDFLEAKGYKEVKKDLIIKLPKYSLFELENGRKRMLASAGELQKGNELALPSKYVNFLYLASHYEKLKGSPEDNEQKQLFVEQHKHYLDEIIEQISEFSKRVILADANLDKVLSAYNKHRDKPIREQAENIIHLFTLTNLGAPAAFKYFDTTIDRKRYTSTKEVLDATLIHQSITGLYETRIDLSQLGGDGGEAAAKPAPGSSGGLDDEYRLYSPLVKPDQNIQFWLEQFPQAWAETAGMGLAKQVPPQVIQLKASATPVSVRQYPLSKEAQEGIRPHVQRLIQQGILVPVQSPWNTPLLPVRKPGTNDYRPVQDLREVNKRVQDIHPTVPNPYNLLCALPPQRSWYTVLDLKDAFFCLRLHPTSQPLFAFEWRDPGTGRTGQLTWTRLPQGFKNSPTIFNEALHRDLANFRIQHPQVTLLQYVDDLLLAGATKQDCLEGTKALLLELSDLGYRASAKKAQICRREVTYLGYSLRDGQRWLTEARKKTVVQIPAPTTAKQVREFLGKAGFCRLFIPGFATLAAPLYPLTKPKGEFSWAPEHQKAFDAIKKALLSAPALALPDVTKPFTLYVDERKGVARGVLTQTLGPWRRPVAYLSKKLDPVASGWPVCLKAIAAVAILVKDADKLTLGQNITVIAPHALENIVRQPPDRWMTNARMTHYQSLLLTERVTFAPPAALNPATLLPEETDEPVTHDCHQLLIEETGVRKDLTDIPLTGEVLTWFTDGSSYVVEGKRMAGAAVVDGTRTIWASSLPEGTSAQKAELMALTQALRLAEGKSINIYTDSRYAFATAHVHGAIYKQRGWLTSAGREIKNKEEILSLLEALHLPKRLAIIHCPGHQKAKDPISRGNQMADRVAKQAAQGVNLLPAGKRTADGSEFEKRTADGSEFESPKKKAKVE

SEQ ID NO: 225 - protein, 2088 aa, synthetic construct
MPAAKRVKLDGGDKKYSIGLDIGTNSVGWAVITDEYKVPSKKFKVLGNTDRHSIKKNLIGALLFDSGETAEATRLKRTARRRYTRRKNRICYLQEIFSNEMAKVDDSFFHRLEESFLVEEDKKHERHPIFGNIVDEVAYHEKYPTIYHLRKKLVDSTDKADLRLIYLALAHMIKFRGHFLIEGDLNPDNSDVDKLFIQLVQTYNQLFEENPINASGVDAKAILSARLSKSRRLENLIAQLPGEKKNGLFGNLIALSLGLTPNFKSNFDLAEDAKLQLSKDTYDDDLDNLLAQIGDQYADLFLAAKNLSDAILLSDILRVNTEITKAPLSASMIKRYDEHHQDLTLLKALVRQQLPEKYKEIFFDQSKNGYAGYIDGGASQEEFYKFIKPILEKMDGTEELLVKLNREDLLRKQRTFDNGSIPHQIHLGELHAILRRQEDFYPFLKDNREKIEKILTFRIPYYVGPLARGNSRFAWMTRKSEETITPWNFEEVVDKGASAQSFIERMTNFDKNLPNEKVLPKHSLLYEYFTVYNELTKVKYVTEGMRKPAFLSGEQKKAIVDLLFKTNRKVTVKQLKEDYFKKIECFDSVEISGVEDRFNASLGTYHDLLKIIKDKDFLDNEENEDILEDIVLTLTLFEDREMIEERLKTYAHLFDDKVMKQLKRRRYTGWGRLSRKLINGIRDKQSGKTILDFLKSDGFANRNFMQLIHDDSLTFKEDIQKAQVSGQGDSLHEHIANLAGSPAIKKGILQTVKVVDELVKVMGRHKPENIVIEMARENQTTQKGQKNSRERMKRIEEGIKELGSQILKEHPVENTQLQNEKLYLYYLQNGRDMYVDQELDINRLSDYDVDHIVPQSFLKDDSIDNKVLTRSDKARGKSDNVPSEEVVKKMKNYWRQLLNAKLITQRKFDNLTKAERGGLSELDKAGFIKRQLVETRQITKHVAQILDSRMNTKYDENDKLIREVKVITLKSKLVSDFRKDFQFYKVREINNYHHAHDAYLNAVVGTALIKKYPKLESEFVYGDYKVYDVRKMIAKSEQEIGKATAKYFFYSNIMNFFKTEITLANGEIRKRPLIETNGETGEIVWDKGRDFATVRKVLSMPQVNIVKKTEVQTGGFSKESILPKRNSDKLIARKKDWDPKKYGGFDSPTVAYSVLVVAKVEKGKSKKLKSVKELLGITIMERSSFEKNPIDFLEAKGYKEVKKDLIIKLPKYSLFELENGRKRMLASAGELQKGNELALPSKYVNFLYLASHYEKLKGSPEDNEQKQLFVEQHKHYLDEIIEQISEFSKRVILADANLDKVLSAYNKHRDKPIREQAENIIHLFTLTNLGAPAAFKYFDTTIDRKRYTSTKEVLDATLIHQSITGLYETRIDLSQLGGDGGPAPGSSEAAAKGGLDDEYRLYSPLVKPDQNIQFWLEQFPQAWAETAGMGLAKQVPPQVIQLKASATPVSVRQYPLSKEAQEGIRPHVQRLIQQGILVPVQSPWNTPLLPVRKPGTNDYRPVQDLREVNKRVQDIHPTVPNPYNLLCALPPQRSWYTVLDLKDAFFCLRLHPTSQPLFAFEWRDPGTGRTGQLTWTRLPQGFKNSPTIFNEALHRDLANFRIQHPQVTLLQYVDDLLLAGATKQDCLEGTKALLLELSDLGYRASAKKAQICRREVTYLGYSLRDGQRWLTEARKKTVVQIPAPTTAKQVREFLGKAGFCRLFIPGFATLAAPLYPLTKPKGEFSWAPEHQKAFDAIKKALLSAPALALPDVTKPFTLYVDERKGVARGVLTQTLGPWRRPVAYLSKKLDPVASGWPVCLKAIAAVAILVKDADKLTLGQNITVIAPHALENIVRQPPDRWMTNARMTHYQSLLLTERVTFAPPAALNPATLLPEETDEPVTHDCHQLLIEETGVRKDLTDIPLTGEVLTWFTDGSSYVVEGKRMAGAAVVDGTRTIWASSLPEGTSAQKAELMALTQALRLAEGKSINIYTDSRYAFATAHVHGAIYKQRGWLTSAGREIKNKEEILSLLEALHLPKRLAIIHCPGHQKAKDPISRGNQMADRVAKQAAQGVNLLPAGKRTADGSEFEKRTADGSEFESPKKKAKVE

SEQ ID NO: 226 - protein, 2086 aa, synthetic construct
MPAAKRVKLDGGDKKYSIGLDIGTNSVGWAVITDEYKVPSKKFKVLGNTDRHSIKKNLIGALLFDSGETAEATRLKRTARRRYTRRKNRICYLQEIFSNEMAKVDDSFFHRLEESFLVEEDKKHERHPIFGNIVDEVAYHEKYPTIYHLRKKLVDSTDKADLRLIYLALAHMIKFRGHFLIEGDLNPDNSDVDKLFIQLVQTYNQLFEENPINASGVDAKAILSARLSKSRRLENLIAQLPGEKKNGLFGNLIALSLGLTPNFKSNFDLAEDAKLQLSKDTYDDDLDNLLAQIGDQYADLFLAAKNLSDAILLSDILRVNTEITKAPLSASMIKRYDEHHQDLTLLKALVRQQLPEKYKEIFFDQSKNGYAGYIDGGASQEEFYKFIKPILEKMDGTEELLVKLNREDLLRKQRTFDNGSIPHQIHLGELHAILRRQEDFYPFLKDNREKIEKILTFRIPYYVGPLARGNSRFAWMTRKSEETITPWNFEEVVDKGASAQSFIERMTNFDKNLPNEKVLPKHSLLYEYFTVYNELTKVKYVTEGMRKPAFLSGEQKKAIVDLLFKTNRKVTVKQLKEDYFKKIECFDSVEISGVEDRFNASLGTYHDLLKIIKDKDFLDNEENEDILEDIVLTLTLFEDREMIEERLKTYAHLFDDKVMKQLKRRRYTGWGRLSRKLINGIRDKQSGKTILDFLKSDGFANRNFMQLIHDDSLTFKEDIQKAQVSGQGDSLHEHIANLAGSPAIKKGILQTVKVVDELVKVMGRHKPENIVIEMARENQTTQKGQKNSRERMKRIEEGIKELGSQILKEHPVENTQLQNEKLYLYYLQNGRDMYVDQELDINRLSDYDVDHIVPQSFLKDDSIDNKVLTRSDKARGKSDNVPSEEVVKKMKNYWRQLLNAKLITQRKFDNLTKAERGGLSELDKAGFIKRQLVETRQITKHVAQILDSRMNTKYDENDKLIREVKVITLKSKLVSDFRKDFQFYKVREINNYHHAHDAYLNAVVGTALIKKYPKLESEFVYGDYKVYDVRKMIAKSEQEIGKATAKYFFYSNIMNFFKTEITLANGEIRKRPLIETNGETGEIVWDKGRDFATVRKVLSMPQVNIVKKTEVQTGGFSKESILPKRNSDKLIARKKDWDPKKYGGFDSPTVAYSVLVVAKVEKGKSKKLKSVKELLGITIMERSSFEKNPIDFLEAKGYKEVKKDLIIKLPKYSLFELENGRKRMLASAGELQKGNELALPSKYVNFLYLASHYEKLKGSPEDNEQKQLFVEQHKHYLDEIIEQISEFSKRVILADANLDKVLSAYNKHRDKPIREQAENIIHLFTLTNLGAPAAFKYFDTTIDRKRYTSTKEVLDATLIHQSITGLYETRIDLSQLGGDGGGGSGGSGGSGGLDDEYRLYSPLVKPDQNIQFWLEQFPQAWAETAGMGLAKQVPPQVIQLKASATPVSVRQYPLSKEAQEGIRPHVQRLIQQGILVPVQSPWNTPLLPVRKPGTNDYRPVQDLREVNKRVQDIHPTVPNPYNLLCALPPQRSWYTVLDLKDAFFCLRLHPTSQPLFAFEWRDPGTGRTGQLTWTRLPQGFKNSPTIFNEALHRDLANFRIQHPQVTLLQYVDDLLLAGATKQDCLEGTKALLLELSDLGYRASAKKAQICRREVTYLGYSLRDGQRWLTEARKKTVVQIPAPTTAKQVREFLGKAGFCRLFIPGFATLAAPLYPLTKPKGEFSWAPEHQKAFDAIKKALLSAPALALPDVTKPFTLYVDERKGVARGVLTQTLGPWRRPVAYLSKKLDPVASGWPVCLKAIAAVAILVKDADKLTLGQNITVIAPHALENIVRQPPDRWMTNARMTHYQSLLLTERVTFAPPAALNPATLLPEETDEPVTHDCHQLLIEETGVRKDLTDIPLTGEVLTWFTDGSSYVVEGKRMAGAAVVDGTRTIWASSLPEGTSAQKAELMALTQALRLAEGKSINIYTDSRYAFATAHVHGAIYKQRGWLTSAGREIKNKEEILSLLEALHLPKRLAIIHCPGHQKAKDPISRGNQMADRVAKQAAQGVNLLPAGKRTADGSEFEKRTADGSEFESPKKKAKVE

SEQ ID NO: 227 - protein, 2083 aa, synthetic construct; identical to SEQ ID NO: 78

SEQ ID NO: 228 - protein, 2089 aa, synthetic construct; identical to SEQ ID NO: 41

SEQ ID NO: 229 - protein, 2088 aa, synthetic construct; identical to SEQ ID NO: 65

SEQ ID NO: 230 - protein, 2088 aa, synthetic construct; identical to SEQ ID NO: 80

SEQ ID NO: 231 - protein, 2088 aa, synthetic construct
MPAAKRVKLDGGDKKYSIGLDIGTNSVGWAVITDEYKVPSKKFKVLGNTDRHSIKKNLIGALLFDSGETAEATRLKRTARRRYTRRKNRICYLQEIFSNEMAKVDDSFFHRLEESFLVEEDKKHERHPIFGNIVDEVAYHEKYPTIYHLRKKLVDSTDKADLRLIYLALAHMIKFRGHFLIEGDLNPDNSDVDKLFIQLVQTYNQLFEENPINASGVDAKAILSARLSKSRRLENLIAQLPGEKKNGLFGNLIALSLGLTPNFKSNFDLAEDAKLQLSKDTYDDDLDNLLAQIGDQYADLFLAAKNLSDAILLSDILRVNTEITKAPLSASMIKRYDEHHQDLTLLKALVRQQLPEKYKEIFFDQSKNGYAGYIDGGASQEEFYKFIKPILEKMDGTEELLVKLNREDLLRKQRTFDNGSIPHQIHLGELHAILRRQEDFYPFLKDNREKIEKILTFRIPYYVGPLARGNSRFAWMTRKSEETITPWNFEEVVDKGASAQSFIERMTNFDKNLPNEKVLPKHSLLYEYFTVYNELTKVKYVTEGMRKPAFLSGEQKKAIVDLLFKTNRKVTVKQLKEDYFKKIECFDSVEISGVEDRFNASLGTYHDLLKIIKDKDFLDNEENEDILEDIVLTLTLFEDREMIEERLKTYAHLFDDKVMKQLKRRRYTGWGRLSRKLINGIRDKQSGKTILDFLKSDGFANRNFMQLIHDDSLTFKEDIQKAQVSGQGDSLHEHIANLAGSPAIKKGILQTVKVVDELVKVMGRHKPENIVIEMARENQTTQKGQKNSRERMKRIEEGIKELGSQILKEHPVENTQLQNEKLYLYYLQNGRDMYVDQELDINRLSDYDVDHIVPQSFLKDDSIDNKVLTRSDKARGKSDNVPSEEVVKKMKNYWRQLLNAKLITQRKFDNLTKAERGGLSELDKAGFIKRQLVETRQITKHVAQILDSRMNTKYDENDKLIREVKVITLKSKLVSDFRKDFQFYKVREINNYHHAHDAYLNAVVGTALIKKYPKLESEFVYGDYKVYDVRKMIAKSEQEIGKATAKYFFYSNIMNFFKTEITLANGEIRKRPLIETNGETGEIVWDKGRDFATVRKVLSMPQVNIVKKTEVQTGGFSKESILPKRNSDKLIARKKDWDPKKYGGFDSPTVAYSVLVVAKVEKGKSKKLKSVKELLGITIMERSSFEKNPIDFLEAKGYKEVKKDLIIKLPKYSLFELENGRKRMLASAGELQKGNELALPSKYVNFLYLASHYEKLKGSPEDNEQKQLFVEQHKHYLDEIIEQISEFSKRVILADANLDKVLSAYNKHRDKPIREQAENIIHLFTLTNLGAPAAFKYFDTTIDRKRYTSTKEVLDATLIHQSITGLYETRIDLSQLGGDGGEAAAKGGGGGSGGLDDEYRLYSPLVKPDQNIQFWLEQFPQAWAETAGMGLAKQVPPQVIQLKASATPVSVRQYPLSKEAQEGIRPHVQRLIQQGILVPVQSPWNTPLLPVRKPGTNDYRPVQDLREVNKRVQDIHPTVPNPYNLLCALPPQRSWYTVLDLKDAFFCLRLHPTSQPLFAFEWRDPGTGRTGQLTWTRLPQGFKNSPTIFNEALHRDLANFRIQHPQVTLLQYVDDLLLAGATKQDCLEGTKALLLELSDLGYRASAKKAQICRREVTYLGYSLRDGQRWLTEARKKTVVQIPAPTTAKQVREFLGKAGFCRLFIPGFATLAAPLYPLTKPKGEFSWAPEHQKAFDAIKKALLSAPALALPDVTKPFTLYVDERKGVARGVLTQTLGPWRRPVAYLSKKLDPVASGWPVCLKAIAAVAILVKDADKLTLGQNITVIAPHALENIVRQPPDRWMTNARMTHYQSLLLTERVTFAPPAALNPATLLPEETDEPVTHDCHQLLIEETGVRKDLTDIPLTGEVLTWFTDGSSYVVEGKRMAGAAVVDGTRTIWASSLPEGTSAQKAELMALTQALRLAEGKSINIYTDSRYAFATAHVHGAIYKQRGWLTSAGREIKNKEEILSLLEALHLPKRLAIIHCPGHQKAKDPISRGNQMADRVAKQAAQGVNLLPAGKRTADGSEFEKRTADGSEFESPKKKAKVE

SEQ ID NO: 232 - protein, 2102 aa, synthetic construct; identical to SEQ ID NO: 39

SEQ ID NO: 233 - protein, 2085 aa, synthetic construct
MPAAKRVKLDGGDKKYSIGLDIGTNSVGWAVITDEYKVPSKKFKVLGNTDRHSIKKNLIGALLFDSGETAEATRLKRTARRRYTRRKNRICYLQEIFSNEMAKVDDSFFHRLEESFLVEEDKKHERHPIFGNIVDEVAYHEKYPTIYHLRKKLVDSTDKADLRLIYLALAHMIKFRGHFLIEGDLNPDNSDVDKLFIQLVQTYNQLFEENPINASGVDAKAILSARLSKSRRLENLIAQLPGEKKNGLFGNLIALSLGLTPNFKSNFDLAEDAKLQLSKDTYDDDLDNLLAQIGDQYADLFLAAKNLSDAILLSDILRVNTEITKAPLSASMIKRYDEHHQDLTLLKALVRQQLPEKYKEIFFDQSKNGYAGYIDGGASQEEFYKFIKPILEKMDGTEELLVKLNREDLLRKQRTFDNGSIPHQIHLGELHAILRRQEDFYPFLKDNREKIEKILTFRIPYYVGPLARGNSRFAWMTRKSEETITPWNFEEVVDKGASAQSFIERMTNFDKNLPNEKVLPKHSLLYEYFTVYNELTKVKYVTEGMRKPAFLSGEQKKAIVDLLFKTNRKVTVKQLKEDYFKKIECFDSVEISGVEDRFNASLGTYHDLLKIIKDKDFLDNEENEDILEDIVLTLTLFEDREMIEERLKTYAHLFDDKVMKQLKRRRYTGWGRLSRKLINGIRDKQSGKTILDFLKSDGFANRNFMQLIHDDSLTFKEDIQKAQVSGQGDSLHEHIANLAGSPAIKKGILQTVKVVDELVKVMGRHKPENIVIEMARENQTTQKGQKNSRERMKRIEEGIKELGSQILKEHPVENTQLQNEKLYLYYLQNGRDMYVDQELDINRLSDYDVDHIVPQSFLKDDSIDNKVLTRSDKARGKSDNVPSEEVVKKMKNYWRQLLNAKLITQRKFDNLTKAERGGLSELDKAGFIKRQLVETRQITKHVAQILDSRMNTKYDENDKLIREVKVITLKSKLVSDFRKDFQFYKVREINNYHHAHDAYLNAVVGTALIKKYPKLESEFVYGDYKVYDVRKMIAKSEQEIGKATAKYFFYSNIMNFFKTEITLANGEIRKRPLIETNGETGEIVWDKGRDFATVRKVLSMPQVNIVKKTEVQTGGFSKESILPKRNSDKLIARKKDWDPKKYGGFDSPTVAYSVLVVAKVEKGKSKKLKSVKELLGITIMERSSFEKNPIDFLEAKGYKEVKKDLIIKLPKYSLFELENGRKRMLASAGELQKGNELALPSKYVNFLYLASHYEKLKGSPEDNEQKQLFVEQHKHYLDEIIEQISEFSKRVILADANLDKVLSAYNKHRDKPIREQAENIIHLFTLTNLGAPAAFKYFDTTIDRKRYTSTKEVLDATLIHQSITGLYETRIDLSQLGGDGGEAAAKPAPGGLDDEYRLYSPLVKPDQNIQFWLEQFPQAWAETAGMGLAKQVPPQVIQLKASATPVSVRQYPLSKEAQEGIRPHVQRLIQQGILVPVQSPWNTPLLPVRKPGTNDYRPVQDLREVNKRVQDIHPTVPNPYNLLCALPPQRSWYTVLDLKDAFFCLRLHPTSQPLFAFEWRDPGTGRTGQLTWTRLPQGFKNSPTIFNEALHRDLANFRIQHPQVTLLQYVDDLLLAGATKQDCLEGTKALLLELSDLGYRASAKKAQICRREVTYLGYSLRDGQRWLTEARKKTVVQIPAPTTAKQVREFLGKAGFCRLFIPGFATLAAPLYPLTKPKGEFSWAPEHQKAFDAIKKALLSAPALALPDVTKPFTLYVDERKGVARGVLTQTLGPWRRPVAYLSKKLDPVASGWPVCLKAIAAVAILVKDADKLTLGQNITVIAPHALENIVRQPPDRWMTNARMTHYQSLLLTERVTFAPPAALNPATLLPEETDEPVTHDCHQLLIEETGVRKDLTDIPLTGEVLTWFTDGSSYVVEGKRMAGAAVVDGTRTIWASSLPEGTSAQKAELMALTQALRLAEGKSINIYTDSRYAFATAHVHGAIYKQRGWLTSAGREIKNKEEILSLLEALHLPKRLAIIHCPGHQKAKDPISRGNQMADRVAKQAAQGVNLLPAGKRTADGSEFEKRTADGSEFESPKKKAKVE

SEQ ID NO: 234 - protein, 2092 aa, synthetic construct; identical to SEQ ID NO: 56

SEQ ID NO: 235 - protein, 2083 aa, synthetic construct
MPAAKRVKLDGGDKKYSIGLDIGTNSVGWAVITDEYKVPSKKFKVLGNTDRHSIKKNLIGALLFDSGETAEATRLKRTARRRYTRRKNRICYLQEIFSNEMAKVDDSFFHRLEESFLVEEDKKHERHPIFGNIVDEVAYHEKYPTIYHLRKKLVDSTDKADLRLIYLALAHMIKFRGHFLIEGDLNPDNSDVDKLFIQLVQTYNQLFEENPINASGVDAKAILSARLSKSRRLENLIAQLPGEKKNGLFGNLIALSLGLTPNFKSNFDLAEDAKLQLSKDTYDDDLDNLLAQIGDQYADLFLAAKNLSDAILLSDILRVNTEITKAPLSASMIKRYDEHHQDLTLLKALVRQQLPEKYKEIFFDQSKNGYAGYIDGGASQEEFYKFIKPILEKMDGTEELLVKLNREDLLRKQRTFDNGSIPHQIHLGELHAILRRQEDFYPFLKDNREKIEKILTFRIPYYVGPLARGNSRFAWMTRKSEETITPWNFEEVVDKGASAQSFIERMTNFDKNLPNEKVLPKHSLLYEYFTVYNELTKVKYVTEGMRKPAFLSGEQKKAIVDLLFKTNRKVTVKQLKEDYFKKIECFDSVEISGVEDRFNASLGTYHDLLKIIKDKDFLDNEENEDILEDIVLTLTLFEDREMIEERLKTYAHLFDDKVMKQLKRRRYTGWGRLSRKLINGIRDKQSGKTILDFLKSDGFANRNFMQLIHDDSLTFKEDIQKAQVSGQGDSLHEHIANLAGSPAIKKGILQTVKVVDELVKVMGRHKPENIVIEMARENQTTQKGQKNSRERMKRIEEGIKELGSQILKEHPVENTQLQNEKLYLYYLQNGRDMYVDQELDINRLSDYDVDHIVPQSFLKDDSIDNKVLTRSDKARGKSDNVPSEEVVKKMKNYWRQLLNAKLITQRKFDNLTKAERGGLSELDKAGFIKRQLVETRQITKHVAQILDSRMNTKYDENDKLIREVKVITLKSKLVSDFRKDFQFYKVREINNYHHAHDAYLNAVVGTALIKKYPKLESEFVYGDYKVYDVRKMIAKSEQEIGKATAKYFFYSNIMNFFKTEITLANGEIRKRPLIETNGETGEIVWDKGRDFATVRKVLSMPQVNIVKKTEVQTGGFSKESILPKRNSDKLIARKKDWDPKKYGGFDSPTVAYSVLVVAKVEKGKSKKLKSVKELLGITIMERSSFEKNPIDFLEAKGYKEVKKDLIIKLPKYSLFELENGRKRMLASAGELQKGNELALPSKYVNFLYLASHYEKLKGSPEDNEQKQLFVEQHKHYLDEIIEQISEFSKRVILADANLDKVLSAYNKHRDKPIREQAENIIHLFTLTNLGAPAAFKYFDTTIDRKRYTSTKEVLDATLIHQSITGLYETRIDLSQLGGDGGGSSGSSGGLDDEYRLYSPLVKPDQNIQFWLEQFPQAWAETAGMGLAKQVPPQVIQLKASATPVSVRQYPLSKEAQEGIRPHVQRLIQQGILVPVQSPWNTPLLPVRKPGTNDYRPVQDLREVNKRVQDIHPTVPNPYNLLCALPPQRSWYTVLDLKDAFFCLRLHPTSQPLFAFEWRDPGTGRTGQLTWTRLPQGFKNSPTIFNEALHRDLANFRIQHPQVTLLQYVDDLLLAGATKQDCLEGTKALLLELSDLGYRASAKKAQICRREVTYLGYSLRDGQRWLTEARKKTVVQIPAPTTAKQVREFLGKAGFCRLFIPGFATLAAPLYPLTKPKGEFSWAPEHQKAFDAIKKALLSAPALALPDVTKPFTLYVDERKGVARGVLTQTLGPWRRPVAYLSKKLDPVASGWPVCLKAIAAVAILVKDADKLTLGQNITVIAPHALENIVRQPPDRWMTNARMTHYQSLLLTERVTFAPPAALNPATLLPEETDEPVTHDCHQLLIEETGVRKDLTDIPLTGEVLTWFTDGSSYVVEGKRMAGAAVVDGTRTIWASSLPEGTSAQKAELMALTQALRLAEGKSINIYTDSRYAFATAHVHGAIYKQRGWLTSAGREIKNKEEILSLLEALHLPKRLAIIHCPGHQKAKDPISRGNQMADRVAKQAAQGVNLLPAGKRTADGSEFEKRTADGSEFESPKKKAKVE

SEQ ID NO: 236 - protein, 2089 aa, synthetic construct; identical to SEQ ID NO: 67

SEQ ID NO: 237 - protein, 2085 aa, synthetic construct
MPAAKRVKLDGGDKKYSIGLDIGTNSVGWAVITDEYKVPSKKFKVLGNTDRHSIKKNLIGALLFDSGETAEATRLKRTARRRYTRRKNRICYLQEIFSNEMAKVDDSFFHRLEESFLVEEDKKHERHPIFGNIVDEVAYHEKYPTIYHLRKKLVDSTDKADLRLIYLALAHMIKFRGHFLIEGDLNPDNSDVDKLFIQLVQTYNQLFEENPINASGVDAKAILSARLSKSRRLENLIAQLPGEKKNGLFGNLIALSLGLTPNFKSNFDLAEDAKLQLSKDTYDDDLDNLLAQIGDQYADLFLAAKNLSDAILLSDILRVNTEITKAPLSASMIKRYDEHHQDLTLLKALVRQQLPEKYKEIFFDQSKNGYAGYIDGGASQEEFYKFIKPILEKMDGTEELLVKLNREDLLRKQRTFDNGSIPHQIHLGELHAILRRQEDFYPFLKDNREKIEKILTFRIPYYVGPLARGNSRFAWMTRKSEETITPWNFEEVVDKGASAQSFIERMTNFDKNLPNEKVLPKHSLLYEYFTVYNELTKVKYVTEGMRKPAFLSGEQKKAIVDLLFKTNRKVTVKQLKEDYFKKIECFDSVEISGVEDRFNASLGTYHDLLKIIKDKDFLDNEENEDILEDIVLTLTLFEDREMIEERLKTYAHLFDDKVMKQLKRRRYTGWGRLSRKLINGIRDKQSGKTILDFLKSDGFANRNFMQLIHDDSLTFKEDIQKAQVSGQGDSLHEHIANLAGSPAIKKGILQTVKVVDELVKVMGRHKPENIVIEMARENQTTQKGQKNSRERMKRIEEGIKELGSQILKEHPVENTQLQNEKLYLYYLQNGRDMYVDQELDINRLSDYDVDHIVPQSFLKDDSIDNKVLTRSDKARGKSDNVPSEEVVKKMKNYWRQLLNAKLITQRKFDNLTKAERGGLSELDKAGFIKRQLVETRQITKHVAQILDSRMNTKYDENDKLIREVKVITLKSKLVSDFRKDFQFYKVREINNYHHAHDAYLNAVVGTALIKKYPKLESEFVYGDYKVYDVRKMIAKSEQEIGKATAKYFFYSNIMNFFKTEITLANGEIRKRPLIETNGETGEIVWDKGRDFATVRKVLSMPQVNIVKKTEVQTGGFSKESILPKRNSDKLIARKKDWDPKKYGGFDSPTVAYSVLVVAKVEKGKSKKLKSVKELLGITIMERSSFEKNPIDFLEAKGYKEVKKDLIIKLPKYSLFELENGRKRMLASAGELQKGNELALPSKYVNFLYLASHYEKLKGSPEDNEQKQLFVEQHKHYLDEIIEQISEFSKRVILADANLDKVLSAYNKHRDKPIREQAENIIHLFTLTNLGAPAAFKYFDTTIDRKRYTSTKEVLDATLIHQSITGLYETRIDLSQLGGDGGGSSEAAAKGGLDDEYRLYSPLVKPDQNIQFWLEQFPQAWAETAGMGLAKQVPPQVIQLKASATPVSVRQYPLSKEAQEGIRPHVQRLIQQGILVPVQSPWNTPLLPVRKPGTNDYRPVQDLREVNKRVQDIHPTVPNPYNLLCALPPQRSWYTVLDLKDAFFCLRLHPTSQPLFAFEWRDPGTGRTGQLTWTRLPQGFKNSPTIFNEALHRDLANFRIQHPQVTLLQYVDDLLLAGATKQDCLEGTKALLLELSDLGYRASAKKAQICRREVTYLGYSLRDGQRWLTEARKKTVVQIPAPTTAKQVREFLGKAGFCRLFIPGFATLAAPLYPLTKPKGEFSWAPEHQKAFDAIKKALLSAPALALPDVTKPFTLYVDERKGVARGVLTQTLGPWRRPVAYLSKKLDPVASGWPVCLKAIAAVAILVKDADKLTLGQNITVIAPHALENIVRQPPDRWMTNARMTHYQSLLLTERVTFAPPAALNPATLLPEETDEPVTHDCHQLLIEETGVRKDLTDIPLTGEVLTWFTDGSSYVVEGKRMAGAAVVDGTRTIWASSLPEGTSAQKAELMALTQALRLAEGKSINIYTDSRYAFATAHVHGAIYKQRGWLTSAGREIKNKEEILSLLEALHLPKRLAIIHCPGHQKAKDPISRGNQMADRVAKQAAQGVNLLPAGKRTADGSEFEKRTADGSEFESPKKKAKVE

SEQ ID NO: 238 - protein, 2092 aa, synthetic construct; identical to SEQ ID NO: 52

SEQ ID NO: 239 - protein, 2088 aa, synthetic construct; identical to SEQ ID NO: 49

SEQ ID NO: 240 - protein, 2088 aa, synthetic construct
MPAAKRVKLDGGDKKYSIGLDIGTNSVGWAVITDEYKVPSKKFKVLGNTDRHSIKKNLIGALLFDSGETAEATRLKRTARRRYTRRKNRICYLQEIFSNEMAKVDDSFFHRLEESFLVEEDKKHERHPIFGNIVDEVAYHEKYPTIYHLRKKLVDSTDKADLRLIYLALAHMIKFRGHFLIEGDLNPDNSDVDKLFIQLVQTYNQLFEENPINASGVDAKAILSARLSKSRRLENLIAQLPGEKKNGLFGNLIALSLGLTPNFKSNFDLAEDAKLQLSKDTYDDDLDNLLAQIGDQYADLFLAAKNLSDAILLSDILRVNTEITKAPLSASMIKRYDEHHQDLTLLKALVRQQLPEKYKEIFFDQSKNGYAGYIDGGASQEEFYKFIKPILEKMDGTEELLVKLNREDLLRKQRTFDNGSIPHQIHLGELHAILRRQEDFYPFLKDNREKIEKILTFRIPYYVGPLARGNSRFAWMTRKSEETITPWNFEEVVDKGASAQSFIERMTNFDKNLPNEKVLPKHSLLYEYFTVYNELTKVKYVTEGMRKPAFLSGEQKKAIVDLLFKTNRKVTVKQLKEDYFKKIECFDSVEISGVEDRFNASLGTYHDLLKIIKDKDFLDNEENEDILEDIVLTLTLFEDREMIEERLKTYAHLFDDKVMKQLKRRRYTGWGRLSRKLINGIRDKQSGKTILDFLKSDGFANRNFMQLIHDDSLTFKEDIQKAQVSGQGDSLHEHIANLAGSPAIKKGILQTVKVVDELVKVMGRHKPENIVIEMARENQTTQKGQKNSRERMKRIEEGIKELGSQILKEHPVENTQLQNEKLYLYYLQNGRDMYVDQELDINRLSDYDVDHIVPQSFLKDDSIDNKVLTRSDKARGKSDNVPSEEVVKKMKNYWRQLLNAKLITQRKFDNLTKAERGGLSELDKAGFIKRQLVETRQITKHVAQILDSRMNTKYDENDKLIREVKVITLKSKLVSDFRKDFQFYKVREINNYHHAHDAYLNAVVGTALIKKYPKLESEFVYGDYKVYDVRKMIAKSEQEIGKATAKYFFYSNIMNFFKTEITLANGEIRKRPLIETNGETGEIVWDKGRDFATVRKVLSMPQVNIVKKTEVQTGGFSKESILPKRNSDKLIARKKDWDPKKYGGFDSPTVAYSVLVVAKVEKGKSKKLKSVKELLGITIMERSSFEKNPIDFLEAKGYKEVKKDLIIKLPKYSLFELENGRKRMLASAGELQKGNELALPSKYVNFLYLASHYEKLKGSPEDNEQKQLFVEQHKHYLDEIIEQISEFSKRVILADANLDKVLSAYNKHRDKPIREQAENIIHLFTLTNLGAPAAFKYFDTTIDRKRYTSTKEVLDATLIHQSITGLYETRIDLSQLGGDGGGGGEAAAKGSSGGLDDEYRLYSPLVKPDQNIQFWLEQFPQAWAETAGMGLAKQVPPQVIQLKASATPVSVRQYPLSKEAQEGIRPHVQRLIQQGILVPVQSPWNTPLLPVRKPGTNDYRPVQDLREVNKRVQDIHPTVPNPYNLLCALPPQRSWYTVLDLKDAFFCLRLHPTSQPLFAFEWRDPGTGRTGQLTWTRLPQGFKNSPTIFNEALHRDLANFRIQHPQVTLLQYVDDLLLAGATKQDCLEGTKALLLELSDLGYRASAKKAQICRREVTYLGYSLRDGQRWLTEARKKTVVQIPAPTTAKQVREFLGKAGFCRLFIPGFATLAAPLYPLTKPKGEFSWAPEHQKAFDAIKKALLSAPALALPDVTKPFTLYVDERKGVARGVLTQTLGPWRRPVAYLSKKLDPVASGWPVCLKAIAAVAILVKDADKLTLGQNITVIAPHALENIVRQPPDRWMTNARMTHYQSLLLTERVTFAPPAALNPATLLPEETDEPVTHDCHQLLIEETGVRKDLTDIPLTGEVLTWFTDGSSYVVEGKRMAGAAVVDGTRTIWASSLPEGTSAQKAELMALTQALRLAEGKSINIYTDSRYAFATAHVHGAIYKQRGWLTSAGREIKNKEEILSLLEALHLPKRLAIIHCPGHQKAKDPISRGNQMADRVAKQAAQGVNLLPAGKRTADGSEFEKRTADGSEFESPKKKAKVE

SEQ ID NO: 241 - protein, 2086 aa, synthetic construct
MPAAKRVKLDGGDKKYSIGLDIGTNSVGWAVITDEYKVPSKKFKVLGNTDRHSIKKNLIGALLFDSGETAEATRLKRTARRRYTRRKNRICYLQEIFSNEMAKVDDSFFHRLEESFLVEEDKKHERHPIFGNIVDEVAYHEKYPTIYHLRKKLVDSTDKADLRLIYLALAHMIKFRGHFLIEGDLNPDNSDVDKLFIQLVQTYNQLFEENPINASGVDAKAILSARLSKSRRLENLIAQLPGEKKNGLFGNLIALSLGLTPNFKSNFDLAEDAKLQLSKDTYDDDLDNLLAQIGDQYADLFLAAKNLSDAILLSDILRVNTEITKAPLSASMIKRYDEHHQDLTLLKALVRQQLPEKYKEIFFDQSKNGYAGYIDGGASQEEFYKFIKPILEKMDGTEELLVKLNREDLLRKQRTFDNGSIPHQIHLGELHAILRRQEDFYPFLKDNREKIEKILTFRIPYYVGPLARGNSRFAWMTRKSEETITPWNFEEVVDKGASAQSFIERMTNFDKNLPNEKVLPKHSLLYEYFTVYNELTKVKYVTEGMRKPAFLSGEQKKAIVDLLFKTNRKVTVKQLKEDYFKKIECFDSVEISGVEDRFNASLGTYHDLLKIIKDKDFLDNEENEDILEDIVLTLTLFEDREMIEERLKTYAHLFDDKVMKQLKRRRYTGWGRLSRKLINGIRDKQSGKTILDFLKSDGFANRNFMQLIHDDSLTFKEDIQKAQVSGQGDSLHEHIANLAGSPAIKKGILQTVKVVDELVKVMGRHKPENIVIEMARENQTTQKGQKNSRERMKRIEEGIKELGSQILKEHPVENTQLQNEKLYLYYLQNGRDMYVDQELDINRLSDYDVDHIVPQSFLKDDSIDNKVLTRSDKARGKSDNVPSEEVVKKMKNYWRQLLNAKLITQRKFDNLTKAERGGLSELDKAGFIKRQLVETRQITKHVAQILDSRMNTKYDENDKLIREVKVITLKSKLVSDFRKDFQFYKVREINNYHHAHDAYLNAVVGTALIKKYPKLESEFVYGDYKVYDVRKMIAKSEQEIGKATAKYFFYSNIMNFFKTEITLANGEIRKRPLIETNGETGEIVWDKGRDFATVRKVLSMPQVNIVKKTEVQTGGFSKESILPKRNSDKLIARKKDWDPKKYGGFDSPTVAYSVLVVAKVEKGKSKKLKSVKELLGITIMERSSFEKNPIDFLEAKGYKEVKKDLIIKLPKYSLFELENGRKRMLASAGELQKGNELALPSKYVNFLYLASHYEKLKGSPEDNEQKQLFVEQHKHYLDEIIEQISEFSKRVILADANLDKVLSAYNKHRDKPIREQAENIIHLFTLTNLGAPAAFKYFDTTIDRKRYTSTKEVLDATLIHQSITGLYETRIDLSQLGGDGGGGSGSSGGGGGLDDEYRLYSPLVKPDQNIQFWLEQFPQAWAETAGMGLAKQVPPQVIQLKASATPVSVRQYPLSKEAQEGIRPHVQRLIQQGILVPVQSPWNTPLLPVRKPGTNDYRPVQDLREVNKRVQDIHPTVPNPYNLLCALPPQRSWYTVLDLKDAFFCLRLHPTSQPLFAFEWRDPGTGRTGQLTWTRLPQGFKNSPTIFNEALHRDLANFRIQHPQVTLLQYVDDLLLAGATKQDCLEGTKALLLELSDLGYRASAKKAQICRREVTYLGYSLRDGQRWLTEARKKTVVQIPAPTTAKQVREFLGKAGFCRLFIPGFATLAAPLYPLTKPKGEFSWAPEHQKAFDAIKKALLSAPALALPDVTKPFTLYVDERKGVARGVLTQTLGPWRRPVAYLSKKLDPVASGWPVCLKAIAAVAILVKDADKLTLGQNITVIAPHALENIVRQPPDRWMTNARMTHYQSLLLTERVTFAPPAALNPATLLPEETDEPVTHDCHQLLIEETGVRKDLTDIPLTGEVLTWFTDGSSYVVEGKRMAGAAVVDGTRTIWASSLPEGTSAQKAELMALTQALRLAEGKSINIYTDSRYAFATAHVHGAIYKQRGWLTSAGREIKNKEEILSLLEALHLPKRLAIIHCPGHQKAKDPISRGNQMADRVAKQAAQGVNLLPAGKRTADGSEFEKRTADGSEFESPKKKAKVE

SEQ ID NO: 242 - protein, 2088 aa, synthetic construct
MPAAKRVKLDGGDKKYSIGLDIGTNSVGWAVITDEYKVPSKKFKVLGNTDRHSIKKNLIGALLFDSGETAEATRLKRTARRRYTRRKNRICYLQEIFSNEMAKVDDSFFHRLEESFLVEEDKKHERHPIFGNIVDEVAYHEKYPTIYHLRKKLVDSTDKADLRLIYLALAHMIKFRGHFLIEGDLNPDNSDVDKLFIQLVQTYNQLFEENPINASGVDAKAILSARLSKSRRLENLIAQLPGEKKNGLFGNLIALSLGLTPNFKSNFDLAEDAKLQLSKDTYDDDLDNLLAQIGDQYADLFLAAKNLSDAILLSDILRVNTEITKAPLSASMIKRYDEHHQDLTLLKALVRQQLPEKYKEIFFDQSKNGYAGYIDGGASQEEFYKFIKPILEKMDGTEELLVKLNREDLLRKQRTFDNGSIPHQIHLGELHAILRRQEDFYPFLKDNREKIEKILTFRIPYYVGPLARGNSRFAWMTRKSEETITPWNFEEVVDKGASAQSFIERMTNFDKNLPNEKVLPKHSLLYEYFTVYNELTKVKYVTEGMRKPAFLSGEQKKAIVDLLFKTNRKVTVKQLKEDYFKKIECFDSVEISGVEDRFNASLGTYHDLLKIIKDKDFLDNEENEDILEDIVLTLTLFEDREMIEERLKTYAHLFDDKVMKQLKRRRYTGWGRLSRKLINGIRDKQSGKTILDFLKSDGFANRNFMQLIHDDSLTFKEDIQKAQVSGQGDSLHEHIANLAGSPAIKKGILQTVKVVDELVKVMGRHKPENIVIEMARENQTTQKGQKNSRERMKRIEEGIKELGSQILKEHPVENTQLQNEKLYLYYLQNGRDMYVDQELDINRLSDYDVDHIVPQSFLKDDSIDNKVLTRSDKARGKSDNVPSEEVVKKMKNYWRQLLNAKLITQRKFDNLTKAERGGLSELDKAGFIKRQLVETRQITKHVAQILDSRMNTKYDENDKLIREVKVITLKSKLVSDFRKDFQFYKVREINNYHHAHDAYLNAVVGTALIKKYPKLESEFVYGDYKVYDVRKMIAKSEQEIGKATAKYFFYSNIMNFFKTEITLANGEIRKRPLIETNGETGEIVWDKGRDFATVRKVLSMPQVNIVKKTEVQTGGFSKESILPKRNSDKLIARKKDWDPKKYGGFDSPTVAYSVLVVAKVEKGKSKKLKSVKELLGITIMERSSFEKNPIDFLEAKGYKEVKKDLIIKLPKYSLFELENGRKRMLASAGELQKGNELALPSKYVNFLYLASHYEKLKGSPEDNEQKQLFVEQHKHYLDEIIEQISEFSKRVILADANLDKVLSAYNKHRDKPIREQAENIIHLFTLTNLGAPAAFKYFDTTIDRKRYTSTKEVLDATLIHQSITGLYETRIDLSQLGGDGGEAAAKGSSPAPGGLDDEYRLYSPLVKPDQNIQFWLEQFPQAWAETAGMGLAKQVPPQVIQLKASATPVSVRQYPLSKEAQEGIRPHVQRLIQQGILVPVQSPWNTPLLPVRKPGTNDYRPVQDLREVNKRVQDIHPTVPNPYNLLCALPPQRSWYTVLDLKDAFFCLRLHPTSQPLFAFEWRDPGTGRTGQLTWTRLPQGFKNSPTIFNEALHRDLANFRIQHPQVTLLQYVDDLLLAGATKQDCLEGTKALLLELSDLGYRASAKKAQICRREVTYLGYSLRDGQRWLTEARKKTVVQIPAPTTAKQVREFLGKAGFCRLFIPGFATLAAPLYPLTKPKGEFSWAPEHQKAFDAIKKALLSAPALALPDVTKPFTLYVDERKGVARGVLTQTLGPWRRPVAYLSKKLDPVASGWPVCLKAIAAVAILVKDADKLTLGQNITVIAPHALENIVRQPPDRWMTNARMTHYQSLLLTERVTFAPPAALNPATLLPEETDEPVTHDCHQLLIEETGVRKDLTDIPLTGEVLTWFTDGSSYVVEGKRMAGAAVVDGTRTIWASSLPEGTSAQKAELMALTQALRLAEGKSINIYTDSRYAFATAHVHGAIYKQRGWLTSAGREIKNKEEILSLLEALHLPKRLAIIHCPGHQKAKDPISRGNQMADRVAKQAAQGVNLLPAGKRTADGSEFEKRTADGSEFESPKKKAKVE

SEQ ID NO: 243 - protein, 2088 aa, synthetic construct
MPAAKRVKLDGGDKKYSIGLDIGTNSVGWAVITDEYKVPSKKFKVLGNTDRHSIKKNLIGALLFDSGETAEATRLKRTARRRYTRRKNRICYLQEIFSNEMAKVDDSFFHRLEESFLVEEDKKHERHPIFGNIVDEVAYHEKYPTIYHLRKKLVDSTDKADLRLIYLALAHMIKFRGHFLIEGDLNPDNSDVDKLFIQLVQTYNQLFEENPINASGVDAKAILSARLSKSRRLENLIAQLPGEKKNGLFGNLIALSLGLTPNFKSNFDLAEDAKLQLSKDTYDDDLDNLLAQIGDQYADLFLAAKNLSDAILLSDILRVNTEITKAPLSASMIKRYDEHHQDLTLLKALVRQQLPEKYKEIFFDQSKNGYAGYIDGGASQEEFYKFIKPILEKMDGTEELLVKLNREDLLRKQRTFDNGSIPHQIHLGELHAILRRQEDFYPFLKDNREKIEKILTFRIPYYVGPLARGNSRFAWMTRKSEETITPWNFEEVVDKGASAQSFIERMTNFDKNLPNEKVLPKHSLLYEYFTVYNELTKVKYVTEGMRKPAFLSGEQKKAIVDLLFKTNRKVTVKQLKEDYFKKIECFDSVEISGVEDRFNASLGTYHDLLKIIKDKDFLDNEENEDILEDIVLTLTLFEDREMIEERLKTYAHLFDDKVMKQLKRRRYTGWGRLSRKLINGIRDKQSGKTILDFLKSDGFANRNFMQLIHDDSLTFKEDIQKAQVSGQGDSLHEHIANLAGSPAIKKGILQTVKVVDELVKVMGRHKPENIVIEMARENQTTQKGQKNSRERMKRIEEGIKELGSQILKEHPVENTQLQNEKLYLYYLQNGRDMYVDQELDINRLSDYDVDHIVPQSFLKDDSIDNKVLTRSDKARGKSDNVPSEEVVKKMKNYWRQLLNAKLITQRKFDNLTKAERGGLSELDKAGFIKRQLVETRQITKHVAQILDSRMNTKYDENDKLIREVKVITLKSKLVSDFRKDFQFYKVREINNYHHAHDAYLNAVVGTALIKKYPKLESEFVYGDYKVYDVRKMIAKSEQEIGKATAKYFFYSNIMNFFKTEITLANGEIRKRPLIETNGETGEIVWDKGRDFATVRKVLSMPQVNIVKKTEVQTGGFSKESILPKRNSDKLIARKKDWDPKKYGGFDSPTVAYSVLVVAKVEKGKSKKLKSVKELLGITIMERSSFEKNPIDFLEAKGYKEVKKDLIIKLPKYSLFELENGRKRMLASAGELQKGNELALPSKYVNFLYLASHYEKLKGSPEDNEQKQLFVEQHKHYLDEIIEQISEFSKRVILADANLDKVLSAYNKHRDKPIREQAENIIHLFTLTNLGAPAAFKYFDTTIDRKRYTSTKEVLDATLIHQSITGLYETRIDLSQLGGDGGGGSPAPEAAAKGGLDDEYRLYSPLVKPDQNIQFWLEQFPQAWAETAGMGLAKQVPPQVIQLKASATPVSVRQYPLSKEAQEGIRPHVQRLIQQGILVPVQSPWNTPLLPVRKPGTNDYRPVQDLREVNKRVQDIHPTVPNPYNLLCALPPQRSWYTVLDLKDAFFCLRLHPTSQPLFAFEWRDPGTGRTGQLTWTRLPQGFKNSPTIFNEALHRDLANFRIQHPQVTLLQYVDDLLLAGATKQDCLEGTKALLLELSDLGYRASAKKAQICRREVTYLGYSLRDGQRWLTEARKKTVVQIPAPTTAKQVREFLGKAGFCRLFIPGFATLAAPLYPLTKPKGEFSWAPEHQKAFDAIKKALLSAPALALPDVTKPFTLYVDERKGVARGVLTQTLGPWRRPVAYLSKKLDPVASGWPVCLKAIAAVAILVKDADKLTLGQNITVIAPHALENIVRQPPDRWMTNARMTHYQSLLLTERVTFAPPAALNPATLLPEETDEPVTHDCHQLLIEETGVRKDLTDIPLTGEVLTWFTDGSSYVVEGKRMAGAAVVDGTRTIWASSLPEGTSAQKAELMALTQALRLAEGKSINIYTDSRYAFATAHVHGAIYKQRGWLTSAGREIKNKEEILSLLEALHLPKRLAIIHCPGHQKAKDPISRGNQMADRVAKQAAQGVNLLPAGKRTADGSEFEKRTADGSEFESPKKKAKVE

SEQ ID NO: 244 - protein, 2084 aa, synthetic construct; identical to SEQ ID NO: 77

SEQ ID NO: 245 - protein, 2081 aa, synthetic construct; identical to SEQ ID NO: 66

SEQ ID NO: 246 - protein, 2080 aa, synthetic construct
MPAAKRVKLDGGDKKYSIGLDIGTNSVGWAVITDEYKVPSKKFKVLGNTDRHSIKKNLIGALLFDSGETAEATRLKRTARRRYTRRKNRICYLQEIFSNEMAKVDDSFFHRLEESFLVEEDKKHERHPIFGNIVDEVAYHEKYPTIYHLRKKLVDSTDKADLRLIYLALAHMIKFRGHFLIEGDLNPDNSDVDKLFIQLVQTYNQLFEENPINASGVDAKAILSARLSKSRRLENLIAQLPGEKKNGLFGNLIALSLGLTPNFKSNFDLAEDAKLQLSKDTYDDDLDNLLAQIGDQYADLFLAAKNLSDAILLSDILRVNTEITKAPLSASMIKRYDEHHQDLTLLKALVRQQLPEKYKEIFFDQSKNGYAGYIDGGASQEEFYKFIKPILEKMDGTEELLVKLNREDLLRKQRTFDNGSIPHQIHLGELHAILRRQEDFYPFLKDNREKIEKILTFRIPYYVGPLARGNSRFAWMTRKSEETITPWNFEEVVDKGASAQSFIERMTNFDKNLPNEKVLPKHSLLYEYFTVYNELTKVKYVTEGMRKPAFLSGEQKKAIVDLLFKTNRKVTVKQLKEDYFKKIECFDSVEISGVEDRFNASLGTYHDLLKIIKDKDFLDNEENEDILEDIVLTLTLFEDREMIEERLKTYAHLFDDKVMKQLKRRRYTGWGRLSRKLINGIRDKQSGKTILDFLKSDGFANRNFMQLIHDDSLTFKEDIQKAQVSGQGDSLHEHIANLAGSPAIKKGILQTVKVVDELVKVMGRHKPENIVIEMARENQTTQKGQKNSRERMKRIEEGIKELGSQILKEHPVENTQLQNEKLYLYYLQNGRDMYVDQELDINRLSDYDVDHIVPQSFLKDDSIDNKVLTRSDKARGKSDNVPSEEVVKKMKNYWRQLLNAKLITQRKFDNLTKAERGGLSELDKAGFIKRQLVETRQITKHVAQILDSRMNTKYDENDKLIREVKVITLKSKLVSDFRKDFQFYKVREINNYHHAHDAYLNAVVGTALIKKYPKLESEFVYGDYKVYDVRKMIAKSEQEIGKATAKYFFYSNIMNFFKTEITLANGEIRKRPLIETNGETGEIVWDKGRDFATVRKVLSMPQVNIVKKTEVQTGGFSKESILPKRNSDKLIARKKDWDPKKYGGFDSPTVAYSVLVVAKVEKGKSKKLKSVKELLGITIMERSSFEKNPIDFLEAKGYKEVKKDLIIKLPKYSLFELENGRKRMLASAGELQKGNELALPSKYVNFLYLASHYEKLKGSPEDNEQKQLFVEQHKHYLDEIIEQISEFSKRVILADANLDKVLSAYNKHRDKPIREQAENIIHLFTLTNLGAPAAFKYFDTTIDRKRYTSTKEVLDATLIHQSITGLYETRIDLSQLGGDGGGGGGGLDDEYRLYSPLVKPDQNIQFWLEQFPQAWAETAGMGLAKQVPPQVIQLKASATPVSVRQYPLSKEAQEGIRPHVQRLIQQGILVPVQSPWNTPLLPVRKPGTNDYRPVQDLREVNKRVQDIHPTVPNPYNLLCALPPQRSWYTVLDLKDAFFCLRLHPTSQPLFAFEWRDPGTGRTGQLTWTRLPQGFKNSPTIFNEALHRDLANFRIQHPQVTLLQYVDDLLLAGATKQDCLEGTKALLLELSDLGYRASAKKAQICRREVTYLGYSLRDGQRWLTEARKKTVVQIPAPTTAKQVREFLGKAGFCRLFIPGFATLAAPLYPLTKPKGEFSWAPEHQKAFDAIKKALLSAPALALPDVTKPFTLYVDERKGVARGVLTQTLGPWRRPVAYLSKKLDPVASGWPVCLKAIAAVAILVKDADKLTLGQNITVIAPHALENIVRQPPDRWMTNARMTHYQSLLLTERVTFAPPAALNPATLLPEETDEPVTHDCHQLLIEETGVRKDLTDIPLTGEVLTWFTDGSSYVVEGKRMAGAAVVDGTRTIWASSLPEGTSAQKAELMALTQALRLAEGKSINIYTDSRYAFATAHVHGAIYKQRGWLTSAGREIKNKEEILSLLEALHLPKRLAIIHCPGHQKAKDPISRGNQMADRVAKQAAQGVNLLPAGKRTADGSEFEKRTADGSEFESPKKKAKVE

SEQ ID NO: 247 - protein, 2088 aa, synthetic construct
MPAAKRVKLDGGDKKYSIGLDIGTNSVGWAVITDEYKVPSKKFKVLGNTDRHSIKKNLIGALLFDSGETAEATRLKRTARRRYTRRKNRICYLQEIFSNEMAKVDDSFFHRLEESFLVEEDKKHERHPIFGNIVDEVAYHEKYPTIYHLRKKLVDSTDKADLRLIYLALAHMIKFRGHFLIEGDLNPDNSDVDKLFIQLVQTYNQLFEENPINASGVDAKAILSARLSKSRRLENLIAQLPGEKKNGLFGNLIALSLGLTPNFKSNFDLAEDAKLQLSKDTYDDDLDNLLAQIGDQYADLFLAAKNLSDAILLSDILRVNTEITKAPLSASMIKRYDEHHQDLTLLKALVRQQLPEKYKEIFFDQSKNGYAGYIDGGASQEEFYKFIKPILEKMDGTEELLVKLNREDLLRKQRTFDNGSIPHQIHLGELHAILRRQEDFYPFLKDNREKIEKILTFRIPYYVGPLARGNSRFAWMTRKSEETITPWNFEEVVDKGASAQSFIERMTNFDKNLPNEKVLPKHSLLYEYFTVYNELTKVKYVTEGMRKPAFLSGEQKKAIVDLLFKTNRKVTVKQLKEDYFKKIECFDSVEISGVEDRFNASLGTYHDLLKIIKDKDFLDNEENEDILEDIVLTLTLFEDREMIEERLKTYAHLFDDKVMKQLKRRRYTGWGRLSRKLINGIRDKQSGKTILDFLKSDGFANRNFMQLIHDDSLTFKEDIQKAQVSGQGDSLHEHIANLAGSPAIKKGILQTVKVVDELVKVMGRHKPENIVIEMARENQTTQKGQKNSRERMKRIEEGIKELGSQILKEHPVENTQLQNEKLYLYYLQNGRDMYVDQELDINRLSDYDVDHIVPQSFLKDDSIDNKVLTRSDKARGKSDNVPSEEVVKKMKNYWRQLLNAKLITQRKFDNLTKAERGGLSELDKAGFIKRQLVETRQITKHVAQILDSRMNTKYDENDKLIREVKVITLKSKLVSDFRKDFQFYKVREINNYHHAHDAYLNAVVGTALIKKYPKLESEFVYGDYKVYDVRKMIAKSEQEIGKATAKYFFYSNIMNFFKTEITLANGEIRKRPLIETNGETGEIVWDKGRDFATVRKVLSMPQVNIVKKTEVQTGGFSKESILPKRNSDKLIARKKDWDPKKYGGFDSPTVAYSVLVVAKVEKGKSKKLKSVKELLGITIMERSSFEKNPIDFLEAKGYKEVKKDLIIKLPKYSLFELENGRKRMLASAGELQKGNELALPSKYVNFLYLASHYEKLKGSPEDNEQKQLFVEQHKHYLDEIIEQISEFSKRVILADANLDKVLSAYNKHRDKPIREQAENIIHLFTLTNLGAPAAFKYFDTTIDRKRYTSTKEVLDATLIHQSITGLYETRIDLSQLGGDGGEAAAKPAPGGSGGLDDEYRLYSPLVKPDQNIQFWLEQFPQAWAETAGMGLAKQVPPQVIQLKASATPVSVRQYPLSKEAQEGIRPHVQRLIQQGILVPVQSPWNTPLLPVRKPGTNDYRPVQDLREVNKRVQDIHPTVPNPYNLLCALPPQRSWYTVLDLKDAFFCLRLHPTSQPLFAFEWRDPGTGRTGQLTWTRLPQGFKNSPTIFNEALHRDLANFRIQHPQVTLLQYVDDLLLAGATKQDCLEGTKALLLELSDLGYRASAKKAQICRREVTYLGYSLRDGQRWLTEARKKTVVQIPAPTTAKQVREFLGKAGFCRLFIPGFATLAAPLYPLTKPKGEFSWAPEHQKAFDAIKKALLSAPALALPDVTKPFTLYVDERKGVARGVLTQTLGPWRRPVAYLSKKLDPVASGWPVCLKAIAAVAILVKDADKLTLGQNITVIAPHALENIVRQPPDRWMTNARMTHYQSLLLTERVTFAPPAALNPATLLPEETDEPVTHDCHQLLIEETGVRKDLTDIPLTGEVLTWFTDGSSYVVEGKRMAGAAVVDGTRTIWASSLPEGTSAQKAELMALTQALRLAEGKSINIYTDSRYAFATAHVHGAIYKQRGWLTSAGREIKNKEEILSLLEALHLPKRLAIIHCPGHQKAKDPISRGNQMADRVAKQAAQGVNLLPAGKRTADGSEFEKRTADGSEFESPKKKAKVE

SEQ ID NO: 248 - protein, 2088 aa, synthetic construct; identical to SEQ ID NO: 94

SEQ ID NO: 249 - protein, 2086 aa, synthetic construct; identical to SEQ ID NO: 60

SEQ ID NO: 250 - protein, 2088 aa, synthetic construct
MPAAKRVKLDGGDKKYSIGLDIGTNSVGWAVITDEYKVPSKKFKVLGNTDRHSIKKNLIGALLFDSGETAEATRLKRTARRRYTRRKNRICYLQEIFSNEMAKVDDSFFHRLEESFLVEEDKKHERHPIFGNIVDEVAYHEKYPTIYHLRKKLVDSTDKADLRLIYLALAHMIKFRGHFLIEGDLNPDNSDVDKLFIQLVQTYNQLFEENPINASGVDAKAILSARLSKSRRLENLIAQLPGEKKNGLFGNLIALSLGLTPNFKSNFDLAEDAKLQLSKDTYDDDLDNLLAQIGDQYADLFLAAKNLSDAILLSDILRVNTEITKAPLSASMIKRYDEHHQDLTLLKALVRQQLPEKYKEIFFDQSKNGYAGYIDGGASQEEFYKFIKPILEKMDGTEELLVKLNREDLLRKQRTFDNGSIPHQIHLGELHAILRRQEDFYPFLKDNREKIEKILTFRIPYYVGPLARGNSRFAWMTRKSEETITPWNFEEVVDKGASAQSFIERMTNFDKNLPNEKVLPKHSLLYEYFTVYNELTKVKYVTEGMRKPAFLSGEQKKAIVDLLFKTNRKVTVKQLKEDYFKKIECFDSVEISGVEDRFNASLGTYHDLLKIIKDKDFLDNEENEDILEDIVLTLTLFEDREMIEERLKTYAHLFDDKVMKQLKRRRYTGWGRLSRKLINGIRDKQSGKTILDFLKSDGFANRNFMQLIHDDSLTFKEDIQKAQVSGQGDSLHEHIANLAGSPAIKKGILQTVKVVDELVKVMGRHKPENIVIEMARENQTTQKGQKNSRERMKRIEEGIKELGSQILKEHPVENTQLQNEKLYLYYLQNGRDMYVDQELDINRLSDYDVDHIVPQSFLKDDSIDNKVLTRSDKARGKSDNVPSEEVVKKMKNYWRQLLNAKLITQRKFDNLTKAERGGLSELDKAGFIKRQLVETRQITKHVAQILDSRMNTKYDENDKLIREVKVITLKSKLVSDFRKDFQFYKVREINNYHHAHDAYLNAVVGTALIKKYPKLESEFVYGDYKVYDVRKMIAKSEQEIGKATAKYFFYSNIMNFFKTEITLANGEIRKRPLIETNGETGEIVWDKGRDFATVRKVLSMPQVNIVKKTEVQTGGFSKESILPKRNSDKLIARKKDWDPKKYGGFDSPTVAYSVLVVAKVEKGKSKKLKSVKELLGITIMERSSFEKNPIDFLEAKGYKEVKKDLIIKLPKYSLFELENGRKRMLASAGELQKGNELALPSKYVNFLYLASHYEKLKGSPEDNEQKQLFVEQHKHYLDEIIEQISEFSKRVILADANLDKVLSAYNKHRDKPIREQAENIIHLFTLTNLGAPAAFKYFDTTIDRKRYTSTKEVLDATLIHQSITGLYETRIDLSQLGGDGGGGSEAAAKGGGGGLDDEYRLYSPLVKPDQNIQFWLEQFPQAWAETAGMGLAKQVPPQVIQLKASATPVSVRQYPLSKEAQEGIRPHVQRLIQQGILVPVQSPWNTPLLPVRKPGTNDYRPVQDLREVNKRVQDIHPTVPNPYNLLCALPPQRSWYTVLDLKDAFFCLRLHPTSQPLFAFEWRDPGTGRTGQLTWTRLPQGFKNSPTIFNEALHRDLANFRIQHPQVTLLQYVDDLLLAGATKQDCLEGTKALLLELSDLGYRASAKKAQICRREVTYLGYSLRDGQRWLTEARKKTVVQIPAPTTAKQVREFLGKAGFCRLFIPGFATLAAPLYPLTKPKGEFSWAPEHQKAFDAIKKALLSAPALALPDVTKPFTLYVDERKGVARGVLTQTLGPWRRPVAYLSKKLDPVASGWPVCLKAIAAVAILVKDADKLTLGQNITVIAPHALENIVRQPPDRWMTNARMTHYQSLLLTERVTFAPPAALNPATLLPEETDEPVTHDCHQLLIEETGVRKDLTDIPLTGEVLTWFTDGSSYVVEGKRMAGAAVVDGTRTIWASSLPEGTSAQKAELMALTQALRLAEGKSINIYTDSRYAFATAHVHGAIYKQRGWLTSAGREIKNKEEILSLLEALHLPKRLAIIHCPGHQKAKDPISRGNQMADRVAKQAAQGVNLLPAGKRTADGSEFEKRTADGSEFESPKKKAKVE

SEQ ID NO: 251 - protein, 2086 aa, synthetic construct; identical to SEQ ID NO: 82

SEQ ID NO: 252 - protein, 2083 aa, synthetic construct
MPAAKRVKLDGGDKKYSIGLDIGTNSVGWAVITDEYKVPSKKFKVLGNTDRHSIKKNLIGALLFDSGETAEATRLKRTARRRYTRRKNRICYLQEIFSNEMAKVDDSFFHRLEESFLVEEDKKHERHPIFGNIVDEVAYHEKYPTIYHLRKKLVDSTDKADLRLIYLALAHMIKFRGHFLIEGDLNPDNSDVDKLFIQLVQTYNQLFEENPINASGVDAKAILSARLSKSRRLENLIAQLPGEKKNGLFGNLIALSLGLTPNFKSNFDLAEDAKLQLSKDTYDDDLDNLLAQIGDQYADLFLAAKNLSDAILLSDILRVNTEITKAPLSASMIKRYDEHHQDLTLLKALVRQQLPEKYKEIFFDQSKNGYAGYIDGGASQEEFYKFIKPILEKMDGTEELLVKLNREDLLRKQRTFDNGSIPHQIHLGELHAILRRQEDFYPFLKDNREKIEKILTFRIPYYVGPLARGNSRFAWMTRKSEETITPWNFEEVVDKGASAQSFIERMTNFDKNLPNEKVLPKHSLLYEYFTVYNELTKVKYVTEGMRKPAFLSGEQKKAIVDLLFKTNRKVTVKQLKEDYFKKIECFDSVEISGVEDRFNASLGTYHDLLKIIKDKDFLDNEENEDILEDIVLTLTLFEDREMIEERLKTYAHLFDDKVMKQLKRRRYTGWGRLSRKLINGIRDKQSGKTILDFLKSDGFANRNFMQLIHDDSLTFKEDIQKAQVSGQGDSLHEHIANLAGSPAIKKGILQTVKVVDELVKVMGRHKPENIVIEMARENQTTQKGQKNSRERMKRIEEGIKELGSQILKEHPVENTQLQNEKLYLYYLQNGRDMYVDQELDINRLSDYDVDHIVPQSFLKDDSIDNKVLTRSDKARGKSDNVPSEEVVKKMKNYWRQLLNAKLITQRKFDNLTKAERGGLSELDKAGFIKRQLVETRQITKHVAQILDSRMNTKYDENDKLIREVKVITLKSKLVSDFRKDFQFYKVREINNYHHAHDAYLNAVVGTALIKKYPKLESEFVYGDYKVYDVRKMIAKSEQEIGKATAKYFFYSNIMNFFKTEITLANGEIRKRPLIETNGETGEIVWDKGRDFATVRKVLSMPQVNIVKKTEVQTGGFSKESILPKRNSDKLIARKKDWDPKKYGGFDSPTVAYSVLVVAKVEKGKSKKLKSVKELLGITIMERSSFEKNPIDFLEAKGYKEVKKDLIIKLPKYSLFELENGRKRMLASAGELQKGNELALPSKYVNFLYLASHYEKLKGSPEDNEQKQLFVEQHKHYLDEIIEQISEFSKRVILADANLDKVLSAYNKHRDKPIREQAENIIHLFTLTNLGAPAAFKYFDTTIDRKRYTSTKEVLDATLIHQSITGLYETRIDLSQLGGDGGPAPGGSGGLDDEYRLYSPLVKPDQNIQFWLEQFPQAWAETAGMGLAKQVPPQVIQLKASATPVSVRQYPLSKEAQEGIRPHVQRLIQQGILVPVQSPWNTPLLPVRKPGTNDYRPVQDLREVNKRVQDIHPTVPNPYNLLCALPPQRSWYTVLDLKDAFFCLRLHPTSQPLFAFEWRDPGTGRTGQLTWTRLPQGFKNSPTIFNEALHRDLANFRIQHPQVTLLQYVDDLLLAGATKQDCLEGTKALLLELSDLGYRASAKKAQICRREVTYLGYSLRDGQRWLTEARKKTVVQIPAPTTAKQVREFLGKAGFCRLFIPGFATLAAPLYPLTKPKGEFSWAPEHQKAFDAIKKALLSAPALALPDVTKPFTLYVDERKGVARGVLTQTLGPWRRPVAYLSKKLDPVASGWPVCLKAIAAVAILVKDADKLTLGQNITVIAPHALENIVRQPPDRWMTNARMTHYQSLLLTERVTFAPPAALNPATLLPEETDEPVTHDCHQLLIEETGVRKDLTDIPLTGEVLTWFTDGSSYVVEGKRMAGAAVVDGTRTIWASSLPEGTSAQKAELMALTQALRLAEGKSINIYTDSRYAFATAHVHGAIYKQRGWLTSAGREIKNKEEILSLLEALHLPKRLAIIHCPGHQKAKDPISRGNQMADRVAKQAAQGVNLLPAGKRTADGSEFEKRTADGSEFESPKKKAKVE

SEQ ID NO: 253 - protein, 2083 aa, synthetic construct; identical to SEQ ID NO: 59

SEQ ID NO: 254 - protein, 2088 aa, synthetic construct
MPAAKRVKLDGGDKKYSIGLDIGTNSVGWAVITDEYKVPSKKFKVLGNTDRHSIKKNLIGALLFDSGETAEATRLKRTARRRYTRRKNRICYLQEIFSNEMAKVDDSFFHRLEESFLVEEDKKHERHPIFGNIVDEVAYHEKYPTIYHLRKKLVDSTDKADLRLIYLALAHMIKFRGHFLIEGDLNPDNSDVDKLFIQLVQTYNQLFEENPINASGVDAKAILSARLSKSRRLENLIAQLPGEKKNGLFGNLIALSLGLTPNFKSNFDLAEDAKLQLSKDTYDDDLDNLLAQIGDQYADLFLAAKNLSDAILLSDILRVNTEITKAPLSASMIKRYDEHHQDLTLLKALVRQQLPEKYKEIFFDQSKNGYAGYIDGGASQEEFYKFIKPILEKMDGTEELLVKLNREDLLRKQRTFDNGSIPHQIHLGELHAILRRQEDFYPFLKDNREKIEKILTFRIPYYVGPLARGNSRFAWMTRKSEETITPWNFEEVVDKGASAQSFIERMTNFDKNLPNEKVLPKHSLLYEYFTVYNELTKVKYVTEGMRKPAFLSGEQKKAIVDLLFKTNRKVTVKQLKEDYFKKIECFDSVEISGVEDRFNASLGTYHDLLKIIKDKDFLDNEENEDILEDIVLTLTLFEDREMIEERLKTYAHLFDDKVMKQLKRRRYTGWGRLSRKLINGIRDKQSGKTILDFLKSDGFANRNFMQLIHDDSLTFKEDIQKAQVSGQGDSLHEHIANLAGSPAIKKGILQTVKVVDELVKVMGRHKPENIVIEMARENQTTQKGQKNSRERMKRIEEGIKELGSQILKEHPVENTQLQNEKLYLYYLQNGRDMYVDQELDINRLSDYDVDHIVPQSFLKDDSIDNKVLTRSDKARGKSDNVPSEEVVKKMKNYWRQLLNAKLITQRKFDNLTKAERGGLSELDKAGFIKRQLVETRQITKHVAQILDSRMNTKYDENDKLIREVKVITLKSKLVSDFRKDFQFYKVREINNYHHAHDAYLNAVVGTALIKKYPKLESEFVYGDYKVYDVRKMIAKSEQEIGKATAKYFFYSNIMNFFKTEITLANGEIRKRPLIETNGETGEIVWDKGRDFATVRKVLSMPQVNIVKKTEVQTGGFSKESILPKRNSDKLIARKKDWDPKKYGGFDSPTVAYSVLVVAKVEKGKSKKLKSVKELLGITIMERSSFEKNPIDFLEAKGYKEVKKDLIIKLPKYSLFELENGRKRMLASAGELQKGNELALPSKYVNFLYLASHYEKLKGSPEDNEQKQLFVEQHKHYLDEIIEQISEFSKRVILADANLDKVLSAYNKHRDKPIREQAENIIHLFTLTNLGAPAAFKYFDTTIDRKRYTSTKEVLDATLIHQSITGLYETRIDLSQLGGDGGGSSGGSEAAAKGGLDDEYRLYSPLVKPDQNIQFWLEQFPQAWAETAGMGLAKQVPPQVIQLKASATPVSVRQYPLSKEAQEGIRPHVQRLIQQGILVPVQSPWNTPLLPVRKPGTNDYRPVQDLREVNKRVQDIHPTVPNPYNLLCALPPQRSWYTVLDLKDAFFCLRLHPTSQPLFAFEWRDPGTGRTGQLTWTRLPQGFKNSPTIFNEALHRDLANFRIQHPQVTLLQYVDDLLLAGATKQDCLEGTKALLLELSDLGYRASAKKAQICRREVTYLGYSLRDGQRWLTEARKKTVVQIPAPTTAKQVREFLGKAGFCRLFIPGFATLAAPLYPLTKPKGEFSWAPEHQKAFDAIKKALLSAPALALPDVTKPFTLYVDERKGVARGVLTQTLGPWRRPVAYLSKKLDPVASGWPVCLKAIAAVAILVKDADKLTLGQNITVIAPHALENIVRQPPDRWMTNARMTHYQSLLLTERVTFAPPAALNPATLLPEETDEPVTHDCHQLLIEETGVRKDLTDIPLTGEVLTWFTDGSSYVVEGKRMAGAAVVDGTRTIWASSLPEGTSAQKAELMALTQALRLAEGKSINIYTDSRYAFATAHVHGAIYKQRGWLTSAGREIKNKEEILSLLEALHLPKRLAIIHCPGHQKAKDPISRGNQMADRVAKQAAQGVNLLPAGKRTADGSEFEKRTADGSEFESPKKKAKVE

SEQ ID NO: 255 - protein, 2088 aa, synthetic construct; identical to SEQ ID NO: 86

SEQ ID NO: 256 - protein, 2107 aa, synthetic construct
MPAAKRVKLDGGDKKYSIGLDIGTNSVGWAVITDEYKVPSKKFKVLGNTDRHSIKKNLIGALLFDSGETAEATRLKRTARRRYTRRKNRICYLQEIFSNEMAKVDDSFFHRLEESFLVEEDKKHERHPIFGNIVDEVAYHEKYPTIYHLRKKLVDSTDKADLRLIYLALAHMIKFRGHFLIEGDLNPDNSDVDKLFIQLVQTYNQLFEENPINASGVDAKAILSARLSKSRRLENLIAQLPGEKKNGLFGNLIALSLGLTPNFKSNFDLAEDAKLQLSKDTYDDDLDNLLAQIGDQYADLFLAAKNLSDAILLSDILRVNTEITKAPLSASMIKRYDEHHQDLTLLKALVRQQLPEKYKEIFFDQSKNGYAGYIDGGASQEEFYKFIKPILEKMDGTEELLVKLNREDLLRKQRTFDNGSIPHQIHLGELHAILRRQEDFYPFLKDNREKIEKILTFRIPYYVGPLARGNSRFAWMTRKSEETITPWNFEEVVDKGASAQSFIERMTNFDKNLPNEKVLPKHSLLYEYFTVYNELTKVKYVTEGMRKPAFLSGEQKKAIVDLLFKTNRKVTVKQLKEDYFKKIECFDSVEISGVEDRFNASLGTYHDLLKIIKDKDFLDNEENEDILEDIVLTLTLFEDREMIEERLKTYAHLFDDKVMKQLKRRRYTGWGRLSRKLINGIRDKQSGKTILDFLKSDGFANRNFMQLIHDDSLTFKEDIQKAQVSGQGDSLHEHIANLAGSPAIKKGILQTVKVVDELVKVMGRHKPENIVIEMARENQTTQKGQKNSRERMKRIEEGIKELGSQILKEHPVENTQLQNEKLYLYYLQNGRDMYVDQELDINRLSDYDVDHIVPQSFLKDDSIDNKVLTRSDKARGKSDNVPSEEVVKKMKNYWRQLLNAKLITQRKFDNLTKAERGGLSELDKAGFIKRQLVETRQITKHVAQILDSRMNTKYDENDKLIREVKVITLKSKLVSDFRKDFQFYKVREINNYHHAHDAYLNAVVGTALIKKYPKLESEFVYGDYKVYDVRKMIAKSEQEIGKATAKYFFYSNIMNFFKTEITLANGEIRKRPLIETNGETGEIVWDKGRDFATVRKVLSMPQVNIVKKTEVQTGGFSKESILPKRNSDKLIARKKDWDPKKYGGFDSPTVAYSVLVVAKVEKGKSKKLKSVKELLGITIMERSSFEKNPIDFLEAKGYKEVKKDLIIKLPKYSLFELENGRKRMLASAGELQKGNELALPSKYVNFLYLASHYEKLKGSPEDNEQKQLFVEQHKHYLDEIIEQISEFSKRVILADANLDKVLSAYNKHRDKPIREQAENIIHLFTLTNLGAPAAFKYFDTTIDRKRYTSTKEVLDATLIHQSITGLYETRIDLSQLGGDGGGGGGSGGGGSGGGGSGGGGSGGGGSGGGGSGGLDDEYRLYSPLVKPDQNIQFWLEQFPQAWAETAGMGLAKQVPPQVIQLKASATPVSVRQYPLSKEAQEGIRPHVQRLIQQGILVPVQSPWNTPLLPVRKPGTNDYRPVQDLREVNKRVQDIHPTVPNPYNLLCALPPQRSWYTVLDLKDAFFCLRLHPTSQPLFAFEWRDPGTGRTGQLTWTRLPQGFKNSPTIFNEALHRDLANFRIQHPQVTLLQYVDDLLLAGATKQDCLEGTKALLLELSDLGYRASAKKAQICRREVTYLGYSLRDGQRWLTEARKKTVVQIPAPTTAKQVREFLGKAGFCRLFIPGFATLAAPLYPLTKPKGEFSWAPEHQKAFDAIKKALLSAPALALPDVTKPFTLYVDERKGVARGVLTQTLGPWRRPVAYLSKKLDPVASGWPVCLKAIAAVAILVKDADKLTLGQNITVIAPHALENIVRQPPDRWMTNARMTHYQSLLLTERVTFAPPAALNPATLLPEETDEPVTHDCHQLLIEETGVRKDLTDIPLTGEVLTWFTDGSSYVVEGKRMAGAAVVDGTRTIWASSLPEGTSAQKAELMALTQALRLAEGKSINIYTDSRYAFATAHVHGAIYKQRGWLTSAGREIKNKEEILSLLEALHLPKRLAIIHCPGHQKAKDPISRGNQMADRVAKQAAQGVNLLPAGKRTADGSEFEKRTADGSEFESPKKKAKVE

SEQ ID NO: 257 - protein, 2086 aa, synthetic construct; identical to SEQ ID NO: 64

SEQ ID NO: 258 - protein, 2088 aa, synthetic construct
MPAAKRVKLDGGDKKYSIGLDIGTNSVGWAVITDEYKVPSKKFKVLGNTDRHSIKKNLIGALLFDSGETAEATRLKRTARRRYTRRKNRICYLQEIFSNEMAKVDDSFFHRLEESFLVEEDKKHERHPIFGNIVDEVAYHEKYPTIYHLRKKLVDSTDKADLRLIYLALAHMIKFRGHFLIEGDLNPDNSDVDKLFIQLVQTYNQLFEENPINASGVDAKAILSARLSKSRRLENLIAQLPGEKKNGLFGNLIALSLGLTPNFKSNFDLAEDAKLQLSKDTYDDDLDNLLAQIGDQYADLFLAAKNLSDAILLSDILRVNTEITKAPLSASMIKRYDEHHQDLTLLKALVRQQLPEKYKEIFFDQSKNGYAGYIDGGASQEEFYKFIKPILEKMDGTEELLVKLNREDLLRKQRTFDNGSIPHQIHLGELHAILRRQEDFYPFLKDNREKIEKILTFRIPYYVGPLARGNSRFAWMTRKSEETITPWNFEEVVDKGASAQSFIERMTNFDKNLPNEKVLPKHSLLYEYFTVYNELTKVKYVTEGMRKPAFLSGEQKKAIVDLLFKTNRKVTVKQLKEDYFKKIECFDSVEISGVEDRFNASLGTYHDLLKIIKDKDFLDNEENEDILEDIVLTLTLFEDREMIEERLKTYAHLFDDKVMKQLKRRRYTGWGRLSRKLINGIRDKQSGKTILDFLKSDGFANRNFMQLIHDDSLTFKEDIQKAQVSGQGDSLHEHIANLAGSPAIKKGILQTVKVVDELVKVMGRHKPENIVIEMARENQTTQKGQKNSRERMKRIEEGIKELGSQILKEHPVENTQLQNEKLYLYYLQNGRDMYVDQELDINRLSDYDVDHIVPQSFLKDDSIDNKVLTRSDKARGKSDNVPSEEVVKKMKNYWRQLLNAKLITQRKFDNLTKAERGGLSELDKAGFIKRQLVETRQITKHVAQILDSRMNTKYDENDKLIREVKVITLKSKLVSDFRKDFQFYKVREINNYHHAHDAYLNAVVGTALIKKYPKLESEFVYGDYKVYDVRKMIAKSEQEIGKATAKYFFYSNIMNFFKTEITLANGEIRKRPLIETNGETGEIVWDKGRDFATVRKVLSMPQVNIVKKTEVQTGGFSKESILPKRNSDKLIARKKDWDPKKYGGFDSPTVAYSVLVVAKVEKGKSKKLKSVKELLGITIMERSSFEKNPIDFLEAKGYKEVKKDLIIKLPKYSLFELENGRKRMLASAGELQKGNELALPSKYVNFLYLASHYEKLKGSPEDNEQKQLFVEQHKHYLDEIIEQISEFSKRVILADANLDKVLSAYNKHRDKPIREQAENIIHLFTLTNLGAPAAFKYFDTTIDRKRYTSTKEVLDATLIHQSITGLYETRIDLSQLGGDGGGSSEAAAKGGSGGLDDEYRLYSPLVKPDQNIQFWLEQFPQAWAETAGMGLAKQVPPQVIQLKASATPVSVRQYPLSKEAQEGIRPHVQRLIQQGILVPVQSPWNTPLLPVRKPGTNDYRPVQDLREVNKRVQDIHPTVPNPYNLLCALPPQRSWYTVLDLKDAFFCLRLHPTSQPLFAFEWRDPGTGRTGQLTWTRLPQGFKNSPTIFNEALHRDLANFRIQHPQVTLLQYVDDLLLAGATKQDCLEGTKALLLELSDLGYRASAKKAQICRREVTYLGYSLRDGQRWLTEARKKTVVQIPAPTTAKQVREFLGKAGFCRLFIPGFATLAAPLYPLTKPKGEFSWAPEHQKAFDAIKKALLSAPALALPDVTKPFTLYVDERKGVARGVLTQTLGPWRRPVAYLSKKLDPVASGWPVCLKAIAAVAILVKDADKLTLGQNITVIAPHALENIVRQPPDRWMTNARMTHYQSLLLTERVTFAPPAALNPATLLPEETDEPVTHDCHQLLIEETGVRKDLTDIPLTGEVLTWFTDGSSYVVEGKRMAGAAVVDGTRTIWASSLPEGTSAQKAELMALTQALRLAEGKSINIYTDSRYAFATAHVHGAIYKQRGWLTSAGREIKNKEEILSLLEALHLPKRLAIIHCPGHQKAKDPISRGNQMADRVAKQAAQGVNLLPAGKRTADGSEFEKRTADGSEFESPKKKAKVE

SEQ ID NO: 259 - protein, 2083 aa, synthetic construct
MPAAKRVKLDGGDKKYSIGLDIGTNSVGWAVITDEYKVPSKKFKVLGNTDRHSIKKNLIGALLFDSGETAEATRLKRTARRRYTRRKNRICYLQEIFSNEMAKVDDSFFHRLEESFLVEEDKKHERHPIFGNIVDEVAYHEKYPTIYHLRKKLVDSTDKADLRLIYLALAHMIKFRGHFLIEGDLNPDNSDVDKLFIQLVQTYNQLFEENPINASGVDAKAILSARLSKSRRLENLIAQLPGEKKNGLFGNLIALSLGLTPNFKSNFDLAEDAKLQLSKDTYDDDLDNLLAQIGDQYADLFLAAKNLSDAILLSDILRVNTEITKAPLSASMIKRYDEHHQDLTLLKALVRQQLPEKYKEIFFDQSKNGYAGYIDGGASQEEFYKFIKPILEKMDGTEELLVKLNREDLLRKQRTFDNGSIPHQIHLGELHAILRRQEDFYPFLKDNREKIEKILTFRIPYYVGPLARGNSRFAWMTRKSEETITPWNFEEVVDKGASAQSFIERMTNFDKNLPNEKVLPKHSLLYEYFTVYNELTKVKYVTEGMRKPAFLSGEQKKAIVDLLFKTNRKVTVKQLKEDYFKKIECFDSVEISGVEDRFNASLGTYHDLLKIIKDKDFLDNEENEDILEDIVLTLTLFEDREMIEERLKTYAHLFDDKVMKQLKRRRYTGWGRLSRKLINGIRDKQSGKTILDFLKSDGFANRNFMQLIHDDSLTFKEDIQKAQVSGQGDSLHEHIANLAGSPAIKKGILQTVKVVDELVKVMGRHKPENIVIEMARENQTTQKGQKNSRERMKRIEEGIKELGSQILKEHPVENTQLQNEKLYLYYLQNGRDMYVDQELDINRLSDYDVDHIVPQSFLKDDSIDNKVLTRSDKARGKSDNVPSEEVVKKMKNYWRQLLNAKLITQRKFDNLTKAERGGLSELDKAGFIKRQLVETRQITKHVAQILDSRMNTKYDENDKLIREVKVITLKSKLVSDFRKDFQFYKVREINNYHHAHDAYLNAVVGTALIKKYPKLESEFVYGDYKVYDVRKMIAKSEQEIGKATAKYFFYSNIMNFFKTEITLANGEIRKRPLIETNGETGEIVWDKGRDFATVRKVLSMPQVNIVKKTEVQTGGFSKESILPKRNSDKLIARKKDWDPKKYGGFDSPTVAYSVLVVAKVEKGKSKKLKSVKELLGITIMERSSFEKNPIDFLEAKGYKEVKKDLIIKLPKYSLFELENGRKRMLASAGELQKGNELALPSKYVNFLYLASHYEKLKGSPEDNEQKQLFVEQHKHYLDEIIEQISEFSKRVILADANLDKVLSAYNKHRDKPIREQAENIIHLFTLTNLGAPAAFKYFDTTIDRKRYTSTKEVLDATLIHQSITGLYETRIDLSQLGGDGGGGSGGSGGLDDEYRLYSPLVKPDQNIQFWLEQFPQAWAETAGMGLAKQVPPQVIQLKASATPVSVRQYPLSKEAQEGIRPHVQRLIQQGILVPVQSPWNTPLLPVRKPGTNDYRPVQDLREVNKRVQDIHPTVPNPYNLLCALPPQRSWYTVLDLKDAFFCLRLHPTSQPLFAFEWRDPGTGRTGQLTWTRLPQGFKNSPTIFNEALHRDLANFRIQHPQVTLLQYVDDLLLAGATKQDCLEGTKALLLELSDLGYRASAKKAQICRREVTYLGYSLRDGQRWLTEARKKTVVQIPAPTTAKQVREFLGKAGFCRLFIPGFATLAAPLYPLTKPKGEFSWAPEHQKAFDAIKKALLSAPALALPDVTKPFTLYVDERKGVARGVLTQTLGPWRRPVAYLSKKLDPVASGWPVCLKAIAAVAILVKDADKLTLGQNITVIAPHALENIVRQPPDRWMTNARMTHYQSLLLTERVTFAPPAALNPATLLPEETDEPVTHDCHQLLIEETGVRKDLTDIPLTGEVLTWFTDGSSYVVEGKRMAGAAVVDGTRTIWASSLPEGTSAQKAELMALTQALRLAEGKSINIYTDSRYAFATAHVHGAIYKQRGWLTSAGREIKNKEEILSLLEALHLPKRLAIIHCPGHQKAKDPISRGNQMADRVAKQAAQGVNLLPAGKRTADGSEFEKRTADGSEFESPKKKAKVE

SEQ ID NO: 260 - protein, 2088 aa, synthetic construct; identical to SEQ ID NO: 93

SEQ ID NO: 261 - protein, 2083 aa, synthetic construct; identical to SEQ ID NO: 81

SEQ ID NO: 262 - protein, 2080 aa, synthetic construct
MPAAKRVKLDGGDKKYSIGLDIGTNSVGWAVITDEYKVPSKKFKVLGNTDRHSIKKNLIGALLFDSGETAEATRLKRTARRRYTRRKNRICYLQEIFSNEMAKVDDSFFHRLEESFLVEEDKKHERHPIFGNIVDEVAYHEKYPTIYHLRKKLVDSTDKADLRLIYLALAHMIKFRGHFLIEGDLNPDNSDVDKLFIQLVQTYNQLFEENPINASGVDAKAILSARLSKSRRLENLIAQLPGEKKNGLFGNLIALSLGLTPNFKSNFDLAEDAKLQLSKDTYDDDLDNLLAQIGDQYADLFLAAKNLSDAILLSDILRVNTEITKAPLSASMIKRYDEHHQDLTLLKALVRQQLPEKYKEIFFDQSKNGYAGYIDGGASQEEFYKFIKPILEKMDGTEELLVKLNREDLLRKQRTFDNGSIPHQIHLGELHAILRRQEDFYPFLKDNREKIEKILTFRIPYYVGPLARGNSRFAWMTRKSEETITPWNFEEVVDKGASAQSFIERMTNFDKNLPNEKVLPKHSLLYEYFTVYNELTKVKYVTEGMRKPAFLSGEQKKAIVDLLFKTNRKVTVKQLKEDYFKKIECFDSVEISGVEDRFNASLGTYHDLLKIIKDKDFLDNEENEDILEDIVLTLTLFEDREMIEERLKTYAHLFDDKVMKQLKRRRYTGWGRLSRKLINGIRDKQSGKTILDFLKSDGFANRNFMQLIHDDSLTFKEDIQKAQVSGQGDSLHEHIANLAGSPAIKKGILQTVKVVDELVKVMGRHKPENIVIEMARENQTTQKGQKNSRERMKRIEEGIKELGSQILKEHPVENTQLQNEKLYLYYLQNGRDMYVDQELDINRLSDYDVDHIVPQSFLKDDSIDNKVLTRSDKARGKSDNVPSEEVVKKMKNYWRQLLNAKLITQRKFDNLTKAERGGLSELDKAGFIKRQLVETRQITKHVAQILDSRMNTKYDENDKLIREVKVITLKSKLVSDFRKDFQFYKVREINNYHHAHDAYLNAVVGTALIKKYPKLESEFVYGDYKVYDVRKMIAKSEQEIGKATAKYFFYSNIMNFFKTEITLANGEIRKRPLIETNGETGEIVWDKGRDFATVRKVLSMPQVNIVKKTEVQTGGFSKESILPKRNSDKLIARKKDWDPKKYGGFDSPTVAYSVLVVAKVEKGKSKKLKSVKELLGITIMERSSFEKNPIDFLEAKGYKEVKKDLIIKLPKYSLFELENGRKRMLASAGELQKGNELALPSKYVNFLYLASHYEKLKGSPEDNEQKQLFVEQHKHYLDEIIEQISEFSKRVILADANLDKVLSAYNKHRDKPIREQAENIIHLFTLTNLGAPAAFKYFDTTIDRKRYTSTKEVLDATLIHQSITGLYETRIDLSQLGGDGGGGSGGLDDEYRLYSPLVKPDQNIQFWLEQFPQAWAETAGMGLAKQVPPQVIQLKASATPVSVRQYPLSKEAQEGIRPHVQRLIQQGILVPVQSPWNTPLLPVRKPGTNDYRPVQDLREVNKRVQDIHPTVPNPYNLLCALPPQRSWYTVLDLKDAFFCLRLHPTSQPLFAFEWRDPGTGRTGQLTWTRLPQGFKNSPTIFNEALHRDLANFRIQHPQVTLLQYVDDLLLAGATKQDCLEGTKALLLELSDLGYRASAKKAQICRREVTYLGYSLRDGQRWLTEARKKTVVQIPAPTTAKQVREFLGKAGFCRLFIPGFATLAAPLYPLTKPKGEFSWAPEHQKAFDAIKKALLSAPALALPDVTKPFTLYVDERKGVARGVLTQTLGPWRRPVAYLSKKLDPVASGWPVCLKAIAAVAILVKDADKLTLGQNITVIAPHALENIVRQPPDRWMTNARMTHYQSLLLTERVTFAPPAALNPATLLPEETDEPVTHDCHQLLIEETGVRKDLTDIPLTGEVLTWFTDGSSYVVEGKRMAGAAVVDGTRTIWASSLPEGTSAQKAELMALTQALRLAEGKSINIYTDSRYAFATAHVHGAIYKQRGWLTSAGREIKNKEEILSLLEALHLPKRLAIIHCPGHQKAKDPISRGNQMADRVAKQAAQGVNLLPAGKRTADGSEFEKRTADGSEFESPKKKAKVE

SEQ ID NO: 263 - protein, 2088 aa, synthetic construct; identical to SEQ ID NO: 92

SEQ ID NO: 264 - protein, 2088 aa, synthetic construct; identical to SEQ ID NO: 53

SEQ ID NO: 265 - protein, 2083 aa, synthetic construct; identical to SEQ ID NO: 79

SEQ ID NO: 266 - protein, 2082 aa, synthetic construct
MPAAKRVKLDGGDKKYSIGLDIGTNSVGWAVITDEYKVPSKKFKVLGNTDRHSIKKNLIGALLFDSGETAEATRLKRTARRRYTRRKNRICYLQEIFSNEMAKVDDSFFHRLEESFLVEEDKKHERHPIFGNIVDEVAYHEKYPTIYHLRKKLVDSTDKADLRLIYLALAHMIKFRGHFLIEGDLNPDNSDVDKLFIQLVQTYNQLFEENPINASGVDAKAILSARLSKSRRLENLIAQLPGEKKNGLFGNLIALSLGLTPNFKSNFDLAEDAKLQLSKDTYDDDLDNLLAQIGDQYADLFLAAKNLSDAILLSDILRVNTEITKAPLSASMIKRYDEHHQDLTLLKALVRQQLPEKYKEIFFDQSKNGYAGYIDGGASQEEFYKFIKPILEKMDGTEELLVKLNREDLLRKQRTFDNGSIPHQIHLGELHAILRRQEDFYPFLKDNREKIEKILTFRIPYYVGPLARGNSRFAWMTRKSEETITPWNFEEVVDKGASAQSFIERMTNFDKNLPNEKVLPKHSLLYEYFTVYNELTKVKYVTEGMRKPAFLSGEQKKAIVDLLFKTNRKVTVKQLKEDYFKKIECFDSVEISGVEDRFNASLGTYHDLLKIIKDKDFLDNEENEDILEDIVLTLTLFEDREMIEERLKTYAHLFDDKVMKQLKRRRYTGWGRLSRKLINGIRDKQSGKTILDFLKSDGFANRNFMQLIHDDSLTFKEDIQKAQVSGQGDSLHEHIANLAGSPAIKKGILQTVKVVDELVKVMGRHKPENIVIEMARENQTTQKGQKNSRERMKRIEEGIKELGSQILKEHPVENTQLQNEKLYLYYLQNGRDMYVDQELDINRLSDYDVDHIVPQSFLKDDSIDNKVLTRSDKARGKSDNVPSEEVVKKMKNYWRQLLNAKLITQRKFDNLTKAERGGLSELDKAGFIKRQLVETRQITKHVAQILDSRMNTKYDENDKLIREVKVITLKSKLVSDFRKDFQFYKVREINNYHHAHDAYLNAVVGTALIKKYPKLESEFVYGDYKVYDVRKMIAKSEQEIGKATAKYFFYSNIMNFFKTEITLANGEIRKRPLIETNGETGEIVWDKGRDFATVRKVLSMPQVNIVKKTEVQTGGFSKESILPKRNSDKLIARKKDWDPKKYGGFDSPTVAYSVLVVAKVEKGKSKKLKSVKELLGITIMERSSFEKNPIDFLEAKGYKEVKKDLIIKLPKYSLFELENGRKRMLASAGELQKGNELALPSKYVNFLYLASHYEKLKGSPEDNEQKQLFVEQHKHYLDEIIEQISEFSKRVILADANLDKVLSAYNKHRDKPIREQAENIIHLFTLTNLGAPAAFKYFDTTIDRKRYTSTKEVLDATLIHQSITGLYETRIDLSQLGGDGGPAPAPGGLDDEYRLYSPLVKPDQNIQFWLEQFPQAWAETAGMGLAKQVPPQVIQLKASATPVSVRQYPLSKEAQEGIRPHVQRLIQQGILVPVQSPWNTPLLPVRKPGTNDYRPVQDLREVNKRVQDIHPTVPNPYNLLCALPPQRSWYTVLDLKDAFFCLRLHPTSQPLFAFEWRDPGTGRTGQLTWTRLPQGFKNSPTIFNEALHRDLANFRIQHPQVTLLQYVDDLLLAGATKQDCLEGTKALLLELSDLGYRASAKKAQICRREVTYLGYSLRDGQRWLTEARKKTVVQIPAPTTAKQVREFLGKAGFCRLFIPGFATLAAPLYPLTKPKGEFSWAPEHQKAFDAIKKALLSAPALALPDVTKPFTLYVDERKGVARGVLTQTLGPWRRPVAYLSKKLDPVASGWPVCLKAIAAVAILVKDADKLTLGQNITVIAPHALENIVRQPPDRWMTNARMTHYQSLLLTERVTFAPPAALNPATLLPEETDEPVTHDCHQLLIEETGVRKDLTDIPLTGEVLTWFTDGSSYVVEGKRMAGAAVVDGTRTIWASSLPEGTSAQKAELMALTQALRLAEGKSINIYTDSRYAFATAHVHGAIYKQRGWLTSAGREIKNKEEILSLLEALHLPKRLAIIHCPGHQKAKDPISRGNQMADRVAKQAAQGVNLLPAGKRTADGSEFEKRTADGSEFESPKKKAKVE

SEQ ID NO: 267 - protein, 2086 aa, synthetic construct
MPAAKRVKLDGGDKKYSIGLDIGTNSVGWAVITDEYKVPSKKFKVLGNTDRHSIKKNLIGALLFDSGETAEATRLKRTARRRYTRRKNRICYLQEIFSNEMAKVDDSFFHRLEESFLVEEDKKHERHPIFGNIVDEVAYHEKYPTIYHLRKKLVDSTDKADLRLIYLALAHMIKFRGHFLIEGDLNPDNSDVDKLFIQLVQTYNQLFEENPINASGVDAKAILSARLSKSRRLENLIAQLPGEKKNGLFGNLIALSLGLTPNFKSNFDLAEDAKLQLSKDTYDDDLDNLLAQIGDQYADLFLAAKNLSDAILLSDILRVNTEITKAPLSASMIKRYDEHHQDLTLLKALVRQQLPEKYKEIFFDQSKNGYAGYIDGGASQEEFYKFIKPILEKMDGTEELLVKLNREDLLRKQRTFDNGSIPHQIHLGELHAILRRQEDFYPFLKDNREKIEKILTFRIPYYVGPLARGNSRFAWMTRKSEETITPWNFEEVVDKGASAQSFIERMTNFDKNLPNEKVLPKHSLLYEYFTVYNELTKVKYVTEGMRKPAFLSGEQKKAIVDLLFKTNRKVTVKQLKEDYFKKIECFDSVEISGVEDRFNASLGTYHDLLKIIKDKDFLDNEENEDILEDIVLTLTLFEDREMIEERLKTYAHLFDDKVMKQLKRRRYTGWGRLSRKLINGIRDKQSGKTILDFLKSDGFANRNFMQLIHDDSLTFKEDIQKAQVSGQGDSLHEHIANLAGSPAIKKGILQTVKVVDELVKVMGRHKPENIVIEMARENQTTQKGQKNSRERMKRIEEGIKELGSQILKEHPVENTQLQNEKLYLYYLQNGRDMYVDQELDINRLSDYDVDHIVPQSFLKDDSIDNKVLTRSDKARGKSDNVPSEEVVKKMKNYWRQLLNAKLITQRKFDNLTKAERGGLSELDKAGFIKRQLVETRQITKHVAQILDSRMNTKYDENDKLIREVKVITLKSKLVSDFRKDFQFYKVREINNYHHAHDAYLNAVVGTALIKKYPKLESEFVYGDYKVYDVRKMIAKSEQEIGKATAKYFFYSNIMNFFKTEITLANGEIRKRPLIETNGETGEIVWDKGRDFATVRKVLSMPQVNIVKKTEVQTGGFSKESILPKRNSDKLIARKKDWDPKKYGGFDSPTVAYSVLVVAKVEKGKSKKLKSVKELLGITIMERSSFEKNPIDFLEAKGYKEVKKDLIIKLPKYSLFELENGRKRMLASAGELQKGNELALPSKYVNFLYLASHYEKLKGSPEDNEQKQLFVEQHKHYLDEIIEQISEFSKRVILADANLDKVLSAYNKHRDKPIREQAENIIHLFTLTNLGAPAAFKYFDTTIDRKRYTSTKEVLDATLIHQSITGLYETRIDLSQLGGDGGGGSPAPGSSGGLDDEYRLYSPLVKPDQNIQFWLEQFPQAWAETAGMGLAKQVPPQVIQLKASATPVSVRQYPLSKEAQEGIRPHVQRLIQQGILVPVQSPWNTPLLPVRKPGTNDYRPVQDLREVNKRVQDIHPTVPNPYNLLCALPPQRSWYTVLDLKDAFFCLRLHPTSQPLFAFEWRDPGTGRTGQLTWTRLPQGFKNSPTIFNEALHRDLANFRIQHPQVTLLQYVDDLLLAGATKQDCLEGTKALLLELSDLGYRASAKKAQICRREVTYLGYSLRDGQRWLTEARKKTVVQIPAPTTAKQVREFLGKAGFCRLFIPGFATLAAPLYPLTKPKGEFSWAPEHQKAFDAIKKALLSAPALALPDVTKPFTLYVDERKGVARGVLTQTLGPWRRPVAYLSKKLDPVASGWPVCLKAIAAVAILVKDADKLTLGQNITVIAPHALENIVRQPPDRWMTNARMTHYQSLLLTERVTFAPPAALNPATLLPEETDEPVTHDCHQLLIEETGVRKDLTDIPLTGEVLTWFTDGSSYVVEGKRMAGAAVVDGTRTIWASSLPEGTSAQKAELMALTQALRLAEGKSINIYTDSRYAFATAHVHGAIYKQRGWLTSAGREIKNKEEILSLLEALHLPKRLAIIHCPGHQKAKDPISRGNQMADRVAKQAAQGVNLLPAGKRTADGSEFEKRTADGSEFESPKKKAKVE

SEQ ID NO: 268 - protein, 2086 aa, synthetic construct; identical to SEQ ID NO: 38

SEQ ID NO: 269 - protein, 2080 aa, synthetic construct
MPAAKRVKLDGGDKKYSIGLDIGTNSVGWAVITDEYKVPSKKFKVLGNTDRHSIKKNLIGALLFDSGETAEATRLKRTARRRYTRRKNRICYLQEIFSNEMAKVDDSFFHRLEESFLVEEDKKHERHPIFGNIVDEVAYHEKYPTIYHLRKKLVDSTDKADLRLIYLALAHMIKFRGHFLIEGDLNPDNSDVDKLFIQLVQTYNQLFEENPINASGVDAKAILSARLSKSRRLENLIAQLPGEKKNGLFGNLIALSLGLTPNFKSNFDLAEDAKLQLSKDTYDDDLDNLLAQIGDQYADLFLAAKNLSDAILLSDILRVNTEITKAPLSASMIKRYDEHHQDLTLLKALVRQQLPEKYKEIFFDQSKNGYAGYIDGGASQEEFYKFIKPILEKMDGTEELLVKLNREDLLRKQRTFDNGSIPHQIHLGELHAILRRQEDFYPFLKDNREKIEKILTFRIPYYVGPLARGNSRFAWMTRKSEETITPWNFEEVVDKGASAQSFIERMTNFDKNLPNEKVLPKHSLLYEYFTVYNELTKVKYVTEGMRKPAFLSGEQKKAIVDLLFKTNRKVTVKQLKEDYFKKIECFDSVEISGVEDRFNASLGTYHDLLKIIKDKDFLDNEENEDILEDIVLTLTLFEDREMIEERLKTYAHLFDDKVMKQLKRRRYTGWGRLSRKLINGIRDKQSGKTILDFLKSDGFANRNFMQLIHDDSLTFKEDIQKAQVSGQGDSLHEHIANLAGSPAIKKGILQTVKVVDELVKVMGRHKPENIVIEMARENQTTQKGQKNSRERMKRIEEGIKELGSQILKEHPVENTQLQNEKLYLYYLQNGRDMYVDQELDINRLSDYDVDHIVPQSFLKDDSIDNKVLTRSDKARGKSDNVPSEEVVKKMKNYWRQLLNAKLITQRKFDNLTKAERGGLSELDKAGFIKRQLVETRQITKHVAQILDSRMNTKYDENDKLIREVKVITLKSKLVSDFRKDFQFYKVREINNYHHAHDAYLNAVVGTALIKKYPKLESEFVYGDYKVYDVRKMIAKSEQEIGKATAKYFFYSNIMNFFKTEITLANGEIRKRPLIETNGETGEIVWDKGRDFATVRKVLSMPQVNIVKKTEVQTGGFSKESILPKRNSDKLIARKKDWDPKKYGGFDSPTVAYSVLVVAKVEKGKSKKLKSVKELLGITIMERSSFEKNPIDFLEAKGYKEVKKDLIIKLPKYSLFELENGRKRMLASAGELQKGNELALPSKYVNFLYLASHYEKLKGSPEDNEQKQLFVEQHKHYLDEIIEQISEFSKRVILADANLDKVLSAYNKHRDKPIREQAENIIHLFTLTNLGAPAAFKYFDTTIDRKRYTSTKEVLDATLIHQSITGLYETRIDLSQLGGDGGPAPGGLDDEYRLYSPLVKPDQNIQFWLEQFPQAWAETAGMGLAKQVPPQVIQLKASATPVSVRQYPLSKEAQEGIRPHVQRLIQQGILVPVQSPWNTPLLPVRKPGTNDYRPVQDLREVNKRVQDIHPTVPNPYNLLCALPPQRSWYTVLDLKDAFFCLRLHPTSQPLFAFEWRDPGTGRTGQLTWTRLPQGFKNSPTIFNEALHRDLANFRIQHPQVTLLQYVDDLLLAGATKQDCLEGTKALLLELSDLGYRASAKKAQICRREVTYLGYSLRDGQRWLTEARKKTVVQIPAPTTAKQVREFLGKAGFCRLFIPGFATLAAPLYPLTKPKGEFSWAPEHQKAFDAIKKALLSAPALALPDVTKPFTLYVDERKGVARGVLTQTLGPWRRPVAYLSKKLDPVASGWPVCLKAIAAVAILVKDADKLTLGQNITVIAPHALENIVRQPPDRWMTNARMTHYQSLLLTERVTFAPPAALNPATLLPEETDEPVTHDCHQLLIEETGVRKDLTDIPLTGEVLTWFTDGSSYVVEGKRMAGAAVVDGTRTIWASSLPEGTSAQKAELMALTQALRLAEGKSINIYTDSRYAFATAHVHGAIYKQRGWLTSAGREIKNKEEILSLLEALHLPKRLAIIHCPGHQKAKDPISRGNQMADRVAKQAAQGVNLLPAGKRTADGSEFEKRTADGSEFESPKKKAKVE

SEQ ID NO: 270 - protein, 2086 aa, synthetic construct; identical to SEQ ID NO: 69

SEQ ID NO: 271 - protein, 2083 aa, synthetic construct; identical to SEQ ID NO: 88

SEQ ID NO: 272 - protein, 2086 aa, synthetic construct; identical to SEQ ID NO: 85

SEQ ID NO: 273 - protein, 2085 aa, synthetic construct
MPAAKRVKLDGGDKKYSIGLDIGTNSVGWAVITDEYKVPSKKFKVLGNTDRHSIKKNLIGALLFDSGETAEATRLKRTARRRYTRRKNRICYLQEIFSNEMAKVDDSFFHRLEESFLVEEDKKHERHPIFGNIVDEVAYHEKYPTIYHLRKKLVDSTDKADLRLIYLALAHMIKFRGHFLIEGDLNPDNSDVDKLFIQLVQTYNQLFEENPINASGVDAKAILSARLSKSRRLENLIAQLPGEKKNGLFGNLIALSLGLTPNFKSNFDLAEDAKLQLSKDTYDDDLDNLLAQIGDQYADLFLAAKNLSDAILLSDILRVNTEITKAPLSASMIKRYDEHHQDLTLLKALVRQQLPEKYKEIFFDQSKNGYAGYIDGGASQEEFYKFIKPILEKMDGTEELLVKLNREDLLRKQRTFDNGSIPHQIHLGELHAILRRQEDFYPFLKDNREKIEKILTFRIPYYVGPLARGNSRFAWMTRKSEETITPWNFEEVVDKGASAQSFIERMTNFDKNLPNEKVLPKHSLLYEYFTVYNELTKVKYVTEGMRKPAFLSGEQKKAIVDLLFKTNRKVTVKQLKEDYFKKIECFDSVEISGVEDRFNASLGTYHDLLKIIKDKDFLDNEENEDILEDIVLTLTLFEDREMIEERLKTYAHLFDDKVMKQLKRRRYTGWGRLSRKLINGIRDKQSGKTILDFLKSDGFANRNFMQLIHDDSLTFKEDIQKAQVSGQGDSLHEHIANLAGSPAIKKGILQTVKVVDELVKVMGRHKPENIVIEMARENQTTQKGQKNSRERMKRIEEGIKELGSQILKEHPVENTQLQNEKLYLYYLQNGRDMYVDQELDINRLSDYDVDHIVPQSFLKDDSIDNKVLTRSDKARGKSDNVPSEEVVKKMKNYWRQLLNAKLITQRKFDNLTKAERGGLSELDKAGFIKRQLVETRQITKHVAQILDSRMNTKYDENDKLIREVKVITLKSKLVSDFRKDFQFYKVREINNYHHAHDAYLNAVVGTALIKKYPKLESEFVYGDYKVYDVRKMIAKSEQEIGKATAKYFFYSNIMNFFKTEITLANGEIRKRPLIETNGETGEIVWDKGRDFATVRKVLSMPQVNIVKKTEVQTGGFSKESILPKRNSDKLIARKKDWDPKKYGGFDSPTVAYSVLVVAKVEKGKSKKLKSVKELLGITIMERSSFEKNPIDFLEAKGYKEVKKDLIIKLPKYSLFELENGRKRMLASAGELQKGNELALPSKYVNFLYLASHYEKLKGSPEDNEQKQLFVEQHKHYLDEIIEQISEFSKRVILADANLDKVLSAYNKHRDKPIREQAENIIHLFTLTNLGAPAAFKYFDTTIDRKRYTSTKEVLDATLIHQSITGLYETRIDLSQLGGDGGGGGEAAAKGGLDDEYRLYSPLVKPDQNIQFWLEQFPQAWAETAGMGLAKQVPPQVIQLKASATPVSVRQYPLSKEAQEGIRPHVQRLIQQGILVPVQSPWNTPLLPVRKPGTNDYRPVQDLREVNKRVQDIHPTVPNPYNLLCALPPQRSWYTVLDLKDAFFCLRLHPTSQPLFAFEWRDPGTGRTGQLTWTRLPQGFKNSPTIFNEALHRDLANFRIQHPQVTLLQYVDDLLLAGATKQDCLEGTKALLLELSDLGYRASAKKAQICRREVTYLGYSLRDGQRWLTEARKKTVVQIPAPTTAKQVREFLGKAGFCRLFIPGFATLAAPLYPLTKPKGEFSWAPEHQKAFDAIKKALLSAPALALPDVTKPFTLYVDERKGVARGVLTQTLGPWRRPVAYLSKKLDPVASGWPVCLKAIAAVAILVKDADKLTLGQNITVIAPHALENIVRQPPDRWMTNARMTHYQSLLLTERVTFAPPAALNPATLLPEETDEPVTHDCHQLLIEETGVRKDLTDIPLTGEVLTWFTDGSSYVVEGKRMAGAAVVDGTRTIWASSLPEGTSAQKAELMALTQALRLAEGKSINIYTDSRYAFATAHVHGAIYKQRGWLTSAGREIKNKEEILSLLEALHLPKRLAIIHCPGHQKAKDPISRGNQMADRVAKQAAQGVNLLPAGKRTADGSEFEKRTADGSEFESPKKKAKVE

SEQ ID NO: 274 - protein, 2086 aa, synthetic construct
MPAAKRVKLDGGDKKYSIGLDIGTNSVGWAVITDEYKVPSKKFKVLGNTDRHSIKKNLIGALLFDSGETAEATRLKRTARRRYTRRKNRICYLQEIFSNEMAKVDDSFFHRLEESFLVEEDKKHERHPIFGNIVDEVAYHEKYPTIYHLRKKLVDSTDKADLRLIYLALAHMIKFRGHFLIEGDLNPDNSDVDKLFIQLVQTYNQLFEENPINASGVDAKAILSARLSKSRRLENLIAQLPGEKKNGLFGNLIALSLGLTPNFKSNFDLAEDAKLQLSKDTYDDDLDNLLAQIGDQYADLFLAAKNLSDAILLSDILRVNTEITKAPLSASMIKRYDEHHQDLTLLKALVRQQLPEKYKEIFFDQSKNGYAGYIDGGASQEEFYKFIKPILEKMDGTEELLVKLNREDLLRKQRTFDNGSIPHQIHLGELHAILRRQEDFYPFLKDNREKIEKILTFRIPYYVGPLARGNSRFAWMTRKSEETITPWNFEEVVDKGASAQSFIERMTNFDKNLPNEKVLPKHSLLYEYFTVYNELTKVKYVTEGMRKPAFLSGEQKKAIVDLLFKTNRKVTVKQLKEDYFKKIECFDSVEISGVEDRFNASLGTYHDLLKIIKDKDFLDNEENEDILEDIVLTLTLFEDREMIEERLKTYAHLFDDKVMKQLKRRRYTGWGRLSRKLINGIRDKQSGKTILDFLKSDGFANRNFMQLIHDDSLTFKEDIQKAQVSGQGDSLHEHIANLAGSPAIKKGILQTVKVVDELVKVMGRHKPENIVIEMARENQTTQKGQKNSRERMKRIEEGIKELGSQILKEHPVENTQLQNEKLYLYYLQNGRDMYVDQELDINRLSDYDVDHIVPQSFLKDDSIDNKVLTRSDKARGKSDNVPSEEVVKKMKNYWRQLLNAKLITQRKFDNLTKAERGGLSELDKAGFIKRQLVETRQITKHVAQILDSRMNTKYDENDKLIREVKVITLKSKLVSDFRKDFQFYKVREINNYHHAHDAYLNAVVGTALIKKYPKLESEFVYGDYKVYDVRKMIAKSEQEIGKATAKYFFYSNIMNFFKTEITLANGEIRKRPLIETNGETGEIVWDKGRDFATVRKVLSMPQVNIVKKTEVQTGGFSKESILPKRNSDKLIARKKDWDPKKYGGFDSPTVAYSVLVVAKVEKGKSKKLKSVKELLGITIMERSSFEKNPIDFLEAKGYKEVKKDLIIKLPKYSLFELENGRKRMLASAGELQKGNELALPSKYVNFLYLASHYEKLKGSPEDNEQKQLFVEQHKHYLDEIIEQISEFSKRVILADANLDKVLSAYNKHRDKPIREQAENIIHLFTLTNLGAPAAFKYFDTTIDRKRYTSTKEVLDATLIHQSITGLYETRIDLSQLGGDGGGGSGGGGSSGGLDDEYRLYSPLVKPDQNIQFWLEQFPQAWAETAGMGLAKQVPPQVIQLKASATPVSVRQYPLSKEAQEGIRPHVQRLIQQGILVPVQSPWNTPLLPVRKPGTNDYRPVQDLREVNKRVQDIHPTVPNPYNLLCALPPQRSWYTVLDLKDAFFCLRLHPTSQPLFAFEWRDPGTGRTGQLTWTRLPQGFKNSPTIFNEALHRDLANFRIQHPQVTLLQYVDDLLLAGATKQDCLEGTKALLLELSDLGYRASAKKAQICRREVTYLGYSLRDGQRWLTEARKKTVVQIPAPTTAKQVREFLGKAGFCRLFIPGFATLAAPLYPLTKPKGEFSWAPEHQKAFDAIKKALLSAPALALPDVTKPFTLYVDERKGVARGVLTQTLGPWRRPVAYLSKKLDPVASGWPVCLKAIAAVAILVKDADKLTLGQNITVIAPHALENIVRQPPDRWMTNARMTHYQSLLLTERVTFAPPAALNPATLLPEETDEPVTHDCHQLLIEETGVRKDLTDIPLTGEVLTWFTDGSSYVVEGKRMAGAAVVDGTRTIWASSLPEGTSAQKAELMALTQALRLAEGKSINIYTDSRYAFATAHVHGAIYKQRGWLTSAGREIKNKEEILSLLEALHLPKRLAIIHCPGHQKAKDPISRGNQMADRVAKQAAQGVNLLPAGKRTADGSEFEKRTADGSEFESPKKKAKVE

SEQ ID NO: 275 - protein, 2086 aa, synthetic construct; identical to SEQ ID NO: 91

SEQ ID NO: 276 - protein, 2086 aa, synthetic construct; identical to SEQ ID NO: 95

SEQ ID NO: 277 - protein, 2085 aa, synthetic construct
MPAAKRVKLDGGDKKYSIGLDIGTNSVGWAVITDEYKVPSKKFKVLGNTDRHSIKKNLIGALLFDSGETAEATRLKRTARRRYTRRKNRICYLQEIFSNEMAKVDDSFFHRLEESFLVEEDKKHERHPIFGNIVDEVAYHEKYPTIYHLRKKLVDSTDKADLRLIYLALAHMIKFRGHFLIEGDLNPDNSDVDKLFIQLVQTYNQLFEENPINASGVDAKAILSARLSKSRRLENLIAQLPGEKKNGLFGNLIALSLGLTPNFKSNFDLAEDAKLQLSKDTYDDDLDNLLAQIGDQYADLFLAAKNLSDAILLSDILRVNTEITKAPLSASMIKRYDEHHQDLTLLKALVRQQLPEKYKEIFFDQSKNGYAGYIDGGASQEEFYKFIKPILEKMDGTEELLVKLNREDLLRKQRTFDNGSIPHQIHLGELHAILRRQEDFYPFLKDNREKIEKILTFRIPYYVGPLARGNSRFAWMTRKSEETITPWNFEEVVDKGASAQSFIERMTNFDKNLPNEKVLPKHSLLYEYFTVYNELTKVKYVTEGMRKPAFLSGEQKKAIVDLLFKTNRKVTVKQLKEDYFKKIECFDSVEISGVEDRFNASLGTYHDLLKIIKDKDFLDNEENEDILEDIVLTLTLFEDREMIEERLKTYAHLFDDKVMKQLKRRRYTGWGRLSRKLINGIRDKQSGKTILDFLKSDGFANRNFMQLIHDDSLTFKEDIQKAQVSGQGDSLHEHIANLAGSPAIKKGILQTVKVVDELVKVMGRHKPENIVIEMARENQTTQKGQKNSRERMKRIEEGIKELGSQILKEHPVENTQLQNEKLYLYYLQNGRDMYVDQELDINRLSDYDVDHIVPQSFLKDDSIDNKVLTRSDKARGKSDNVPSEEVVKKMKNYWRQLLNAKLITQRKFDNLTKAERGGLSELDKAGFIKRQLVETRQITKHVAQILDSRMNTKYDENDKLIREVKVITLKSKLVSDFRKDFQFYKVREINNYHHAHDAYLNAVVGTALIKKYPKLESEFVYGDYKVYDVRKMIAKSEQEIGKATAKYFFYSNIMNFFKTEITLANGEIRKRPLIETNGETGEIVWDKGRDFATVRKVLSMPQVNIVKKTEVQTGGFSKESILPKRNSDKLIARKKDWDPKKYGGFDSPTVAYSVLVVAKVEKGKSKKLKSVKELLGITIMERSSFEKNPIDFLEAKGYKEVKKDLIIKLPKYSLFELENGRKRMLASAGELQKGNELALPSKYVNFLYLASHYEKLKGSPEDNEQKQLFVEQHKHYLDEIIEQISEFSKRVILADANLDKVLSAYNKHRDKPIREQAENIIHLFTLTNLGAPAAFKYFDTTIDRKRYTSTKEVLDATLIHQSITGLYETRIDLSQLGGDGGGGSEAAAKGGLDDEYRLYSPLVKPDQNIQFWLEQFPQAWAETAGMGLAKQVPPQVIQLKASATPVSVRQYPLSKEAQEGIRPHVQRLIQQGILVPVQSPWNTPLLPVRKPGTNDYRPVQDLREVNKRVQDIHPTVPNPYNLLCALPPQRSWYTVLDLKDAFFCLRLHPTSQPLFAFEWRDPGTGRTGQLTWTRLPQGFKNSPTIFNEALHRDLANFRIQHPQVTLLQYVDDLLLAGATKQDCLEGTKALLLELSDLGYRASAKKAQICRREVTYLGYSLRDGQRWLTEARKKTVVQIPAPTTAKQVREFLGKAGFCRLFIPGFATLAAPLYPLTKPKGEFSWAPEHQKAFDAIKKALLSAPALALPDVTKPFTLYVDERKGVARGVLTQTLGPWRRPVAYLSKKLDPVASGWPVCLKAIAAVAILVKDADKLTLGQNITVIAPHALENIVRQPPDRWMTNARMTHYQSLLLTERVTFAPPAALNPATLLPEETDEPVTHDCHQLLIEETGVRKDLTDIPLTGEVLTWFTDGSSYVVEGKRMAGAAVVDGTRTIWASSLPEGTSAQKAELMALTQALRLAEGKSINIYTDSRYAFATAHVHGAIYKQRGWLTSAGREIKNKEEILSLLEALHLPKRLAIIHCPGHQKAKDPISRGNQMADRVAKQAAQGVNLLPAGKRTADGSEFEKRTADGSEFESPKKKAKVE

SEQ ID NO: 278 - protein, 2090 aa, synthetic construct; identical to SEQ ID NO: 112

SEQ ID NO: 279 - protein, 2094 aa, synthetic construct
MPAAKRVKLDGGDKKYSIGLDIGTNSVGWAVITDEYKVPSKKFKVLGNTDRHSIKKNLIGALLFDSGETAEATRLKRTARRRYTRRKNRICYLQEIFSNEMAKVDDSFFHRLEESFLVEEDKKHERHPIFGNIVDEVAYHEKYPTIYHLRKKLVDSTDKADLRLIYLALAHMIKFRGHFLIEGDLNPDNSDVDKLFIQLVQTYNQLFEENPINASGVDAKAILSARLSKSRRLENLIAQLPGEKKNGLFGNLIALSLGLTPNFKSNFDLAEDAKLQLSKDTYDDDLDNLLAQIGDQYADLFLAAKNLSDAILLSDILRVNTEITKAPLSASMIKRYDEHHQDLTLLKALVRQQLPEKYKEIFFDQSKNGYAGYIDGGASQEEFYKFIKPILEKMDGTEELLVKLNREDLLRKQRTFDNGSIPHQIHLGELHAILRRQEDFYPFLKDNREKIEKILTFRIPYYVGPLARGNSRFAWMTRKSEETITPWNFEEVVDKGASAQSFIERMTNFDKNLPNEKVLPKHSLLYEYFTVYNELTKVKYVTEGMRKPAFLSGEQKKAIVDLLFKTNRKVTVKQLKEDYFKKIECFDSVEISGVEDRFNASLGTYHDLLKIIKDKDFLDNEENEDILEDIVLTLTLFEDREMIEERLKTYAHLFDDKVMKQLKRRRYTGWGRLSRKLINGIRDKQSGKTILDFLKSDGFANRNFMQLIHDDSLTFKEDIQKAQVSGQGDSLHEHIANLAGSPAIKKGILQTVKVVDELVKVMGRHKPENIVIEMARENQTTQKGQKNSRERMKRIEEGIKELGSQILKEHPVENTQLQNEKLYLYYLQNGRDMYVDQELDINRLSDYDVDHIVPQSFLKDDSIDNKVLTRSDKARGKSDNVPSEEVVKKMKNYWRQLLNAKLITQRKFDNLTKAERGGLSELDKAGFIKRQLVETRQITKHVAQILDSRMNTKYDENDKLIREVKVITLKSKLVSDFRKDFQFYKVREINNYHHAHDAYLNAVVGTALIKKYPKLESEFVYGDYKVYDVRKMIAKSEQEIGKATAKYFFYSNIMNFFKTEITLANGEIRKRPLIETNGETGEIVWDKGRDFATVRKVLSMPQVNIVKKTEVQTGGFSKESILPKRNSDKLIARKKDWDPKKYGGFDSPTVAYSVLVVAKVEKGKSKKLKSVKELLGITIMERSSFEKNPIDFLEAKGYKEVKKDLIIKLPKYSLFELENGRKRMLASAGELQKGNELALPSKYVNFLYLASHYEKLKGSPEDNEQKQLFVEQHKHYLDEIIEQISEFSKRVILADANLDKVLSAYNKHRDKPIREQAENIIHLFTLTNLGAPAAFKYFDTTIDRKRYTSTKEVLDATLIHQSITGLYETRIDLSQLGGDGGEAAAKEAAAKEAAAKGGTLQLDDEYRLYSPLVKPDQNIQFWLEQFPQAWAETAGMGLAKQVPPQVIQLKASATPVSVRQYPLSKEAQEGIRPHVQRLIQQGILVPVQSPWNTPLLPVRKPGTNDYRPVQDLREVNKRVQDIHPTVPNPYNLLCALPPQRSWYTVLDLKDAFFCLRLHPTSQPLFAFEWRDPGTGRTGQLTWTRLPQGFKNSPTIFDEALHRDLANFRIQHPQVTLLQYVDDLLLAGATKQDCLEGTKALLLELSDLGYRASAKKAQICRREVTYLGYSLRDGQRWLTEARKKTVVQIPAPTTAKQVREFLGTAGFCRLWIPGFATLAAPLYPLTKEKGEFSWAPEHQKAFDAIKKALLSAPALALPDVTKPFTLYVDERKGVARGVLTQTLGPWRRPVAYLSKKLDPVASGWPVCLKAIAAVAILVKDADKLTLGQNITVIAPHALENIVRQPPDRWMTNARMTHYQSLLLTERVTFAPPAALNPATLLPEETDEPVTHDCHQLLIEETGVRKDLTDIPLTGEVLTWFTDGSSYVVEGKRMAGAAVVDGTRTIWASSLPEGTSAQKAELMALTQALRLAEGKSINIYTDSRYAFATAHVHGAIYKQRGLLTSAGREIKNKEEILSLLEALHLPKRLAIIHCPGHQKAKDPISRGNQMADRVAKQAAQGVNLLAGKRTADGSEFEKRTADGSEFESPKKKAKVE

SEQ ID NO: 280 - protein, 2109 aa, synthetic construct
MPAAKRVKLDGGDKKYSIGLDIGTNSVGWAVITDEYKVPSKKFKVLGNTDRHSIKKNLIGALLFDSGETAEATRLKRTARRRYTRRKNRICYLQEIFSNEMAKVDDSFFHRLEESFLVEEDKKHERHPIFGNIVDEVAYHEKYPTIYHLRKKLVDSTDKADLRLIYLALAHMIKFRGHFLIEGDLNPDNSDVDKLFIQLVQTYNQLFEENPINASGVDAKAILSARLSKSRRLENLIAQLPGEKKNGLFGNLIALSLGLTPNFKSNFDLAEDAKLQLSKDTYDDDLDNLLAQIGDQYADLFLAAKNLSDAILLSDILRVNTEITKAPLSASMIKRYDEHHQDLTLLKALVRQQLPEKYKEIFFDQSKNGYAGYIDGGASQEEFYKFIKPILEKMDGTEELLVKLNREDLLRKQRTFDNGSIPHQIHLGELHAILRRQEDFYPFLKDNREKIEKILTFRIPYYVGPLARGNSRFAWMTRKSEETITPWNFEEVVDKGASAQSFIERMTNFDKNLPNEKVLPKHSLLYEYFTVYNELTKVKYVTEGMRKPAFLSGEQKKAIVDLLFKTNRKVTVKQLKEDYFKKIECFDSVEISGVEDRFNASLGTYHDLLKIIKDKDFLDNEENEDILEDIVLTLTLFEDREMIEERLKTYAHLFDDKVMKQLKRRRYTGWGRLSRKLINGIRDKQSGKTILDFLKSDGFANRNFMQLIHDDSLTFKEDIQKAQVSGQGDSLHEHIANLAGSPAIKKGILQTVKVVDELVKVMGRHKPENIVIEMARENQTTQKGQKNSRERMKRIEEGIKELGSQILKEHPVENTQLQNEKLYLYYLQNGRDMYVDQELDINRLSDYDVDHIVPQSFLKDDSIDNKVLTRSDKARGKSDNVPSEEVVKKMKNYWRQLLNAKLITQRKFDNLTKAERGGLSELDKAGFIKRQLVETRQITKHVAQILDSRMNTKYDENDKLIREVKVITLKSKLVSDFRKDFQFYKVREINNYHHAHDAYLNAVVGTALIKKYPKLESEFVYGDYKVYDVRKMIAKSEQEIGKATAKYFFYSNIMNFFKTEITLANGEIRKRPLIETNGETGEIVWDKGRDFATVRKVLSMPQVNIVKKTEVQTGGFSKESILPKRNSDKLIARKKDWDPKKYGGFDSPTVAYSVLVVAKVEKGKSKKLKSVKELLGITIMERSSFEKNPIDFLEAKGYKEVKKDLIIKLPKYSLFELENGRKRMLASAGELQKGNELALPSKYVNFLYLASHYEKLKGSPEDNEQKQLFVEQHKHYLDEIIEQISEFSKRVILADANLDKVLSAYNKHRDKPIREQAENIIHLFTLTNLGAPAAFKYFDTTIDRKRYTSTKEVLDATLIHQSITGLYETRIDLSQLGGDGGEAAAKEAAAKEAAAKEAAAKEAAAKEAAAKGGTLQLDDEYRLYSPLVKPDQNIQFWLEQFPQAWAETAGMGLAKQVPPQVIQLKASATPVSVRQYPLSKEAQEGIRPHVQRLIQQGILVPVQSPWNTPLLPVRKPGTNDYRPVQDLREVNKRVQDIHPTVPNPYNLLCALPPQRSWYTVLDLKDAFFCLRLHPTSQPLFAFEWRDPGTGRTGQLTWTRLPQGFKNSPTIFDEALHRDLANFRIQHPQVTLLQYVDDLLLAGATKQDCLEGTKALLLELSDLGYRASAKKAQICRREVTYLGYSLRDGQRWLTEARKKTVVQIPAPTTAKQVREFLGTAGFCRLWIPGFATLAAPLYPLTKEKGEFSWAPEHQKAFDAIKKALLSAPALALPDVTKPFTLYVDERKGVARGVLTQTLGPWRRPVAYLSKKLDPVASGWPVCLKAIAAVAILVKDADKLTLGQNITVIAPHALENIVRQPPDRWMTNARMTHYQSLLLTERVTFAPPAALNPATLLPEETDEPVTHDCHQLLIEETGVRKDLTDIPLTGEVLTWFTDGSSYVVEGKRMAGAAVVDGTRTIWASSLPEGTSAQKAELMALTQALRLAEGKSINIYTDSRYAFATAHVHGAIYKQRGLLTSAGREIKNKEEILSLLEALHLPKRLAIIHCPGHQKAKDPISRGNQMADRVAKQAAQGVNLLAGKRTADGSEFEKRTADGSEFESPKKKAKVE

SEQ ID NO: 281 - protein, 2088 aa, synthetic construct
MPAAKRVKLDGGDKKYSIGLDIGTNSVGWAVITDEYKVPSKKFKVLGNTDRHSIKKNLIGALLFDSGETAEATRLKRTARRRYTRRKNRICYLQEIFSNEMAKVDDSFFHRLEESFLVEEDKKHERHPIFGNIVDEVAYHEKYPTIYHLRKKLVDSTDKADLRLIYLALAHMIKFRGHFLIEGDLNPDNSDVDKLFIQLVQTYNQLFEENPINASGVDAKAILSARLSKSRRLENLIAQLPGEKKNGLFGNLIALSLGLTPNFKSNFDLAEDAKLQLSKDTYDDDLDNLLAQIGDQYADLFLAAKNLSDAILLSDILRVNTEITKAPLSASMIKRYDEHHQDLTLLKALVRQQLPEKYKEIFFDQSKNGYAGYIDGGASQEEFYKFIKPILEKMDGTEELLVKLNREDLLRKQRTFDNGSIPHQIHLGELHAILRRQEDFYPFLKDNREKIEKILTFRIPYYVGPLARGNSRFAWMTRKSEETITPWNFEEVVDKGASAQSFIERMTNFDKNLPNEKVLPKHSLLYEYFTVYNELTKVKYVTEGMRKPAFLSGEQKKAIVDLLFKTNRKVTVKQLKEDYFKKIECFDSVEISGVEDRFNASLGTYHDLLKIIKDKDFLDNEENEDILEDIVLTLTLFEDREMIEERLKTYAHLFDDKVMKQLKRRRYTGWGRLSRKLINGIRDKQSGKTILDFLKSDGFANRNFMQLIHDDSLTFKEDIQKAQVSGQGDSLHEHIANLAGSPAIKKGILQTVKVVDELVKVMGRHKPENIVIEMARENQTTQKGQKNSRERMKRIEEGIKELGSQILKEHPVENTQLQNEKLYLYYLQNGRDMYVDQELDINRLSDYDVDHIVPQSFLKDDSIDNKVLTRSDKARGKSDNVPSEEVVKKMKNYWRQLLNAKLITQRKFDNLTKAERGGLSELDKAGFIKRQLVETRQITKHVAQILDSRMNTKYDENDKLIREVKVITLKSKLVSDFRKDFQFYKVREINNYHHAHDAYLNAVVGTALIKKYPKLESEFVYGDYKVYDVRKMIAKSEQEIGKATAKYFFYSNIMNFFKTEITLANGEIRKRPLIETNGETGEIVWDKGRDFATVRKVLSMPQVNIVKKTEVQTGGFSKESILPKRNSDKLIARKKDWDPKKYGGFDSPTVAYSVLVVAKVEKGKSKKLKSVKELLGITIMERSSFEKNPIDFLEAKGYKEVKKDLIIKLPKYSLFELENGRKRMLASAGELQKGNELALPSKYVNFLYLASHYEKLKGSPEDNEQKQLFVEQHKHYLDEIIEQISEFSKRVILADANLDKVLSAYNKHRDKPIREQAENIIHLFTLTNLGAPAAFKYFDTTIDRKRYTSTKEVLDATLIHQSITGLYETRIDLSQLGGDGGPAPGGSGSSGGTLQLDDEYRLYSPLVKPDQNIQFWLEQFPQAWAETAGMGLAKQVPPQVIQLKASATPVSVRQYPLSKEAQEGIRPHVQRLIQQGILVPVQSPWNTPLLPVRKPGTNDYRPVQDLREVNKRVQDIHPTVPNPYNLLCALPPQRSWYTVLDLKDAFFCLRLHPTSQPLFAFEWRDPGTGRTGQLTWTRLPQGFKNSPTIFDEALHRDLANFRIQHPQVTLLQYVDDLLLAGATKQDCLEGTKALLLELSDLGYRASAKKAQICRREVTYLGYSLRDGQRWLTEARKKTVVQIPAPTTAKQVREFLGTAGFCRLWIPGFATLAAPLYPLTKEKGEFSWAPEHQKAFDAIKKALLSAPALALPDVTKPFTLYVDERKGVARGVLTQTLGPWRRPVAYLSKKLDPVASGWPVCLKAIAAVAILVKDADKLTLGQNITVIAPHALENIVRQPPDRWMTNARMTHYQSLLLTERVTFAPPAALNPATLLPEETDEPVTHDCHQLLIEETGVRKDLTDIPLTGEVLTWFTDGSSYVVEGKRMAGAAVVDGTRTIWASSLPEGTSAQKAELMALTQALRLAEGKSINIYTDSRYAFATAHVHGAIYKQRGLLTSAGREIKNKEEILSLLEALHLPKRLAIIHCPGHQKAKDPISRGNQMADRVAKQAAQGVNLLAGKRTADGSEFEKRTADGSEFESPKKKAKVE

SEQ ID NO: 282 - protein, 2087 aa, synthetic construct
MPAAKRVKLDGGDKKYSIGLDIGTNSVGWAVITDEYKVPSKKFKVLGNTDRHSIKKNLIGALLFDSGETAEATRLKRTARRRYTRRKNRICYLQEIFSNEMAKVDDSFFHRLEESFLVEEDKKHERHPIFGNIVDEVAYHEKYPTIYHLRKKLVDSTDKADLRLIYLALAHMIKFRGHFLIEGDLNPDNSDVDKLFIQLVQTYNQLFEENPINASGVDAKAILSARLSKSRRLENLIAQLPGEKKNGLFGNLIALSLGLTPNFKSNFDLAEDAKLQLSKDTYDDDLDNLLAQIGDQYADLFLAAKNLSDAILLSDILRVNTEITKAPLSASMIKRYDEHHQDLTLLKALVRQQLPEKYKEIFFDQSKNGYAGYIDGGASQEEFYKFIKPILEKMDGTEELLVKLNREDLLRKQRTFDNGSIPHQIHLGELHAILRRQEDFYPFLKDNREKIEKILTFRIPYYVGPLARGNSRFAWMTRKSEETITPWNFEEVVDKGASAQSFIERMTNFDKNLPNEKVLPKHSLLYEYFTVYNELTKVKYVTEGMRKPAFLSGEQKKAIVDLLFKTNRKVTVKQLKEDYFKKIECFDSVEISGVEDRFNASLGTYHDLLKIIKDKDFLDNEENEDILEDIVLTLTLFEDREMIEERLKTYAHLFDDKVMKQLKRRRYTGWGRLSRKLINGIRDKQSGKTILDFLKSDGFANRNFMQLIHDDSLTFKEDIQKAQVSGQGDSLHEHIANLAGSPAIKKGILQTVKVVDELVKVMGRHKPENIVIEMARENQTTQKGQKNSRERMKRIEEGIKELGSQILKEHPVENTQLQNEKLYLYYLQNGRDMYVDQELDINRLSDYDVDHIVPQSFLKDDSIDNKVLTRSDKARGKSDNVPSEEVVKKMKNYWRQLLNAKLITQRKFDNLTKAERGGLSELDKAGFIKRQLVETRQITKHVAQILDSRMNTKYDENDKLIREVKVITLKSKLVSDFRKDFQFYKVREINNYHHAHDAYLNAVVGTALIKKYPKLESEFVYGDYKVYDVRKMIAKSEQEIGKATAKYFFYSNIMNFFKTEITLANGEIRKRPLIETNGETGEIVWDKGRDFATVRKVLSMPQVNIVKKTEVQTGGFSKESILPKRNSDKLIARKKDWDPKKYGGFDSPTVAYSVLVVAKVEKGKSKKLKSVKELLGITIMERSSFEKNPIDFLEAKGYKEVKKDLIIKLPKYSLFELENGRKRMLASAGELQKGNELALPSKYVNFLYLASHYEKLKGSPEDNEQKQLFVEQHKHYLDEIIEQISEFSKRVILADANLDKVLSAYNKHRDKPIREQAENIIHLFTLTNLGAPAAFKYFDTTIDRKRYTSTKEVLDATLIHQSITGLYETRIDLSQLGGDGGEAAAKGGGGGTLQLDDEYRLYSPLVKPDQNIQFWLEQFPQAWAETAGMGLAKQVPPQVIQLKASATPVSVRQYPLSKEAQEGIRPHVQRLIQQGILVPVQSPWNTPLLPVRKPGTNDYRPVQDLREVNKRVQDIHPTVPNPYNLLCALPPQRSWYTVLDLKDAFFCLRLHPTSQPLFAFEWRDPGTGRTGQLTWTRLPQGFKNSPTIFDEALHRDLANFRIQHPQVTLLQYVDDLLLAGATKQDCLEGTKALLLELSDLGYRASAKKAQICRREVTYLGYSLRDGQRWLTEARKKTVVQIPAPTTAKQVREFLGTAGFCRLWIPGFATLAAPLYPLTKEKGEFSWAPEHQKAFDAIKKALLSAPALALPDVTKPFTLYVDERKGVARGVLTQTLGPWRRPVAYLSKKLDPVASGWPVCLKAIAAVAILVKDADKLTLGQNITVIAPHALENIVRQPPDRWMTNARMTHYQSLLLTERVTFAPPAALNPATLLPEETDEPVTHDCHQLLIEETGVRKDLTDIPLTGEVLTWFTDGSSYVVEGKRMAGAAVVDGTRTIWASSLPEGTSAQKAELMALTQALRLAEGKSINIYTDSRYAFATAHVHGAIYKQRGLLTSAGREIKNKEEILSLLEALHLPKRLAIIHCPGHQKAKDPISRGNQMADRVAKQAAQGVNLLAGKRTADGSEFEKRTADGSEFESPKKKAKVE

SEQ ID NO: 283 - protein, 2091 aa, synthetic construct
MPAAKRVKLDGGDKKYSIGLDIGTNSVGWAVITDEYKVPSKKFKVLGNTDRHSIKKNLIGALLFDSGETAEATRLKRTARRRYTRRKNRICYLQEIFSNEMAKVDDSFFHRLEESFLVEEDKKHERHPIFGNIVDEVAYHEKYPTIYHLRKKLVDSTDKADLRLIYLALAHMIKFRGHFLIEGDLNPDNSDVDKLFIQLVQTYNQLFEENPINASGVDAKAILSARLSKSRRLENLIAQLPGEKKNGLFGNLIALSLGLTPNFKSNFDLAEDAKLQLSKDTYDDDLDNLLAQIGDQYADLFLAAKNLSDAILLSDILRVNTEITKAPLSASMIKRYDEHHQDLTLLKALVRQQLPEKYKEIFFDQSKNGYAGYIDGGASQEEFYKFIKPILEKMDGTEELLVKLNREDLLRKQRTFDNGSIPHQIHLGELHAILRRQEDFYPFLKDNREKIEKILTFRIPYYVGPLARGNSRFAWMTRKSEETITPWNFEEVVDKGASAQSFIERMTNFDKNLPNEKVLPKHSLLYEYFTVYNELTKVKYVTEGMRKPAFLSGEQKKAIVDLLFKTNRKVTVKQLKEDYFKKIECFDSVEISGVEDRFNASLGTYHDLLKIIKDKDFLDNEENEDILEDIVLTLTLFEDREMIEERLKTYAHLFDDKVMKQLKRRRYTGWGRLSRKLINGIRDKQSGKTILDFLKSDGFANRNFMQLIHDDSLTFKEDIQKAQVSGQGDSLHEHIANLAGSPAIKKGILQTVKVVDELVKVMGRHKPENIVIEMARENQTTQKGQKNSRERMKRIEEGIKELGSQILKEHPVENTQLQNEKLYLYYLQNGRDMYVDQELDINRLSDYDVDHIVPQSFLKDDSIDNKVLTRSDKARGKSDNVPSEEVVKKMKNYWRQLLNAKLITQRKFDNLTKAERGGLSELDKAGFIKRQLVETRQITKHVAQILDSRMNTKYDENDKLIREVKVITLKSKLVSDFRKDFQFYKVREINNYHHAHDAYLNAVVGTALIKKYPKLESEFVYGDYKVYDVRKMIAKSEQEIGKATAKYFFYSNIMNFFKTEITLANGEIRKRPLIETNGETGEIVWDKGRDFATVRKVLSMPQVNIVKKTEVQTGGFSKESILPKRNSDKLIARKKDWDPKKYGGFDSPTVAYSVLVVAKVEKGKSKKLKSVKELLGITIMERSSFEKNPIDFLEAKGYKEVKKDLIIKLPKYSLFELENGRKRMLASAGELQKGNELALPSKYVNFLYLASHYEKLKGSPEDNEQKQLFVEQHKHYLDEIIEQISEFSKRVILADANLDKVLSAYNKHRDKPIREQAENIIHLFTLTNLGAPAAFKYFDTTIDRKRYTSTKEVLDATLIHQSITGLYETRIDLSQLGGDGGGSAGSAAGSGEFGGTLQLDDEYRLYSPLVKPDQNIQFWLEQFPQAWAETAGMGLAKQVPPQVIQLKASATPVSVRQYPLSKEAQEGIRPHVQRLIQQGILVPVQSPWNTPLLPVRKPGTNDYRPVQDLREVNKRVQDIHPTVPNPYNLLCALPPQRSWYTVLDLKDAFFCLRLHPTSQPLFAFEWRDPGTGRTGQLTWTRLPQGFKNSPTIFDEALHRDLANFRIQHPQVTLLQYVDDLLLAGATKQDCLEGTKALLLELSDLGYRASAKKAQICRREVTYLGYSLRDGQRWLTEARKKTVVQIPAPTTAKQVREFLGTAGFCRLWIPGFATLAAPLYPLTKEKGEFSWAPEHQKAFDAIKKALLSAPALALPDVTKPFTLYVDERKGVARGVLTQTLGPWRRPVAYLSKKLDPVASGWPVCLKAIAAVAILVKDADKLTLGQNITVIAPHALENIVRQPPDRWMTNARMTHYQSLLLTERVTFAPPAALNPATLLPEETDEPVTHDCHQLLIEETGVRKDLTDIPLTGEVLTWFTDGSSYVVEGKRMAGAAVVDGTRTIWASSLPEGTSAQKAELMALTQALRLAEGKSINIYTDSRYAFATAHVHGAIYKQRGLLTSAGREIKNKEEILSLLEALHLPKRLAIIHCPGHQKAKDPISRGNQMADRVAKQAAQGVNLLAGKRTADGSEFEKRTADGSEFESPKKKAKVE

SEQ ID NO: 284 - protein, 2088 aa, synthetic construct
MPAAKRVKLDGGDKKYSIGLDIGTNSVGWAVITDEYKVPSKKFKVLGNTDRHSIKKNLIGALLFDSGETAEATRLKRTARRRYTRRKNRICYLQEIFSNEMAKVDDSFFHRLEESFLVEEDKKHERHPIFGNIVDEVAYHEKYPTIYHLRKKLVDSTDKADLRLIYLALAHMIKFRGHFLIEGDLNPDNSDVDKLFIQLVQTYNQLFEENPINASGVDAKAILSARLSKSRRLENLIAQLPGEKKNGLFGNLIALSLGLTPNFKSNFDLAEDAKLQLSKDTYDDDLDNLLAQIGDQYADLFLAAKNLSDAILLSDILRVNTEITKAPLSASMIKRYDEHHQDLTLLKALVRQQLPEKYKEIFFDQSKNGYAGYIDGGASQEEFYKFIKPILEKMDGTEELLVKLNREDLLRKQRTFDNGSIPHQIHLGELHAILRRQEDFYPFLKDNREKIEKILTFRIPYYVGPLARGNSRFAWMTRKSEETITPWNFEEVVDKGASAQSFIERMTNFDKNLPNEKVLPKHSLLYEYFTVYNELTKVKYVTEGMRKPAFLSGEQKKAIVDLLFKTNRKVTVKQLKEDYFKKIECFDSVEISGVEDRFNASLGTYHDLLKIIKDKDFLDNEENEDILEDIVLTLTLFEDREMIEERLKTYAHLFDDKVMKQLKRRRYTGWGRLSRKLINGIRDKQSGKTILDFLKSDGFANRNFMQLIHDDSLTFKEDIQKAQVSGQGDSLHEHIANLAGSPAIKKGILQTVKVVDELVKVMGRHKPENIVIEMARENQTTQKGQKNSRERMKRIEEGIKELGSQILKEHPVENTQLQNEKLYLYYLQNGRDMYVDQELDINRLSDYDVDHIVPQSFLKDDSIDNKVLTRSDKARGKSDNVPSEEVVKKMKNYWRQLLNAKLITQRKFDNLTKAERGGLSELDKAGFIKRQLVETRQITKHVAQILDSRMNTKYDENDKLIREVKVITLKSKLVSDFRKDFQFYKVREINNYHHAHDAYLNAVVGTALIKKYPKLESEFVYGDYKVYDVRKMIAKSEQEIGKATAKYFFYSNIMNFFKTEITLANGEIRKRPLIETNGETGEIVWDKGRDFATVRKVLSMPQVNIVKKTEVQTGGFSKESILPKRNSDKLIARKKDWDPKKYGGFDSPTVAYSVLVVAKVEKGKSKKLKSVKELLGITIMERSSFEKNPIDFLEAKGYKEVKKDLIIKLPKYSLFELENGRKRMLASAGELQKGNELALPSKYVNFLYLASHYEKLKGSPEDNEQKQLFVEQHKHYLDEIIEQISEFSKRVILADANLDKVLSAYNKHRDKPIREQAENIIHLFTLTNLGAPAAFKYFDTTIDRKRYTSTKEVLDATLIHQSITGLYETRIDLSQLGGDGGGSSGGGGGSGGTLQLDDEYRLYSPLVKPDQNIQFWLEQFPQAWAETAGMGLAKQVPPQVIQLKASATPVSVRQYPLSKEAQEGIRPHVQRLIQQGILVPVQSPWNTPLLPVRKPGTNDYRPVQDLREVNKRVQDIHPTVPNPYNLLCALPPQRSWYTVLDLKDAFFCLRLHPTSQPLFAFEWRDPGTGRTGQLTWTRLPQGFKNSPTIFDEALHRDLANFRIQHPQVTLLQYVDDLLLAGATKQDCLEGTKALLLELSDLGYRASAKKAQICRREVTYLGYSLRDGQRWLTEARKKTVVQIPAPTTAKQVREFLGTAGFCRLWIPGFATLAAPLYPLTKEKGEFSWAPEHQKAFDAIKKALLSAPALALPDVTKPFTLYVDERKGVARGVLTQTLGPWRRPVAYLSKKLDPVASGWPVCLKAIAAVAILVKDADKLTLGQNITVIAPHALENIVRQPPDRWMTNARMTHYQSLLLTERVTFAPPAALNPATLLPEETDEPVTHDCHQLLIEETGVRKDLTDIPLTGEVLTWFTDGSSYVVEGKRMAGAAVVDGTRTIWASSLPEGTSAQKAELMALTQALRLAEGKSINIYTDSRYAFATAHVHGAIYKQRGLLTSAGREIKNKEEILSLLEALHLPKRLAIIHCPGHQKAKDPISRGNQMADRVAKQAAQGVNLLAGKRTADGSEFEKRTADGSEFESPKKKAKVE

SEQ ID NO: 285 - protein, 2090 aa, synthetic construct
MPAAKRVKLDGGDKKYSIGLDIGTNSVGWAVITDEYKVPSKKFKVLGNTDRHSIKKNLIGALLFDSGETAEATRLKRTARRRYTRRKNRICYLQEIFSNEMAKVDDSFFHRLEESFLVEEDKKHERHPIFGNIVDEVAYHEKYPTIYHLRKKLVDSTDKADLRLIYLALAHMIKFRGHFLIEGDLNPDNSDVDKLFIQLVQTYNQLFEENPINASGVDAKAILSARLSKSRRLENLIAQLPGEKKNGLFGNLIALSLGLTPNFKSNFDLAEDAKLQLSKDTYDDDLDNLLAQIGDQYADLFLAAKNLSDAILLSDILRVNTEITKAPLSASMIKRYDEHHQDLTLLKALVRQQLPEKYKEIFFDQSKNGYAGYIDGGASQEEFYKFIKPILEKMDGTEELLVKLNREDLLRKQRTFDNGSIPHQIHLGELHAILRRQEDFYPFLKDNREKIEKILTFRIPYYVGPLARGNSRFAWMTRKSEETITPWNFEEVVDKGASAQSFIERMTNFDKNLPNEKVLPKHSLLYEYFTVYNELTKVKYVTEGMRKPAFLSGEQKKAIVDLLFKTNRKVTVKQLKEDYFKKIECFDSVEISGVEDRFNASLGTYHDLLKIIKDKDFLDNEENEDILEDIVLTLTLFEDREMIEERLKTYAHLFDDKVMKQLKRRRYTGWGRLSRKLINGIRDKQSGKTILDFLKSDGFANRNFMQLIHDDSLTFKEDIQKAQVSGQGDSLHEHIANLAGSPAIKKGILQTVKVVDELVKVMGRHKPENIVIEMARENQTTQKGQKNSRERMKRIEEGIKELGSQILKEHPVENTQLQNEKLYLYYLQNGRDMYVDQELDINRLSDYDVDHIVPQSFLKDDSIDNKVLTRSDKARGKSDNVPSEEVVKKMKNYWRQLLNAKLITQRKFDNLTKAERGGLSELDKAGFIKRQLVETRQITKHVAQILDSRMNTKYDENDKLIREVKVITLKSKLVSDFRKDFQFYKVREINNYHHAHDAYLNAVVGTALIKKYPKLESEFVYGDYKVYDVRKMIAKSEQEIGKATAKYFFYSNIMNFFKTEITLANGEIRKRPLIETNGETGEIVWDKGRDFATVRKVLSMPQVNIVKKTEVQTGGFSKESILPKRNSDKLIARKKDWDPKKYGGFDSPTVAYSVLVVAKVEKGKSKKLKSVKELLGITIMERSSFEKNPIDFLEAKGYKEVKKDLIIKLPKYSLFELENGRKRMLASAGELQKGNELALPSKYVNFLYLASHYEKLKGSPEDNEQKQLFVEQHKHYLDEIIEQISEFSKRVILADANLDKVLSAYNKHRDKPIREQAENIIHLFTLTNLGAPAAFKYFDTTIDRKRYTSTKEVLDATLIHQSITGLYETRIDLSQLGGDGGGSSEAAAKGGGGGTLQLDDEYRLYSPLVKPDQNIQFWLEQFPQAWAETAGMGLAKQVPPQVIQLKASATPVSVRQYPLSKEAQEGIRPHVQRLIQQGILVPVQSPWNTPLLPVRKPGTNDYRPVQDLREVNKRVQDIHPTVPNPYNLLCALPPQRSWYTVLDLKDAFFCLRLHPTSQPLFAFEWRDPGTGRTGQLTWTRLPQGFKNSPTIFDEALHRDLANFRIQHPQVTLLQYVDDLLLAGATKQDCLEGTKALLLELSDLGYRASAKKAQICRREVTYLGYSLRDGQRWLTEARKKTVVQIPAPTTAKQVREFLGTAGFCRLWIPGFATLAAPLYPLTKEKGEFSWAPEHQKAFDAIKKALLSAPALALPDVTKPFTLYVDERKGVARGVLTQTLGPWRRPVAYLSKKLDPVASGWPVCLKAIAAVAILVKDADKLTLGQNITVIAPHALENIVRQPPDRWMTNARMTHYQSLLLTERVTFAPPAALNPATLLPEETDEPVTHDCHQLLIEETGVRKDLTDIPLTGEVLTWFTDGSSYVVEGKRMAGAAVVDGTRTIWASSLPEGTSAQKAELMALTQALRLAEGKSINIYTDSRYAFATAHVHGAIYKQRGLLTSAGREIKNKEEILSLLEALHLPKRLAIIHCPGHQKAKDPISRGNQMADRVAKQAAQGVNLLAGKRTADGSEFEKRTADGSEFESPKKKAKVE

SEQ ID NO: 286 - protein, 2090 aa, synthetic construct
MPAAKRVKLDGGDKKYSIGLDIGTNSVGWAVITDEYKVPSKKFKVLGNTDRHSIKKNLIGALLFDSGETAEATRLKRTARRRYTRRKNRICYLQEIFSNEMAKVDDSFFHRLEESFLVEEDKKHERHPIFGNIVDEVAYHEKYPTIYHLRKKLVDSTDKADLRLIYLALAHMIKFRGHFLIEGDLNPDNSDVDKLFIQLVQTYNQLFEENPINASGVDAKAILSARLSKSRRLENLIAQLPGEKKNGLFGNLIALSLGLTPNFKSNFDLAEDAKLQLSKDTYDDDLDNLLAQIGDQYADLFLAAKNLSDAILLSDILRVNTEITKAPLSASMIKRYDEHHQDLTLLKALVRQQLPEKYKEIFFDQSKNGYAGYIDGGASQEEFYKFIKPILEKMDGTEELLVKLNREDLLRKQRTFDNGSIPHQIHLGELHAILRRQEDFYPFLKDNREKIEKILTFRIPYYVGPLARGNSRFAWMTRKSEETITPWNFEEVVDKGASAQSFIERMTNFDKNLPNEKVLPKHSLLYEYFTVYNELTKVKYVTEGMRKPAFLSGEQKKAIVDLLFKTNRKVTVKQLKEDYFKKIECFDSVEISGVEDRFNASLGTYHDLLKIIKDKDFLDNEENEDILEDIVLTLTLFEDREMIEERLKTYAHLFDDKVMKQLKRRRYTGWGRLSRKLINGIRDKQSGKTILDFLKSDGFANRNFMQLIHDDSLTFKEDIQKAQVSGQGDSLHEHIANLAGSPAIKKGILQTVKVVDELVKVMGRHKPENIVIEMARENQTTQKGQKNSRERMKRIEEGIKELGSQILKEHPVENTQLQNEKLYLYYLQNGRDMYVDQELDINRLSDYDVDHIVPQSFLKDDSIDNKVLTRSDKARGKSDNVPSEEVVKKMKNYWRQLLNAKLITQRKFDNLTKAERGGLSELDKAGFIKRQLVETRQITKHVAQILDSRMNTKYDENDKLIREVKVITLKSKLVSDFRKDFQFYKVREINNYHHAHDAYLNAVVGTALIKKYPKLESEFVYGDYKVYDVRKMIAKSEQEIGKATAKYFFYSNIMNFFKTEITLANGEIRKRPLIETNGETGEIVWDKGRDFATVRKVLSMPQVNIVKKTEVQTGGFSKESILPKRNSDKLIARKKDWDPKKYGGFDSPTVAYSVLVVAKVEKGKSKKLKSVKELLGITIMERSSFEKNPIDFLEAKGYKEVKKDLIIKLPKYSLFELENGRKRMLASAGELQKGNELALPSKYVNFLYLASHYEKLKGSPEDNEQKQLFVEQHKHYLDEIIEQISEFSKRVILADANLDKVLSAYNKHRDKPIREQAENIIHLFTLTNLGAPAAFKYFDTTIDRKRYTSTKEVLDATLIHQSITGLYETRIDLSQLGGDGGGGSGGGEAAAKGGTLQLDDEYRLYSPLVKPDQNIQFWLEQFPQAWAETAGMGLAKQVPPQVIQLKASATPVSVRQYPLSKEAQEGIRPHVQRLIQQGILVPVQSPWNTPLLPVRKPGTNDYRPVQDLREVNKRVQDIHPTVPNPYNLLCALPPQRSWYTVLDLKDAFFCLRLHPTSQPLFAFEWRDPGTGRTGQLTWTRLPQGFKNSPTIFDEALHRDLANFRIQHPQVTLLQYVDDLLLAGATKQDCLEGTKALLLELSDLGYRASAKKAQICRREVTYLGYSLRDGQRWLTEARKKTVVQIPAPTTAKQVREFLGTAGFCRLWIPGFATLAAPLYPLTKEKGEFSWAPEHQKAFDAIKKALLSAPALALPDVTKPFTLYVDERKGVARGVLTQTLGPWRRPVAYLSKKLDPVASGWPVCLKAIAAVAILVKDADKLTLGQNITVIAPHALENIVRQPPDRWMTNARMTHYQSLLLTERVTFAPPAALNPATLLPEETDEPVTHDCHQLLIEETGVRKDLTDIPLTGEVLTWFTDGSSYVVEGKRMAGAAVVDGTRTIWASSLPEGTSAQKAELMALTQALRLAEGKSINIYTDSRYAFATAHVHGAIYKQRGLLTSAGREIKNKEEILSLLEALHLPKRLAIIHCPGHQKAKDPISRGNQMADRVAKQAAQGVNLLAGKRTADGSEFEKRTADGSEFESPKKKAKVE

SEQ ID NO: 287 - protein, 2090 aa, synthetic construct
MPAAKRVKLDGGDKKYSIGLDIGTNSVGWAVITDEYKVPSKKFKVLGNTDRHSIKKNLIGALLFDSGETAEATRLKRTARRRYTRRKNRICYLQEIFSNEMAKVDDSFFHRLEESFLVEEDKKHERHPIFGNIVDEVAYHEKYPTIYHLRKKLVDSTDKADLRLIYLALAHMIKFRGHFLIEGDLNPDNSDVDKLFIQLVQTYNQLFEENPINASGVDAKAILSARLSKSRRLENLIAQLPGEKKNGLFGNLIALSLGLTPNFKSNFDLAEDAKLQLSKDTYDDDLDNLLAQIGDQYADLFLAAKNLSDAILLSDILRVNTEITKAPLSASMIKRYDEHHQDLTLLKALVRQQLPEKYKEIFFDQSKNGYAGYIDGGASQEEFYKFIKPILEKMDGTEELLVKLNREDLLRKQRTFDNGSIPHQIHLGELHAILRRQEDFYPFLKDNREKIEKILTFRIPYYVGPLARGNSRFAWMTRKSEETITPWNFEEVVDKGASAQSFIERMTNFDKNLPNEKVLPKHSLLYEYFTVYNELTKVKYVTEGMRKPAFLSGEQKKAIVDLLFKTNRKVTVKQLKEDYFKKIECFDSVEISGVEDRFNASLGTYHDLLKIIKDKDFLDNEENEDILEDIVLTLTLFEDREMIEERLKTYAHLFDDKVMKQLKRRRYTGWGRLSRKLINGIRDKQSGKTILDFLKSDGFANRNFMQLIHDDSLTFKEDIQKAQVSGQGDSLHEHIANLAGSPAIKKGILQTVKVVDELVKVMGRHKPENIVIEMARENQTTQKGQKNSRERMKRIEEGIKELGSQILKEHPVENTQLQNEKLYLYYLQNGRDMYVDQELDINRLSDYDVDHIVPQSFLKDDSIDNKVLTRSDKARGKSDNVPSEEVVKKMKNYWRQLLNAKLITQRKFDNLTKAERGGLSELDKAGFIKRQLVETRQITKHVAQILDSRMNTKYDENDKLIREVKVITLKSKLVSDFRKDFQFYKVREINNYHHAHDAYLNAVVGTALIKKYPKLESEFVYGDYKVYDVRKMIAKSEQEIGKATAKYFFYSNIMNFFKTEITLANGEIRKRPLIETNGETGEIVWDKGRDFATVRKVLSMPQVNIVKKTEVQTGGFSKESILPKRNSDKLIARKKDWDPKKYGGFDSPTVAYSVLVVAKVEKGKSKKLKSVKELLGITIMERSSFEKNPIDFLEAKGYKEVKKDLIIKLPKYSLFELENGRKRMLASAGELQKGNELALPSKYVNFLYLASHYEKLKGSPEDNEQKQLFVEQHKHYLDEIIEQISEFSKRVILADANLDKVLSAYNKHRDKPIREQAENIIHLFTLTNLGAPAAFKYFDTTIDRKRYTSTKEVLDATLIHQSITGLYETRIDLSQLGGDGGEAAAKPAPGGSGGTLQLDDEYRLYSPLVKPDQNIQFWLEQFPQAWAETAGMGLAKQVPPQVIQLKASATPVSVRQYPLSKEAQEGIRPHVQRLIQQGILVPVQSPWNTPLLPVRKPGTNDYRPVQDLREVNKRVQDIHPTVPNPYNLLCALPPQRSWYTVLDLKDAFFCLRLHPTSQPLFAFEWRDPGTGRTGQLTWTRLPQGFKNSPTIFDEALHRDLANFRIQHPQVTLLQYVDDLLLAGATKQDCLEGTKALLLELSDLGYRASAKKAQICRREVTYLGYSLRDGQRWLTEARKKTVVQIPAPTTAKQVREFLGTAGFCRLWIPGFATLAAPLYPLTKEKGEFSWAPEHQKAFDAIKKALLSAPALALPDVTKPFTLYVDERKGVARGVLTQTLGPWRRPVAYLSKKLDPVASGWPVCLKAIAAVAILVKDADKLTLGQNITVIAPHALENIVRQPPDRWMTNARMTHYQSLLLTERVTFAPPAALNPATLLPEETDEPVTHDCHQLLIEETGVRKDLTDIPLTGEVLTWFTDGSSYVVEGKRMAGAAVVDGTRTIWASSLPEGTSAQKAELMALTQALRLAEGKSINIYTDSRYAFATAHVHGAIYKQRGLLTSAGREIKNKEEILSLLEALHLPKRLAIIHCPGHQKAKDPISRGNQMADRVAKQAAQGVNLLAGKRTADGSEFEKRTADGSEFESPKKKAKVE

SEQ ID NO: 288 - protein, 2090 aa, synthetic construct
MPAAKRVKLDGGDKKYSIGLDIGTNSVGWAVITDEYKVPSKKFKVLGNTDRHSIKKNLIGALLFDSGETAEATRLKRTARRRYTRRKNRICYLQEIFSNEMAKVDDSFFHRLEESFLVEEDKKHERHPIFGNIVDEVAYHEKYPTIYHLRKKLVDSTDKADLRLIYLALAHMIKFRGHFLIEGDLNPDNSDVDKLFIQLVQTYNQLFEENPINASGVDAKAILSARLSKSRRLENLIAQLPGEKKNGLFGNLIALSLGLTPNFKSNFDLAEDAKLQLSKDTYDDDLDNLLAQIGDQYADLFLAAKNLSDAILLSDILRVNTEITKAPLSASMIKRYDEHHQDLTLLKALVRQQLPEKYKEIFFDQSKNGYAGYIDGGASQEEFYKFIKPILEKMDGTEELLVKLNREDLLRKQRTFDNGSIPHQIHLGELHAILRRQEDFYPFLKDNREKIEKILTFRIPYYVGPLARGNSRFAWMTRKSEETITPWNFEEVVDKGASAQSFIERMTNFDKNLPNEKVLPKHSLLYEYFTVYNELTKVKYVTEGMRKPAFLSGEQKKAIVDLLFKTNRKVTVKQLKEDYFKKIECFDSVEISGVEDRFNASLGTYHDLLKIIKDKDFLDNEENEDILEDIVLTLTLFEDREMIEERLKTYAHLFDDKVMKQLKRRRYTGWGRLSRKLINGIRDKQSGKTILDFLKSDGFANRNFMQLIHDDSLTFKEDIQKAQVSGQGDSLHEHIANLAGSPAIKKGILQTVKVVDELVKVMGRHKPENIVIEMARENQTTQKGQKNSRERMKRIEEGIKELGSQILKEHPVENTQLQNEKLYLYYLQNGRDMYVDQELDINRLSDYDVDHIVPQSFLKDDSIDNKVLTRSDKARGKSDNVPSEEVVKKMKNYWRQLLNAKLITQRKFDNLTKAERGGLSELDKAGFIKRQLVETRQITKHVAQILDSRMNTKYDENDKLIREVKVITLKSKLVSDFRKDFQFYKVREINNYHHAHDAYLNAVVGTALIKKYPKLESEFVYGDYKVYDVRKMIAKSEQEIGKATAKYFFYSNIMNFFKTEITLANGEIRKRPLIETNGETGEIVWDKGRDFATVRKVLSMPQVNIVKKTEVQTGGFSKESILPKRNSDKLIARKKDWDPKKYGGFDSPTVAYSVLVVAKVEKGKSKKLKSVKELLGITIMERSSFEKNPIDFLEAKGYKEVKKDLIIKLPKYSLFELENGRKRMLASAGELQKGNELALPSKYVNFLYLASHYEKLKGSPEDNEQKQLFVEQHKHYLDEIIEQISEFSKRVILADANLDKVLSAYNKHRDKPIREQAENIIHLFTLTNLGAPAAFKYFDTTIDRKRYTSTKEVLDATLIHQSITGLYETRIDLSQLGGDGGEAAAKGGGGGSGGTLQLDDEYRLYSPLVKPDQNIQFWLEQFPQAWAETAGMGLAKQVPPQVIQLKASATPVSVRQYPLSKEAQEGIRPHVQRLIQQGILVPVQSPWNTPLLPVRKPGTNDYRPVQDLREVNKRVQDIHPTVPNPYNLLCALPPQRSWYTVLDLKDAFFCLRLHPTSQPLFAFEWRDPGTGRTGQLTWTRLPQGFKNSPTIFDEALHRDLANFRIQHPQVTLLQYVDDLLLAGATKQDCLEGTKALLLELSDLGYRASAKKAQICRREVTYLGYSLRDGQRWLTEARKKTVVQIPAPTTAKQVREFLGTAGFCRLWIPGFATLAAPLYPLTKEKGEFSWAPEHQKAFDAIKKALLSAPALALPDVTKPFTLYVDERKGVARGVLTQTLGPWRRPVAYLSKKLDPVASGWPVCLKAIAAVAILVKDADKLTLGQNITVIAPHALENIVRQPPDRWMTNARMTHYQSLLLTERVTFAPPAALNPATLLPEETDEPVTHDCHQLLIEETGVRKDLTDIPLTGEVLTWFTDGSSYVVEGKRMAGAAVVDGTRTIWASSLPEGTSAQKAELMALTQALRLAEGKSINIYTDSRYAFATAHVHGAIYKQRGLLTSAGREIKNKEEILSLLEALHLPKRLAIIHCPGHQKAKDPISRGNQMADRVAKQAAQGVNLLAGKRTADGSEFEKRTADGSEFESPKKKAKVE

SEQ ID NO: 289 - protein, 2082 aa, synthetic construct
MPAAKRVKLDGGDKKYSIGLDIGTNSVGWAVITDEYKVPSKKFKVLGNTDRHSIKKNLIGALLFDSGETAEATRLKRTARRRYTRRKNRICYLQEIFSNEMAKVDDSFFHRLEESFLVEEDKKHERHPIFGNIVDEVAYHEKYPTIYHLRKKLVDSTDKADLRLIYLALAHMIKFRGHFLIEGDLNPDNSDVDKLFIQLVQTYNQLFEENPINASGVDAKAILSARLSKSRRLENLIAQLPGEKKNGLFGNLIALSLGLTPNFKSNFDLAEDAKLQLSKDTYDDDLDNLLAQIGDQYADLFLAAKNLSDAILLSDILRVNTEITKAPLSASMIKRYDEHHQDLTLLKALVRQQLPEKYKEIFFDQSKNGYAGYIDGGASQEEFYKFIKPILEKMDGTEELLVKLNREDLLRKQRTFDNGSIPHQIHLGELHAILRRQEDFYPFLKDNREKIEKILTFRIPYYVGPLARGNSRFAWMTRKSEETITPWNFEEVVDKGASAQSFIERMTNFDKNLPNEKVLPKHSLLYEYFTVYNELTKVKYVTEGMRKPAFLSGEQKKAIVDLLFKTNRKVTVKQLKEDYFKKIECFDSVEISGVEDRFNASLGTYHDLLKIIKDKDFLDNEENEDILEDIVLTLTLFEDREMIEERLKTYAHLFDDKVMKQLKRRRYTGWGRLSRKLINGIRDKQSGKTILDFLKSDGFANRNFMQLIHDDSLTFKEDIQKAQVSGQGDSLHEHIANLAGSPAIKKGILQTVKVVDELVKVMGRHKPENIVIEMARENQTTQKGQKNSRERMKRIEEGIKELGSQILKEHPVENTQLQNEKLYLYYLQNGRDMYVDQELDINRLSDYDVDHIVPQSFLKDDSIDNKVLTRSDKARGKSDNVPSEEVVKKMKNYWRQLLNAKLITQRKFDNLTKAERGGLSELDKAGFIKRQLVETRQITKHVAQILDSRMNTKYDENDKLIREVKVITLKSKLVSDFRKDFQFYKVREINNYHHAHDAYLNAVVGTALIKKYPKLESEFVYGDYKVYDVRKMIAKSEQEIGKATAKYFFYSNIMNFFKTEITLANGEIRKRPLIETNGETGEIVWDKGRDFATVRKVLSMPQVNIVKKTEVQTGGFSKESILPKRNSDKLIARKKDWDPKKYGGFDSPTVAYSVLVVAKVEKGKSKKLKSVKELLGITIMERSSFEKNPIDFLEAKGYKEVKKDLIIKLPKYSLFELENGRKRMLASAGELQKGNELALPSKYVNFLYLASHYEKLKGSPEDNEQKQLFVEQHKHYLDEIIEQISEFSKRVILADANLDKVLSAYNKHRDKPIREQAENIIHLFTLTNLGAPAAFKYFDTTIDRKRYTSTKEVLDATLIHQSITGLYETRIDLSQLGGDGGGGGGGTLQLDDEYRLYSPLVKPDQNIQFWLEQFPQAWAETAGMGLAKQVPPQVIQLKASATPVSVRQYPLSKEAQEGIRPHVQRLIQQGILVPVQSPWNTPLLPVRKPGTNDYRPVQDLREVNKRVQDIHPTVPNPYNLLCALPPQRSWYTVLDLKDAFFCLRLHPTSQPLFAFEWRDPGTGRTGQLTWTRLPQGFKNSPTIFDEALHRDLANFRIQHPQVTLLQYVDDLLLAGATKQDCLEGTKALLLELSDLGYRASAKKAQICRREVTYLGYSLRDGQRWLTEARKKTVVQIPAPTTAKQVREFLGTAGFCRLWIPGFATLAAPLYPLTKEKGEFSWAPEHQKAFDAIKKALLSAPALALPDVTKPFTLYVDERKGVARGVLTQTLGPWRRPVAYLSKKLDPVASGWPVCLKAIAAVAILVKDADKLTLGQNITVIAPHALENIVRQPPDRWMTNARMTHYQSLLLTERVTFAPPAALNPATLLPEETDEPVTHDCHQLLIEETGVRKDLTDIPLTGEVLTWFTDGSSYVVEGKRMAGAAVVDGTRTIWASSLPEGTSAQKAELMALTQALRLAEGKSINIYTDSRYAFATAHVHGAIYKQRGLLTSAGREIKNKEEILSLLEALHLPKRLAIIHCPGHQKAKDPISRGNQMADRVAKQAAQGVNLLAGKRTADGSEFEKRTADGSEFESPKKKAKVE

SEQ ID NO: 290 - protein, 2090 aa, synthetic construct
MPAAKRVKLDGGDKKYSIGLDIGTNSVGWAVITDEYKVPSKKFKVLGNTDRHSIKKNLIGALLFDSGETAEATRLKRTARRRYTRRKNRICYLQEIFSNEMAKVDDSFFHRLEESFLVEEDKKHERHPIFGNIVDEVAYHEKYPTIYHLRKKLVDSTDKADLRLIYLALAHMIKFRGHFLIEGDLNPDNSDVDKLFIQLVQTYNQLFEENPINASGVDAKAILSARLSKSRRLENLIAQLPGEKKNGLFGNLIALSLGLTPNFKSNFDLAEDAKLQLSKDTYDDDLDNLLAQIGDQYADLFLAAKNLSDAILLSDILRVNTEITKAPLSASMIKRYDEHHQDLTLLKALVRQQLPEKYKEIFFDQSKNGYAGYIDGGASQEEFYKFIKPILEKMDGTEELLVKLNREDLLRKQRTFDNGSIPHQIHLGELHAILRRQEDFYPFLKDNREKIEKILTFRIPYYVGPLARGNSRFAWMTRKSEETITPWNFEEVVDKGASAQSFIERMTNFDKNLPNEKVLPKHSLLYEYFTVYNELTKVKYVTEGMRKPAFLSGEQKKAIVDLLFKTNRKVTVKQLKEDYFKKIECFDSVEISGVEDRFNASLGTYHDLLKIIKDKDFLDNEENEDILEDIVLTLTLFEDREMIEERLKTYAHLFDDKVMKQLKRRRYTGWGRLSRKLINGIRDKQSGKTILDFLKSDGFANRNFMQLIHDDSLTFKEDIQKAQVSGQGDSLHEHIANLAGSPAIKKGILQTVKVVDELVKVMGRHKPENIVIEMARENQTTQKGQKNSRERMKRIEEGIKELGSQILKEHPVENTQLQNEKLYLYYLQNGRDMYVDQELDINRLSDYDVDHIVPQSFLKDDSIDNKVLTRSDKARGKSDNVPSEEVVKKMKNYWRQLLNAKLITQRKFDNLTKAERGGLSELDKAGFIKRQLVETRQITKHVAQILDSRMNTKYDENDKLIREVKVITLKSKLVSDFRKDFQFYKVREINNYHHAHDAYLNAVVGTALIKKYPKLESEFVYGDYKVYDVRKMIAKSEQEIGKATAKYFFYSNIMNFFKTEITLANGEIRKRPLIETNGETGEIVWDKGRDFATVRKVLSMPQVNIVKKTEVQTGGFSKESILPKRNSDKLIARKKDWDPKKYGGFDSPTVAYSVLVVAKVEKGKSKKLKSVKELLGITIMERSSFEKNPIDFLEAKGYKEVKKDLIIKLPKYSLFELENGRKRMLASAGELQKGNELALPSKYVNFLYLASHYEKLKGSPEDNEQKQLFVEQHKHYLDEIIEQISEFSKRVILADANLDKVLSAYNKHRDKPIREQAENIIHLFTLTNLGAPAAFKYFDTTIDRKRYTSTKEVLDATLIHQSITGLYETRIDLSQLGGDGGEAAAKGGGGSSGGTLQLDDEYRLYSPLVKPDQNIQFWLEQFPQAWAETAGMGLAKQVPPQVIQLKASATPVSVRQYPLSKEAQEGIRPHVQRLIQQGILVPVQSPWNTPLLPVRKPGTNDYRPVQDLREVNKRVQDIHPTVPNPYNLLCALPPQRSWYTVLDLKDAFFCLRLHPTSQPLFAFEWRDPGTGRTGQLTWTRLPQGFKNSPTIFDEALHRDLANFRIQHPQVTLLQYVDDLLLAGATKQDCLEGTKALLLELSDLGYRASAKKAQICRREVTYLGYSLRDGQRWLTEARKKTVVQIPAPTTAKQVREFLGTAGFCRLWIPGFATLAAPLYPLTKEKGEFSWAPEHQKAFDAIKKALLSAPALALPDVTKPFTLYVDERKGVARGVLTQTLGPWRRPVAYLSKKLDPVASGWPVCLKAIAAVAILVKDADKLTLGQNITVIAPHALENIVRQPPDRWMTNARMTHYQSLLLTERVTFAPPAALNPATLLPEETDEPVTHDCHQLLIEETGVRKDLTDIPLTGEVLTWFTDGSSYVVEGKRMAGAAVVDGTRTIWASSLPEGTSAQKAELMALTQALRLAEGKSINIYTDSRYAFATAHVHGAIYKQRGLLTSAGREIKNKEEILSLLEALHLPKRLAIIHCPGHQKAKDPISRGNQMADRVAKQAAQGVNLLAGKRTADGSEFEKRTADGSEFESPKKKAKVE

SEQ ID NO: 291 - protein, 2083 aa, synthetic construct
MPAAKRVKLDGGDKKYSIGLDIGTNSVGWAVITDEYKVPSKKFKVLGNTDRHSIKKNLIGALLFDSGETAEATRLKRTARRRYTRRKNRICYLQEIFSNEMAKVDDSFFHRLEESFLVEEDKKHERHPIFGNIVDEVAYHEKYPTIYHLRKKLVDSTDKADLRLIYLALAHMIKFRGHFLIEGDLNPDNSDVDKLFIQLVQTYNQLFEENPINASGVDAKAILSARLSKSRRLENLIAQLPGEKKNGLFGNLIALSLGLTPNFKSNFDLAEDAKLQLSKDTYDDDLDNLLAQIGDQYADLFLAAKNLSDAILLSDILRVNTEITKAPLSASMIKRYDEHHQDLTLLKALVRQQLPEKYKEIFFDQSKNGYAGYIDGGASQEEFYKFIKPILEKMDGTEELLVKLNREDLLRKQRTFDNGSIPHQIHLGELHAILRRQEDFYPFLKDNREKIEKILTFRIPYYVGPLARGNSRFAWMTRKSEETITPWNFEEVVDKGASAQSFIERMTNFDKNLPNEKVLPKHSLLYEYFTVYNELTKVKYVTEGMRKPAFLSGEQKKAIVDLLFKTNRKVTVKQLKEDYFKKIECFDSVEISGVEDRFNASLGTYHDLLKIIKDKDFLDNEENEDILEDIVLTLTLFEDREMIEERLKTYAHLFDDKVMKQLKRRRYTGWGRLSRKLINGIRDKQSGKTILDFLKSDGFANRNFMQLIHDDSLTFKEDIQKAQVSGQGDSLHEHIANLAGSPAIKKGILQTVKVVDELVKVMGRHKPENIVIEMARENQTTQKGQKNSRERMKRIEEGIKELGSQILKEHPVENTQLQNEKLYLYYLQNGRDMYVDQELDINRLSDYDVDHIVPQSFLKDDSIDNKVLTRSDKARGKSDNVPSEEVVKKMKNYWRQLLNAKLITQRKFDNLTKAERGGLSELDKAGFIKRQLVETRQITKHVAQILDSRMNTKYDENDKLIREVKVITLKSKLVSDFRKDFQFYKVREINNYHHAHDAYLNAVVGTALIKKYPKLESEFVYGDYKVYDVRKMIAKSEQEIGKATAKYFFYSNIMNFFKTEITLANGEIRKRPLIETNGETGEIVWDKGRDFATVRKVLSMPQVNIVKKTEVQTGGFSKESILPKRNSDKLIARKKDWDPKKYGGFDSPTVAYSVLVVAKVEKGKSKKLKSVKELLGITIMERSSFEKNPIDFLEAKGYKEVKKDLIIKLPKYSLFELENGRKRMLASAGELQKGNELALPSKYVNFLYLASHYEKLKGSPEDNEQKQLFVEQHKHYLDEIIEQISEFSKRVILADANLDKVLSAYNKHRDKPIREQAENIIHLFTLTNLGAPAAFKYFDTTIDRKRYTSTKEVLDATLIHQSITGLYETRIDLSQLGGDGGGGGGGGTLQLDDEYRLYSPLVKPDQNIQFWLEQFPQAWAETAGMGLAKQVPPQVIQLKASATPVSVRQYPLSKEAQEGIRPHVQRLIQQGILVPVQSPWNTPLLPVRKPGTNDYRPVQDLREVNKRVQDIHPTVPNPYNLLCALPPQRSWYTVLDLKDAFFCLRLHPTSQPLFAFEWRDPGTGRTGQLTWTRLPQGFKNSPTIFDEALHRDLANFRIQHPQVTLLQYVDDLLLAGATKQDCLEGTKALLLELSDLGYRASAKKAQICRREVTYLGYSLRDGQRWLTEARKKTVVQIPAPTTAKQVREFLGTAGFCRLWIPGFATLAAPLYPLTKEKGEFSWAPEHQKAFDAIKKALLSAPALALPDVTKPFTLYVDERKGVARGVLTQTLGPWRRPVAYLSKKLDPVASGWPVCLKAIAAVAILVKDADKLTLGQNITVIAPHALENIVRQPPDRWMTNARMTHYQSLLLTERVTFAPPAALNPATLLPEETDEPVTHDCHQLLIEETGVRKDLTDIPLTGEVLTWFTDGSSYVVEGKRMAGAAVVDGTRTIWASSLPEGTSAQKAELMALTQALRLAEGKSINIYTDSRYAFATAHVHGAIYKQRGLLTSAGREIKNKEEILSLLEALHLPKRLAIIHCPGHQKAKDPISRGNQMADRVAKQAAQGVNLLAGKRTADGSEFEKRTADGSEFESPKKKAKVE

SEQ ID NO: 292 - protein, 2097 aa, synthetic construct
MPAAKRVKLDGGDKKYSIGLDIGTNSVGWAVITDEYKVPSKKFKVLGNTDRHSIKKNLIGALLFDSGETAEATRLKRTARRRYTRRKNRICYLQEIFSNEMAKVDDSFFHRLEESFLVEEDKKHERHPIFGNIVDEVAYHEKYPTIYHLRKKLVDSTDKADLRLIYLALAHMIKFRGHFLIEGDLNPDNSDVDKLFIQLVQTYNQLFEENPINASGVDAKAILSARLSKSRRLENLIAQLPGEKKNGLFGNLIALSLGLTPNFKSNFDLAEDAKLQLSKDTYDDDLDNLLAQIGDQYADLFLAAKNLSDAILLSDILRVNTEITKAPLSASMIKRYDEHHQDLTLLKALVRQQLPEKYKEIFFDQSKNGYAGYIDGGASQEEFYKFIKPILEKMDGTEELLVKLNREDLLRKQRTFDNGSIPHQIHLGELHAILRRQEDFYPFLKDNREKIEKILTFRIPYYVGPLARGNSRFAWMTRKSEETITPWNFEEVVDKGASAQSFIERMTNFDKNLPNEKVLPKHSLLYEYFTVYNELTKVKYVTEGMRKPAFLSGEQKKAIVDLLFKTNRKVTVKQLKEDYFKKIECFDSVEISGVEDRFNASLGTYHDLLKIIKDKDFLDNEENEDILEDIVLTLTLFEDREMIEERLKTYAHLFDDKVMKQLKRRRYTGWGRLSRKLINGIRDKQSGKTILDFLKSDGFANRNFMQLIHDDSLTFKEDIQKAQVSGQGDSLHEHIANLAGSPAIKKGILQTVKVVDELVKVMGRHKPENIVIEMARENQTTQKGQKNSRERMKRIEEGIKELGSQILKEHPVENTQLQNEKLYLYYLQNGRDMYVDQELDINRLSDYDVDHIVPQSFLKDDSIDNKVLTRSDKARGKSDNVPSEEVVKKMKNYWRQLLNAKLITQRKFDNLTKAERGGLSELDKAGFIKRQLVETRQITKHVAQILDSRMNTKYDENDKLIREVKVITLKSKLVSDFRKDFQFYKVREINNYHHAHDAYLNAVVGTALIKKYPKLESEFVYGDYKVYDVRKMIAKSEQEIGKATAKYFFYSNIMNFFKTEITLANGEIRKRPLIETNGETGEIVWDKGRDFATVRKVLSMPQVNIVKKTEVQTGGFSKESILPKRNSDKLIARKKDWDPKKYGGFDSPTVAYSVLVVAKVEKGKSKKLKSVKELLGITIMERSSFEKNPIDFLEAKGYKEVKKDLIIKLPKYSLFELENGRKRMLASAGELQKGNELALPSKYVNFLYLASHYEKLKGSPEDNEQKQLFVEQHKHYLDEIIEQISEFSKRVILADANLDKVLSAYNKHRDKPIREQAENIIHLFTLTNLGAPAAFKYFDTTIDRKRYTSTKEVLDATLIHQSITGLYETRIDLSQLGGDGGGGSGGSGGSGGSGGSGGSGGTLQLDDEYRLYSPLVKPDQNIQFWLEQFPQAWAETAGMGLAKQVPPQVIQLKASATPVSVRQYPLSKEAQEGIRPHVQRLIQQGILVPVQSPWNTPLLPVRKPGTNDYRPVQDLREVNKRVQDIHPTVPNPYNLLCALPPQRSWYTVLDLKDAFFCLRLHPTSQPLFAFEWRDPGTGRTGQLTWTRLPQGFKNSPTIFDEALHRDLANFRIQHPQVTLLQYVDDLLLAGATKQDCLEGTKALLLELSDLGYRASAKKAQICRREVTYLGYSLRDGQRWLTEARKKTVVQIPAPTTAKQVREFLGTAGFCRLWIPGFATLAAPLYPLTKEKGEFSWAPEHQKAFDAIKKALLSAPALALPDVTKPFTLYVDERKGVARGVLTQTLGPWRRPVAYLSKKLDPVASGWPVCLKAIAAVAILVKDADKLTLGQNITVIAPHALENIVRQPPDRWMTNARMTHYQSLLLTERVTFAPPAALNPATLLPEETDEPVTHDCHQLLIEETGVRKDLTDIPLTGEVLTWFTDGSSYVVEGKRMAGAAVVDGTRTIWASSLPEGTSAQKAELMALTQALRLAEGKSINIYTDSRYAFATAHVHGAIYKQRGLLTSAGREIKNKEEILSLLEALHLPKRLAIIHCPGHQKAKDPISRGNQMADRVAKQAAQGVNLLAGKRTADGSEFEKRTADGSEFESPKKKAKVE

SEQ ID NO: 293 - protein, 2087 aa, synthetic construct
MPAAKRVKLDGGDKKYSIGLDIGTNSVGWAVITDEYKVPSKKFKVLGNTDRHSIKKNLIGALLFDSGETAEATRLKRTARRRYTRRKNRICYLQEIFSNEMAKVDDSFFHRLEESFLVEEDKKHERHPIFGNIVDEVAYHEKYPTIYHLRKKLVDSTDKADLRLIYLALAHMIKFRGHFLIEGDLNPDNSDVDKLFIQLVQTYNQLFEENPINASGVDAKAILSARLSKSRRLENLIAQLPGEKKNGLFGNLIALSLGLTPNFKSNFDLAEDAKLQLSKDTYDDDLDNLLAQIGDQYADLFLAAKNLSDAILLSDILRVNTEITKAPLSASMIKRYDEHHQDLTLLKALVRQQLPEKYKEIFFDQSKNGYAGYIDGGASQEEFYKFIKPILEKMDGTEELLVKLNREDLLRKQRTFDNGSIPHQIHLGELHAILRRQEDFYPFLKDNREKIEKILTFRIPYYVGPLARGNSRFAWMTRKSEETITPWNFEEVVDKGASAQSFIERMTNFDKNLPNEKVLPKHSLLYEYFTVYNELTKVKYVTEGMRKPAFLSGEQKKAIVDLLFKTNRKVTVKQLKEDYFKKIECFDSVEISGVEDRFNASLGTYHDLLKIIKDKDFLDNEENEDILEDIVLTLTLFEDREMIEERLKTYAHLFDDKVMKQLKRRRYTGWGRLSRKLINGIRDKQSGKTILDFLKSDGFANRNFMQLIHDDSLTFKEDIQKAQVSGQGDSLHEHIANLAGSPAIKKGILQTVKVVDELVKVMGRHKPENIVIEMARENQTTQKGQKNSRERMKRIEEGIKELGSQILKEHPVENTQLQNEKLYLYYLQNGRDMYVDQELDINRLSDYDVDHIVPQSFLKDDSIDNKVLTRSDKARGKSDNVPSEEVVKKMKNYWRQLLNAKLITQRKFDNLTKAERGGLSELDKAGFIKRQLVETRQITKHVAQILDSRMNTKYDENDKLIREVKVITLKSKLVSDFRKDFQFYKVREINNYHHAHDAYLNAVVGTALIKKYPKLESEFVYGDYKVYDVRKMIAKSEQEIGKATAKYFFYSNIMNFFKTEITLANGEIRKRPLIETNGETGEIVWDKGRDFATVRKVLSMPQVNIVKKTEVQTGGFSKESILPKRNSDKLIARKKDWDPKKYGGFDSPTVAYSVLVVAKVEKGKSKKLKSVKELLGITIMERSSFEKNPIDFLEAKGYKEVKKDLIIKLPKYSLFELENGRKRMLASAGELQKGNELALPSKYVNFLYLASHYEKLKGSPEDNEQKQLFVEQHKHYLDEIIEQISEFSKRVILADANLDKVLSAYNKHRDKPIREQAENIIHLFTLTNLGAPAAFKYFDTTIDRKRYTSTKEVLDATLIHQSITGLYETRIDLSQLGGDGGGSSEAAAKGGTLQLDDEYRLYSPLVKPDQNIQFWLEQFPQAWAETAGMGLAKQVPPQVIQLKASATPVSVRQYPLSKEAQEGIRPHVQRLIQQGILVPVQSPWNTPLLPVRKPGTNDYRPVQDLREVNKRVQDIHPTVPNPYNLLCALPPQRSWYTVLDLKDAFFCLRLHPTSQPLFAFEWRDPGTGRTGQLTWTRLPQGFKNSPTIFDEALHRDLANFRIQHPQVTLLQYVDDLLLAGATKQDCLEGTKALLLELSDLGYRASAKKAQICRREVTYLGYSLRDGQRWLTEARKKTVVQIPAPTTAKQVREFLGTAGFCRLWIPGFATLAAPLYPLTKEKGEFSWAPEHQKAFDAIKKALLSAPALALPDVTKPFTLYVDERKGVARGVLTQTLGPWRRPVAYLSKKLDPVASGWPVCLKAIAAVAILVKDADKLTLGQNITVIAPHALENIVRQPPDRWMTNARMTHYQSLLLTERVTFAPPAALNPATLLPEETDEPVTHDCHQLLIEETGVRKDLTDIPLTGEVLTWFTDGSSYVVEGKRMAGAAVVDGTRTIWASSLPEGTSAQKAELMALTQALRLAEGKSINIYTDSRYAFATAHVHGAIYKQRGLLTSAGREIKNKEEILSLLEALHLPKRLAIIHCPGHQKAKDPISRGNQMADRVAKQAAQGVNLLAGKRTADGSEFEKRTADGSEFESPKKKAKVE

SEQ ID NO: 294 - protein, 2088 aa, synthetic construct
MPAAKRVKLDGGDKKYSIGLDIGTNSVGWAVITDEYKVPSKKFKVLGNTDRHSIKKNLIGALLFDSGETAEATRLKRTARRRYTRRKNRICYLQEIFSNEMAKVDDSFFHRLEESFLVEEDKKHERHPIFGNIVDEVAYHEKYPTIYHLRKKLVDSTDKADLRLIYLALAHMIKFRGHFLIEGDLNPDNSDVDKLFIQLVQTYNQLFEENPINASGVDAKAILSARLSKSRRLENLIAQLPGEKKNGLFGNLIALSLGLTPNFKSNFDLAEDAKLQLSKDTYDDDLDNLLAQIGDQYADLFLAAKNLSDAILLSDILRVNTEITKAPLSASMIKRYDEHHQDLTLLKALVRQQLPEKYKEIFFDQSKNGYAGYIDGGASQEEFYKFIKPILEKMDGTEELLVKLNREDLLRKQRTFDNGSIPHQIHLGELHAILRRQEDFYPFLKDNREKIEKILTFRIPYYVGPLARGNSRFAWMTRKSEETITPWNFEEVVDKGASAQSFIERMTNFDKNLPNEKVLPKHSLLYEYFTVYNELTKVKYVTEGMRKPAFLSGEQKKAIVDLLFKTNRKVTVKQLKEDYFKKIECFDSVEISGVEDRFNASLGTYHDLLKIIKDKDFLDNEENEDILEDIVLTLTLFEDREMIEERLKTYAHLFDDKVMKQLKRRRYTGWGRLSRKLINGIRDKQSGKTILDFLKSDGFANRNFMQLIHDDSLTFKEDIQKAQVSGQGDSLHEHIANLAGSPAIKKGILQTVKVVDELVKVMGRHKPENIVIEMARENQTTQKGQKNSRERMKRIEEGIKELGSQILKEHPVENTQLQNEKLYLYYLQNGRDMYVDQELDINRLSDYDVDHIVPQSFLKDDSIDNKVLTRSDKARGKSDNVPSEEVVKKMKNYWRQLLNAKLITQRKFDNLTKAERGGLSELDKAGFIKRQLVETRQITKHVAQILDSRMNTKYDENDKLIREVKVITLKSKLVSDFRKDFQFYKVREINNYHHAHDAYLNAVVGTALIKKYPKLESEFVYGDYKVYDVRKMIAKSEQEIGKATAKYFFYSNIMNFFKTEITLANGEIRKRPLIETNGETGEIVWDKGRDFATVRKVLSMPQVNIVKKTEVQTGGFSKESILPKRNSDKLIARKKDWDPKKYGGFDSPTVAYSVLVVAKVEKGKSKKLKSVKELLGITIMERSSFEKNPIDFLEAKGYKEVKKDLIIKLPKYSLFELENGRKRMLASAGELQKGNELALPSKYVNFLYLASHYEKLKGSPEDNEQKQLFVEQHKHYLDEIIEQISEFSKRVILADANLDKVLSAYNKHRDKPIREQAENIIHLFTLTNLGAPAAFKYFDTTIDRKRYTSTKEVLDATLIHQSITGLYETRIDLSQLGGDGGGGSGGSGGSGGTLQLDDEYRLYSPLVKPDQNIQFWLEQFPQAWAETAGMGLAKQVPPQVIQLKASATPVSVRQYPLSKEAQEGIRPHVQRLIQQGILVPVQSPWNTPLLPVRKPGTNDYRPVQDLREVNKRVQDIHPTVPNPYNLLCALPPQRSWYTVLDLKDAFFCLRLHPTSQPLFAFEWRDPGTGRTGQLTWTRLPQGFKNSPTIFDEALHRDLANFRIQHPQVTLLQYVDDLLLAGATKQDCLEGTKALLLELSDLGYRASAKKAQICRREVTYLGYSLRDGQRWLTEARKKTVVQIPAPTTAKQVREFLGTAGFCRLWIPGFATLAAPLYPLTKEKGEFSWAPEHQKAFDAIKKALLSAPALALPDVTKPFTLYVDERKGVARGVLTQTLGPWRRPVAYLSKKLDPVASGWPVCLKAIAAVAILVKDADKLTLGQNITVIAPHALENIVRQPPDRWMTNARMTHYQSLLLTERVTFAPPAALNPATLLPEETDEPVTHDCHQLLIEETGVRKDLTDIPLTGEVLTWFTDGSSYVVEGKRMAGAAVVDGTRTIWASSLPEGTSAQKAELMALTQALRLAEGKSINIYTDSRYAFATAHVHGAIYKQRGLLTSAGREIKNKEEILSLLEALHLPKRLAIIHCPGHQKAKDPISRGNQMADRVAKQAAQGVNLLAGKRTADGSEFEKRTADGSEFESPKKKAKVE

SEQ ID NO: 295 - protein, 2088 aa, synthetic construct
MPAAKRVKLDGGDKKYSIGLDIGTNSVGWAVITDEYKVPSKKFKVLGNTDRHSIKKNLIGALLFDSGETAEATRLKRTARRRYTRRKNRICYLQEIFSNEMAKVDDSFFHRLEESFLVEEDKKHERHPIFGNIVDEVAYHEKYPTIYHLRKKLVDSTDKADLRLIYLALAHMIKFRGHFLIEGDLNPDNSDVDKLFIQLVQTYNQLFEENPINASGVDAKAILSARLSKSRRLENLIAQLPGEKKNGLFGNLIALSLGLTPNFKSNFDLAEDAKLQLSKDTYDDDLDNLLAQIGDQYADLFLAAKNLSDAILLSDILRVNTEITKAPLSASMIKRYDEHHQDLTLLKALVRQQLPEKYKEIFFDQSKNGYAGYIDGGASQEEFYKFIKPILEKMDGTEELLVKLNREDLLRKQRTFDNGSIPHQIHLGELHAILRRQEDFYPFLKDNREKIEKILTFRIPYYVGPLARGNSRFAWMTRKSEETITPWNFEEVVDKGASAQSFIERMTNFDKNLPNEKVLPKHSLLYEYFTVYNELTKVKYVTEGMRKPAFLSGEQKKAIVDLLFKTNRKVTVKQLKEDYFKKIECFDSVEISGVEDRFNASLGTYHDLLKIIKDKDFLDNEENEDILEDIVLTLTLFEDREMIEERLKTYAHLFDDKVMKQLKRRRYTGWGRLSRKLINGIRDKQSGKTILDFLKSDGFANRNFMQLIHDDSLTFKEDIQKAQVSGQGDSLHEHIANLAGSPAIKKGILQTVKVVDELVKVMGRHKPENIVIEMARENQTTQKGQKNSRERMKRIEEGIKELGSQILKEHPVENTQLQNEKLYLYYLQNGRDMYVDQELDINRLSDYDVDHIVPQSFLKDDSIDNKVLTRSDKARGKSDNVPSEEVVKKMKNYWRQLLNAKLITQRKFDNLTKAERGGLSELDKAGFIKRQLVETRQITKHVAQILDSRMNTKYDENDKLIREVKVITLKSKLVSDFRKDFQFYKVREINNYHHAHDAYLNAVVGTALIKKYPKLESEFVYGDYKVYDVRKMIAKSEQEIGKATAKYFFYSNIMNFFKTEITLANGEIRKRPLIETNGETGEIVWDKGRDFATVRKVLSMPQVNIVKKTEVQTGGFSKESILPKRNSDKLIARKKDWDPKKYGGFDSPTVAYSVLVVAKVEKGKSKKLKSVKELLGITIMERSSFEKNPIDFLEAKGYKEVKKDLIIKLPKYSLFELENGRKRMLASAGELQKGNELALPSKYVNFLYLASHYEKLKGSPEDNEQKQLFVEQHKHYLDEIIEQISEFSKRVILADANLDKVLSAYNKHRDKPIREQAENIIHLFTLTNLGAPAAFKYFDTTIDRKRYTSTKEVLDATLIHQSITGLYETRIDLSQLGGDGGGSSPAPGGSGGTLQLDDEYRLYSPLVKPDQNIQFWLEQFPQAWAETAGMGLAKQVPPQVIQLKASATPVSVRQYPLSKEAQEGIRPHVQRLIQQGILVPVQSPWNTPLLPVRKPGTNDYRPVQDLREVNKRVQDIHPTVPNPYNLLCALPPQRSWYTVLDLKDAFFCLRLHPTSQPLFAFEWRDPGTGRTGQLTWTRLPQGFKNSPTIFDEALHRDLANFRIQHPQVTLLQYVDDLLLAGATKQDCLEGTKALLLELSDLGYRASAKKAQICRREVTYLGYSLRDGQRWLTEARKKTVVQIPAPTTAKQVREFLGTAGFCRLWIPGFATLAAPLYPLTKEKGEFSWAPEHQKAFDAIKKALLSAPALALPDVTKPFTLYVDERKGVARGVLTQTLGPWRRPVAYLSKKLDPVASGWPVCLKAIAAVAILVKDADKLTLGQNITVIAPHALENIVRQPPDRWMTNARMTHYQSLLLTERVTFAPPAALNPATLLPEETDEPVTHDCHQLLIEETGVRKDLTDIPLTGEVLTWFTDGSSYVVEGKRMAGAAVVDGTRTIWASSLPEGTSAQKAELMALTQALRLAEGKSINIYTDSRYAFATAHVHGAIYKQRGLLTSAGREIKNKEEILSLLEALHLPKRLAIIHCPGHQKAKDPISRGNQMADRVAKQAAQGVNLLAGKRTADGSEFEKRTADGSEFESPKKKAKVE

SEQ ID NO: 296 - protein, 2090 aa, synthetic construct
MPAAKRVKLDGGDKKYSIGLDIGTNSVGWAVITDEYKVPSKKFKVLGNTDRHSIKKNLIGALLFDSGETAEATRLKRTARRRYTRRKNRICYLQEIFSNEMAKVDDSFFHRLEESFLVEEDKKHERHPIFGNIVDEVAYHEKYPTIYHLRKKLVDSTDKADLRLIYLALAHMIKFRGHFLIEGDLNPDNSDVDKLFIQLVQTYNQLFEENPINASGVDAKAILSARLSKSRRLENLIAQLPGEKKNGLFGNLIALSLGLTPNFKSNFDLAEDAKLQLSKDTYDDDLDNLLAQIGDQYADLFLAAKNLSDAILLSDILRVNTEITKAPLSASMIKRYDEHHQDLTLLKALVRQQLPEKYKEIFFDQSKNGYAGYIDGGASQEEFYKFIKPILEKMDGTEELLVKLNREDLLRKQRTFDNGSIPHQIHLGELHAILRRQEDFYPFLKDNREKIEKILTFRIPYYVGPLARGNSRFAWMTRKSEETITPWNFEEVVDKGASAQSFIERMTNFDKNLPNEKVLPKHSLLYEYFTVYNELTKVKYVTEGMRKPAFLSGEQKKAIVDLLFKTNRKVTVKQLKEDYFKKIECFDSVEISGVEDRFNASLGTYHDLLKIIKDKDFLDNEENEDILEDIVLTLTLFEDREMIEERLKTYAHLFDDKVMKQLKRRRYTGWGRLSRKLINGIRDKQSGKTILDFLKSDGFANRNFMQLIHDDSLTFKEDIQKAQVSGQGDSLHEHIANLAGSPAIKKGILQTVKVVDELVKVMGRHKPENIVIEMARENQTTQKGQKNSRERMKRIEEGIKELGSQILKEHPVENTQLQNEKLYLYYLQNGRDMYVDQELDINRLSDYDVDHIVPQSFLKDDSIDNKVLTRSDKARGKSDNVPSEEVVKKMKNYWRQLLNAKLITQRKFDNLTKAERGGLSELDKAGFIKRQLVETRQITKHVAQILDSRMNTKYDENDKLIREVKVITLKSKLVSDFRKDFQFYKVREINNYHHAHDAYLNAVVGTALIKKYPKLESEFVYGDYKVYDVRKMIAKSEQEIGKATAKYFFYSNIMNFFKTEITLANGEIRKRPLIETNGETGEIVWDKGRDFATVRKVLSMPQVNIVKKTEVQTGGFSKESILPKRNSDKLIARKKDWDPKKYGGFDSPTVAYSVLVVAKVEKGKSKKLKSVKELLGITIMERSSFEKNPIDFLEAKGYKEVKKDLIIKLPKYSLFELENGRKRMLASAGELQKGNELALPSKYVNFLYLASHYEKLKGSPEDNEQKQLFVEQHKHYLDEIIEQISEFSKRVILADANLDKVLSAYNKHRDKPIREQAENIIHLFTLTNLGAPAAFKYFDTTIDRKRYTSTKEVLDATLIHQSITGLYETRIDLSQLGGDGGEAAAKGSSGGGGGTLQLDDEYRLYSPLVKPDQNIQFWLEQFPQAWAETAGMGLAKQVPPQVIQLKASATPVSVRQYPLSKEAQEGIRPHVQRLIQQGILVPVQSPWNTPLLPVRKPGTNDYRPVQDLREVNKRVQDIHPTVPNPYNLLCALPPQRSWYTVLDLKDAFFCLRLHPTSQPLFAFEWRDPGTGRTGQLTWTRLPQGFKNSPTIFDEALHRDLANFRIQHPQVTLLQYVDDLLLAGATKQDCLEGTKALLLELSDLGYRASAKKAQICRREVTYLGYSLRDGQRWLTEARKKTVVQIPAPTTAKQVREFLGTAGFCRLWIPGFATLAAPLYPLTKEKGEFSWAPEHQKAFDAIKKALLSAPALALPDVTKPFTLYVDERKGVARGVLTQTLGPWRRPVAYLSKKLDPVASGWPVCLKAIAAVAILVKDADKLTLGQNITVIAPHALENIVRQPPDRWMTNARMTHYQSLLLTERVTFAPPAALNPATLLPEETDEPVTHDCHQLLIEETGVRKDLTDIPLTGEVLTWFTDGSSYVVEGKRMAGAAVVDGTRTIWASSLPEGTSAQKAELMALTQALRLAEGKSINIYTDSRYAFATAHVHGAIYKQRGLLTSAGREIKNKEEILSLLEALHLPKRLAIIHCPGHQKAKDPISRGNQMADRVAKQAAQGVNLLAGKRTADGSEFEKRTADGSEFESPKKKAKVE

SEQ ID NO: 297 - protein, 2087 aa, synthetic construct
MPAAKRVKLDGGDKKYSIGLDIGTNSVGWAVITDEYKVPSKKFKVLGNTDRHSIKKNLIGALLFDSGETAEATRLKRTARRRYTRRKNRICYLQEIFSNEMAKVDDSFFHRLEESFLVEEDKKHERHPIFGNIVDEVAYHEKYPTIYHLRKKLVDSTDKADLRLIYLALAHMIKFRGHFLIEGDLNPDNSDVDKLFIQLVQTYNQLFEENPINASGVDAKAILSARLSKSRRLENLIAQLPGEKKNGLFGNLIALSLGLTPNFKSNFDLAEDAKLQLSKDTYDDDLDNLLAQIGDQYADLFLAAKNLSDAILLSDILRVNTEITKAPLSASMIKRYDEHHQDLTLLKALVRQQLPEKYKEIFFDQSKNGYAGYIDGGASQEEFYKFIKPILEKMDGTEELLVKLNREDLLRKQRTFDNGSIPHQIHLGELHAILRRQEDFYPFLKDNREKIEKILTFRIPYYVGPLARGNSRFAWMTRKSEETITPWNFEEVVDKGASAQSFIERMTNFDKNLPNEKVLPKHSLLYEYFTVYNELTKVKYVTEGMRKPAFLSGEQKKAIVDLLFKTNRKVTVKQLKEDYFKKIECFDSVEISGVEDRFNASLGTYHDLLKIIKDKDFLDNEENEDILEDIVLTLTLFEDREMIEERLKTYAHLFDDKVMKQLKRRRYTGWGRLSRKLINGIRDKQSGKTILDFLKSDGFANRNFMQLIHDDSLTFKEDIQKAQVSGQGDSLHEHIANLAGSPAIKKGILQTVKVVDELVKVMGRHKPENIVIEMARENQTTQKGQKNSRERMKRIEEGIKELGSQILKEHPVENTQLQNEKLYLYYLQNGRDMYVDQELDINRLSDYDVDHIVPQSFLKDDSIDNKVLTRSDKARGKSDNVPSEEVVKKMKNYWRQLLNAKLITQRKFDNLTKAERGGLSELDKAGFIKRQLVETRQITKHVAQILDSRMNTKYDENDKLIREVKVITLKSKLVSDFRKDFQFYKVREINNYHHAHDAYLNAVVGTALIKKYPKLESEFVYGDYKVYDVRKMIAKSEQEIGKATAKYFFYSNIMNFFKTEITLANGEIRKRPLIETNGETGEIVWDKGRDFATVRKVLSMPQVNIVKKTEVQTGGFSKESILPKRNSDKLIARKKDWDPKKYGGFDSPTVAYSVLVVAKVEKGKSKKLKSVKELLGITIMERSSFEKNPIDFLEAKGYKEVKKDLIIKLPKYSLFELENGRKRMLASAGELQKGNELALPSKYVNFLYLASHYEKLKGSPEDNEQKQLFVEQHKHYLDEIIEQISEFSKRVILADANLDKVLSAYNKHRDKPIREQAENIIHLFTLTNLGAPAAFKYFDTTIDRKRYTSTKEVLDATLIHQSITGLYETRIDLSQLGGDGGEAAAKPAPGGTLQLDDEYRLYSPLVKPDQNIQFWLEQFPQAWAETAGMGLAKQVPPQVIQLKASATPVSVRQYPLSKEAQEGIRPHVQRLIQQGILVPVQSPWNTPLLPVRKPGTNDYRPVQDLREVNKRVQDIHPTVPNPYNLLCALPPQRSWYTVLDLKDAFFCLRLHPTSQPLFAFEWRDPGTGRTGQLTWTRLPQGFKNSPTIFDEALHRDLANFRIQHPQVTLLQYVDDLLLAGATKQDCLEGTKALLLELSDLGYRASAKKAQICRREVTYLGYSLRDGQRWLTEARKKTVVQIPAPTTAKQVREFLGTAGFCRLWIPGFATLAAPLYPLTKEKGEFSWAPEHQKAFDAIKKALLSAPALALPDVTKPFTLYVDERKGVARGVLTQTLGPWRRPVAYLSKKLDPVASGWPVCLKAIAAVAILVKDADKLTLGQNITVIAPHALENIVRQPPDRWMTNARMTHYQSLLLTERVTFAPPAALNPATLLPEETDEPVTHDCHQLLIEETGVRKDLTDIPLTGEVLTWFTDGSSYVVEGKRMAGAAVVDGTRTIWASSLPEGTSAQKAELMALTQALRLAEGKSINIYTDSRYAFATAHVHGAIYKQRGLLTSAGREIKNKEEILSLLEALHLPKRLAIIHCPGHQKAKDPISRGNQMADRVAKQAAQGVNLLAGKRTADGSEFEKRTADGSEFESPKKKAKVE

SEQ ID NO: 298 - protein, 2094 aa, synthetic construct
MPAAKRVKLDGGDKKYSIGLDIGTNSVGWAVITDEYKVPSKKFKVLGNTDRHSIKKNLIGALLFDSGETAEATRLKRTARRRYTRRKNRICYLQEIFSNEMAKVDDSFFHRLEESFLVEEDKKHERHPIFGNIVDEVAYHEKYPTIYHLRKKLVDSTDKADLRLIYLALAHMIKFRGHFLIEGDLNPDNSDVDKLFIQLVQTYNQLFEENPINASGVDAKAILSARLSKSRRLENLIAQLPGEKKNGLFGNLIALSLGLTPNFKSNFDLAEDAKLQLSKDTYDDDLDNLLAQIGDQYADLFLAAKNLSDAILLSDILRVNTEITKAPLSASMIKRYDEHHQDLTLLKALVRQQLPEKYKEIFFDQSKNGYAGYIDGGASQEEFYKFIKPILEKMDGTEELLVKLNREDLLRKQRTFDNGSIPHQIHLGELHAILRRQEDFYPFLKDNREKIEKILTFRIPYYVGPLARGNSRFAWMTRKSEETITPWNFEEVVDKGASAQSFIERMTNFDKNLPNEKVLPKHSLLYEYFTVYNELTKVKYVTEGMRKPAFLSGEQKKAIVDLLFKTNRKVTVKQLKEDYFKKIECFDSVEISGVEDRFNASLGTYHDLLKIIKDKDFLDNEENEDILEDIVLTLTLFEDREMIEERLKTYAHLFDDKVMKQLKRRRYTGWGRLSRKLINGIRDKQSGKTILDFLKSDGFANRNFMQLIHDDSLTFKEDIQKAQVSGQGDSLHEHIANLAGSPAIKKGILQTVKVVDELVKVMGRHKPENIVIEMARENQTTQKGQKNSRERMKRIEEGIKELGSQILKEHPVENTQLQNEKLYLYYLQNGRDMYVDQELDINRLSDYDVDHIVPQSFLKDDSIDNKVLTRSDKARGKSDNVPSEEVVKKMKNYWRQLLNAKLITQRKFDNLTKAERGGLSELDKAGFIKRQLVETRQITKHVAQILDSRMNTKYDENDKLIREVKVITLKSKLVSDFRKDFQFYKVREINNYHHAHDAYLNAVVGTALIKKYPKLESEFVYGDYKVYDVRKMIAKSEQEIGKATAKYFFYSNIMNFFKTEITLANGEIRKRPLIETNGETGEIVWDKGRDFATVRKVLSMPQVNIVKKTEVQTGGFSKESILPKRNSDKLIARKKDWDPKKYGGFDSPTVAYSVLVVAKVEKGKSKKLKSVKELLGITIMERSSFEKNPIDFLEAKGYKEVKKDLIIKLPKYSLFELENGRKRMLASAGELQKGNELALPSKYVNFLYLASHYEKLKGSPEDNEQKQLFVEQHKHYLDEIIEQISEFSKRVILADANLDKVLSAYNKHRDKPIREQAENIIHLFTLTNLGAPAAFKYFDTTIDRKRYTSTKEVLDATLIHQSITGLYETRIDLSQLGGDGGEAAAKEAAAKEAAAKGGTLQLDDEYRLYSPLVKPDQNIQFWLEQFPQAWAETAGMGLAKQVPPQVIQLKASATPVSVRQYPLSKEAQEGIRPHVQRLIQQGILVPVQSPWNTPLLPVRKPGTNDYRPVQDLREVNKRVQDIHPTVPNPYNLLCALPPQRSWYTVLDLKDAFFCLRLHPTSQPLFAFEWRDPGTGRTGQLTWTRLPQGFKNSPTIFNEALHRDLANFRIQHPQVTLLQYVDDLLLAGATKQDCLEGTKALLLELSDLGYRASAKKAQICRREVTYLGYSLRDGQRWLTEARKKTVVQIPAPTTAKQVREFLGTAGFCRLWIPGFATLAAPLYPLTKPKGEFSWAPEHQKAFDAIKKALLSAPALALPDVTKPFTLYVDERKGVARGVLTQTLGPWRRPVAYLSKKLDPVASGWPVCLKAIAAVAILVKDADKLTLGQNITVIAPHALENIVRQPPDRWMTNARMTHYQSLLLTERVTFAPPAALNPATLLPEETDEPVTHDCHQLLIEETGVRKDLTDIPLTGEVLTWFTDGSSYVVEGKRMAGAAVVDGTRTIWASSLPEGTSAQKAELMALTQALRLAEGKSINIYTDSRYAFATAHVHGAIYKQRGWLTSAGREIKNKEEILSLLEALHLPKRLAIIHCPGHQKAKDPISRGNQMADRVAKQAAQGVNLLAGKRTADGSEFEKRTADGSEFESPKKKAKVE

SEQ ID NO: 299 - protein, 2090 aa, synthetic construct
MPAAKRVKLDGGDKKYSIGLDIGTNSVGWAVITDEYKVPSKKFKVLGNTDRHSIKKNLIGALLFDSGETAEATRLKRTARRRYTRRKNRICYLQEIFSNEMAKVDDSFFHRLEESFLVEEDKKHERHPIFGNIVDEVAYHEKYPTIYHLRKKLVDSTDKADLRLIYLALAHMIKFRGHFLIEGDLNPDNSDVDKLFIQLVQTYNQLFEENPINASGVDAKAILSARLSKSRRLENLIAQLPGEKKNGLFGNLIALSLGLTPNFKSNFDLAEDAKLQLSKDTYDDDLDNLLAQIGDQYADLFLAAKNLSDAILLSDILRVNTEITKAPLSASMIKRYDEHHQDLTLLKALVRQQLPEKYKEIFFDQSKNGYAGYIDGGASQEEFYKFIKPILEKMDGTEELLVKLNREDLLRKQRTFDNGSIPHQIHLGELHAILRRQEDFYPFLKDNREKIEKILTFRIPYYVGPLARGNSRFAWMTRKSEETITPWNFEEVVDKGASAQSFIERMTNFDKNLPNEKVLPKHSLLYEYFTVYNELTKVKYVTEGMRKPAFLSGEQKKAIVDLLFKTNRKVTVKQLKEDYFKKIECFDSVEISGVEDRFNASLGTYHDLLKIIKDKDFLDNEENEDILEDIVLTLTLFEDREMIEERLKTYAHLFDDKVMKQLKRRRYTGWGRLSRKLINGIRDKQSGKTILDFLKSDGFANRNFMQLIHDDSLTFKEDIQKAQVSGQGDSLHEHIANLAGSPAIKKGILQTVKVVDELVKVMGRHKPENIVIEMARENQTTQKGQKNSRERMKRIEEGIKELGSQILKEHPVENTQLQNEKLYLYYLQNGRDMYVDQELDINRLSDYDVDHIVPQSFLKDDSIDNKVLTRSDKARGKSDNVPSEEVVKKMKNYWRQLLNAKLITQRKFDNLTKAERGGLSELDKAGFIKRQLVETRQITKHVAQILDSRMNTKYDENDKLIREVKVITLKSKLVSDFRKDFQFYKVREINNYHHAHDAYLNAVVGTALIKKYPKLESEFVYGDYKVYDVRKMIAKSEQEIGKATAKYFFYSNIMNFFKTEITLANGEIRKRPLIETNGETGEIVWDKGRDFATVRKVLSMPQVNIVKKTEVQTGGFSKESILPKRNSDKLIARKKDWDPKKYGGFDSPTVAYSVLVVAKVEKGKSKKLKSVKELLGITIMERSSFEKNPIDFLEAKGYKEVKKDLIIKLPKYSLFELENGRKRMLASAGELQKGNELALPSKYVNFLYLASHYEKLKGSPEDNEQKQLFVEQHKHYLDEIIEQISEFSKRVILADANLDKVLSAYNKHRDKPIREQAENIIHLFTLTNLGAPAAFKYFDTTIDRKRYTSTKEVLDATLIHQSITGLYETRIDLSQLGGDGGEAAAKGGSGGGGGTLQLDDEYRLYSPLVKPDQNIQFWLEQFPQAWAETAGMGLAKQVPPQVIQLKASATPVSVRQYPLSKEAQEGIRPHVQRLIQQGILVPVQSPWNTPLLPVRKPGTNDYRPVQDLREVNKRVQDIHPTVPNPYNLLCALPPQRSWYTVLDLKDAFFCLRLHPTSQPLFAFEWRDPGTGRTGQLTWTRLPQGFKNSPTIFNEALHRDLANFRIQHPQVTLLQYVDDLLLAGATKQDCLEGTKALLLELSDLGYRASAKKAQICRREVTYLGYSLRDGQRWLTEARKKTVVQIPAPTTAKQVREFLGTAGFCRLWIPGFATLAAPLYPLTKPKGEFSWAPEHQKAFDAIKKALLSAPALALPDVTKPFTLYVDERKGVARGVLTQTLGPWRRPVAYLSKKLDPVASGWPVCLKAIAAVAILVKDADKLTLGQNITVIAPHALENIVRQPPDRWMTNARMTHYQSLLLTERVTFAPPAALNPATLLPEETDEPVTHDCHQLLIEETGVRKDLTDIPLTGEVLTWFTDGSSYVVEGKRMAGAAVVDGTRTIWASSLPEGTSAQKAELMALTQALRLAEGKSINIYTDSRYAFATAHVHGAIYKQRGWLTSAGREIKNKEEILSLLEALHLPKRLAIIHCPGHQKAKDPISRGNQMADRVAKQAAQGVNLLAGKRTADGSEFEKRTADGSEFESPKKKAKVE

SEQ ID NO: 300 - protein, 2125 aa, synthetic construct; identical to SEQ ID NO: 156

SEQ ID NO: 301 - protein, 2090 aa, synthetic construct
MPAAKRVKLDGGDKKYSIGLDIGTNSVGWAVITDEYKVPSKKFKVLGNTDRHSIKKNLIGALLFDSGETAEATRLKRTARRRYTRRKNRICYLQEIFSNEMAKVDDSFFHRLEESFLVEEDKKHERHPIFGNIVDEVAYHEKYPTIYHLRKKLVDSTDKADLRLIYLALAHMIKFRGHFLIEGDLNPDNSDVDKLFIQLVQTYNQLFEENPINASGVDAKAILSARLSKSRRLENLIAQLPGEKKNGLFGNLIALSLGLTPNFKSNFDLAEDAKLQLSKDTYDDDLDNLLAQIGDQYADLFLAAKNLSDAILLSDILRVNTEITKAPLSASMIKRYDEHHQDLTLLKALVRQQLPEKYKEIFFDQSKNGYAGYIDGGASQEEFYKFIKPILEKMDGTEELLVKLNREDLLRKQRTFDNGSIPHQIHLGELHAILRRQEDFYPFLKDNREKIEKILTFRIPYYVGPLARGNSRFAWMTRKSEETITPWNFEEVVDKGASAQSFIERMTNFDKNLPNEKVLPKHSLLYEYFTVYNELTKVKYVTEGMRKPAFLSGEQKKAIVDLLFKTNRKVTVKQLKEDYFKKIECFDSVEISGVEDRFNASLGTYHDLLKIIKDKDFLDNEENEDILEDIVLTLTLFEDREMIEERLKTYAHLFDDKVMKQLKRRRYTGWGRLSRKLINGIRDKQSGKTILDFLKSDGFANRNFMQLIHDDSLTFKEDIQKAQVSGQGDSLHEHIANLAGSPAIKKGILQTVKVVDELVKVMGRHKPENIVIEMARENQTTQKGQKNSRERMKRIEEGIKELGSQILKEHPVENTQLQNEKLYLYYLQNGRDMYVDQELDINRLSDYDVDHIVPQSFLKDDSIDNKVLTRSDKARGKSDNVPSEEVVKKMKNYWRQLLNAKLITQRKFDNLTKAERGGLSELDKAGFIKRQLVETRQITKHVAQILDSRMNTKYDENDKLIREVKVITLKSKLVSDFRKDFQFYKVREINNYHHAHDAYLNAVVGTALIKKYPKLESEFVYGDYKVYDVRKMIAKSEQEIGKATAKYFFYSNIMNFFKTEITLANGEIRKRPLIETNGETGEIVWDKGRDFATVRKVLSMPQVNIVKKTEVQTGGFSKESILPKRNSDKLIARKKDWDPKKYGGFDSPTVAYSVLVVAKVEKGKSKKLKSVKELLGITIMERSSFEKNPIDFLEAKGYKEVKKDLIIKLPKYSLFELENGRKRMLASAGELQKGNELALPSKYVNFLYLASHYEKLKGSPEDNEQKQLFVEQHKHYLDEIIEQISEFSKRVILADANLDKVLSAYNKHRDKPIREQAENIIHLFTLTNLGAPAAFKYFDTTIDRKRYTSTKEVLDATLIHQSITGLYETRIDLSQLGGDGGGGGEAAAKGSSGGTLQLDDEYRLYSPLVKPDQNIQFWLEQFPQAWAETAGMGLAKQVPPQVIQLKASATPVSVRQYPLSKEAQEGIRPHVQRLIQQGILVPVQSPWNTPLLPVRKPGTNDYRPVQDLREVNKRVQDIHPTVPNPYNLLCALPPQRSWYTVLDLKDAFFCLRLHPTSQPLFAFEWRDPGTGRTGQLTWTRLPQGFKNSPTIFNEALHRDLANFRIQHPQVTLLQYVDDLLLAGATKQDCLEGTKALLLELSDLGYRASAKKAQICRREVTYLGYSLRDGQRWLTEARKKTVVQIPAPTTAKQVREFLGTAGFCRLWIPGFATLAAPLYPLTKPKGEFSWAPEHQKAFDAIKKALLSAPALALPDVTKPFTLYVDERKGVARGVLTQTLGPWRRPVAYLSKKLDPVASGWPVCLKAIAAVAILVKDADKLTLGQNITVIAPHALENIVRQPPDRWMTNARMTHYQSLLLTERVTFAPPAALNPATLLPEETDEPVTHDCHQLLIEETGVRKDLTDIPLTGEVLTWFTDGSSYVVEGKRMAGAAVVDGTRTIWASSLPEGTSAQKAELMALTQALRLAEGKSINIYTDSRYAFATAHVHGAIYKQRGWLTSAGREIKNKEEILSLLEALHLPKRLAIIHCPGHQKAKDPISRGNQMADRVAKQAAQGVNLLAGKRTADGSEFEKRTADGSEFESPKKKAKVE

SEQ ID NO: 302 - protein, 2090 aa, synthetic construct; identical to SEQ ID NO: 164

SEQ ID NO: 303 - protein, 2112 aa, synthetic construct; identical to SEQ ID NO: 140

SEQ ID NO: 304 - protein, 2090 aa, synthetic construct
MPAAKRVKLDGGDKKYSIGLDIGTNSVGWAVITDEYKVPSKKFKVLGNTDRHSIKKNLIGALLFDSGETAEATRLKRTARRRYTRRKNRICYLQEIFSNEMAKVDDSFFHRLEESFLVEEDKKHERHPIFGNIVDEVAYHEKYPTIYHLRKKLVDSTDKADLRLIYLALAHMIKFRGHFLIEGDLNPDNSDVDKLFIQLVQTYNQLFEENPINASGVDAKAILSARLSKSRRLENLIAQLPGEKKNGLFGNLIALSLGLTPNFKSNFDLAEDAKLQLSKDTYDDDLDNLLAQIGDQYADLFLAAKNLSDAILLSDILRVNTEITKAPLSASMIKRYDEHHQDLTLLKALVRQQLPEKYKEIFFDQSKNGYAGYIDGGASQEEFYKFIKPILEKMDGTEELLVKLNREDLLRKQRTFDNGSIPHQIHLGELHAILRRQEDFYPFLKDNREKIEKILTFRIPYYVGPLARGNSRFAWMTRKSEETITPWNFEEVVDKGASAQSFIERMTNFDKNLPNEKVLPKHSLLYEYFTVYNELTKVKYVTEGMRKPAFLSGEQKKAIVDLLFKTNRKVTVKQLKEDYFKKIECFDSVEISGVEDRFNASLGTYHDLLKIIKDKDFLDNEENEDILEDIVLTLTLFEDREMIEERLKTYAHLFDDKVMKQLKRRRYTGWGRLSRKLINGIRDKQSGKTILDFLKSDGFANRNFMQLIHDDSLTFKEDIQKAQVSGQGDSLHEHIANLAGSPAIKKGILQTVKVVDELVKVMGRHKPENIVIEMARENQTTQKGQKNSRERMKRIEEGIKELGSQILKEHPVENTQLQNEKLYLYYLQNGRDMYVDQELDINRLSDYDVDHIVPQSFLKDDSIDNKVLTRSDKARGKSDNVPSEEVVKKMKNYWRQLLNAKLITQRKFDNLTKAERGGLSELDKAGFIKRQLVETRQITKHVAQILDSRMNTKYDENDKLIREVKVITLKSKLVSDFRKDFQFYKVREINNYHHAHDAYLNAVVGTALIKKYPKLESEFVYGDYKVYDVRKMIAKSEQEIGKATAKYFFYSNIMNFFKTEITLANGEIRKRPLIETNGETGEIVWDKGRDFATVRKVLSMPQVNIVKKTEVQTGGFSKESILPKRNSDKLIARKKDWDPKKYGGFDSPTVAYSVLVVAKVEKGKSKKLKSVKELLGITIMERSSFEKNPIDFLEAKGYKEVKKDLIIKLPKYSLFELENGRKRMLASAGELQKGNELALPSKYVNFLYLASHYEKLKGSPEDNEQKQLFVEQHKHYLDEIIEQISEFSKRVILADANLDKVLSAYNKHRDKPIREQAENIIHLFTLTNLGAPAAFKYFDTTIDRKRYTSTKEVLDATLIHQSITGLYETRIDLSQLGGDGGEAAAKPAPGSSGGTLQLDDEYRLYSPLVKPDQNIQFWLEQFPQAWAETAGMGLAKQVPPQVIQLKASATPVSVRQYPLSKEAQEGIRPHVQRLIQQGILVPVQSPWNTPLLPVRKPGTNDYRPVQDLREVNKRVQDIHPTVPNPYNLLCALPPQRSWYTVLDLKDAFFCLRLHPTSQPLFAFEWRDPGTGRTGQLTWTRLPQGFKNSPTIFNEALHRDLANFRIQHPQVTLLQYVDDLLLAGATKQDCLEGTKALLLELSDLGYRASAKKAQICRREVTYLGYSLRDGQRWLTEARKKTVVQIPAPTTAKQVREFLGTAGFCRLWIPGFATLAAPLYPLTKPKGEFSWAPEHQKAFDAIKKALLSAPALALPDVTKPFTLYVDERKGVARGVLTQTLGPWRRPVAYLSKKLDPVASGWPVCLKAIAAVAILVKDADKLTLGQNITVIAPHALENIVRQPPDRWMTNARMTHYQSLLLTERVTFAPPAALNPATLLPEETDEPVTHDCHQLLIEETGVRKDLTDIPLTGEVLTWFTDGSSYVVEGKRMAGAAVVDGTRTIWASSLPEGTSAQKAELMALTQALRLAEGKSINIYTDSRYAFATAHVHGAIYKQRGWLTSAGREIKNKEEILSLLEALHLPKRLAIIHCPGHQKAKDPISRGNQMADRVAKQAAQGVNLLAGKRTADGSEFEKRTADGSEFESPKKKAKVE

SEQ ID NO: 305 - protein, 2090 aa, synthetic construct; identical to SEQ ID NO: 127

SEQ ID NO: 306 - protein, 2087 aa, synthetic construct; identical to SEQ ID NO: 126

SEQ ID NO: 307 - protein, 2088 aa, synthetic construct
MPAAKRVKLDGGDKKYSIGLDIGTNSVGWAVITDEYKVPSKKFKVLGNTDRHSIKKNLIGALLFDSGETAEATRLKRTARRRYTRRKNRICYLQEIFSNEMAKVDDSFFHRLEESFLVEEDKKHERHPIFGNIVDEVAYHEKYPTIYHLRKKLVDSTDKADLRLIYLALAHMIKFRGHFLIEGDLNPDNSDVDKLFIQLVQTYNQLFEENPINASGVDAKAILSARLSKSRRLENLIAQLPGEKKNGLFGNLIALSLGLTPNFKSNFDLAEDAKLQLSKDTYDDDLDNLLAQIGDQYADLFLAAKNLSDAILLSDILRVNTEITKAPLSASMIKRYDEHHQDLTLLKALVRQQLPEKYKEIFFDQSKNGYAGYIDGGASQEEFYKFIKPILEKMDGTEELLVKLNREDLLRKQRTFDNGSIPHQIHLGELHAILRRQEDFYPFLKDNREKIEKILTFRIPYYVGPLARGNSRFAWMTRKSEETITPWNFEEVVDKGASAQSFIERMTNFDKNLPNEKVLPKHSLLYEYFTVYNELTKVKYVTEGMRKPAFLSGEQKKAIVDLLFKTNRKVTVKQLKEDYFKKIECFDSVEISGVEDRFNASLGTYHDLLKIIKDKDFLDNEENEDILEDIVLTLTLFEDREMIEERLKTYAHLFDDKVMKQLKRRRYTGWGRLSRKLINGIRDKQSGKTILDFLKSDGFANRNFMQLIHDDSLTFKEDIQKAQVSGQGDSLHEHIANLAGSPAIKKGILQTVKVVDELVKVMGRHKPENIVIEMARENQTTQKGQKNSRERMKRIEEGIKELGSQILKEHPVENTQLQNEKLYLYYLQNGRDMYVDQELDINRLSDYDVDHIVPQSFLKDDSIDNKVLTRSDKARGKSDNVPSEEVVKKMKNYWRQLLNAKLITQRKFDNLTKAERGGLSELDKAGFIKRQLVETRQITKHVAQILDSRMNTKYDENDKLIREVKVITLKSKLVSDFRKDFQFYKVREINNYHHAHDAYLNAVVGTALIKKYPKLESEFVYGDYKVYDVRKMIAKSEQEIGKATAKYFFYSNIMNFFKTEITLANGEIRKRPLIETNGETGEIVWDKGRDFATVRKVLSMPQVNIVKKTEVQTGGFSKESILPKRNSDKLIARKKDWDPKKYGGFDSPTVAYSVLVVAKVEKGKSKKLKSVKELLGITIMERSSFEKNPIDFLEAKGYKEVKKDLIIKLPKYSLFELENGRKRMLASAGELQKGNELALPSKYVNFLYLASHYEKLKGSPEDNEQKQLFVEQHKHYLDEIIEQISEFSKRVILADANLDKVLSAYNKHRDKPIREQAENIIHLFTLTNLGAPAAFKYFDTTIDRKRYTSTKEVLDATLIHQSITGLYETRIDLSQLGGDGGGGGGSSPAPGGTLQLDDEYRLYSPLVKPDQNIQFWLEQFPQAWAETAGMGLAKQVPPQVIQLKASATPVSVRQYPLSKEAQEGIRPHVQRLIQQGILVPVQSPWNTPLLPVRKPGTNDYRPVQDLREVNKRVQDIHPTVPNPYNLLCALPPQRSWYTVLDLKDAFFCLRLHPTSQPLFAFEWRDPGTGRTGQLTWTRLPQGFKNSPTIFNEALHRDLANFRIQHPQVTLLQYVDDLLLAGATKQDCLEGTKALLLELSDLGYRASAKKAQICRREVTYLGYSLRDGQRWLTEARKKTVVQIPAPTTAKQVREFLGTAGFCRLWIPGFATLAAPLYPLTKPKGEFSWAPEHQKAFDAIKKALLSAPALALPDVTKPFTLYVDERKGVARGVLTQTLGPWRRPVAYLSKKLDPVASGWPVCLKAIAAVAILVKDADKLTLGQNITVIAPHALENIVRQPPDRWMTNARMTHYQSLLLTERVTFAPPAALNPATLLPEETDEPVTHDCHQLLIEETGVRKDLTDIPLTGEVLTWFTDGSSYVVEGKRMAGAAVVDGTRTIWASSLPEGTSAQKAELMALTQALRLAEGKSINIYTDSRYAFATAHVHGAIYKQRGWLTSAGREIKNKEEILSLLEALHLPKRLAIIHCPGHQKAKDPISRGNQMADRVAKQAAQGVNLLAGKRTADGSEFEKRTADGSEFESPKKKAKVE

SEQ ID NO: 308 - protein, 2084 aa, synthetic construct; identical to SEQ ID NO: 151

SEQ ID NO: 309 - protein, 2092 aa, synthetic construct; identical to SEQ ID NO: 157

SEQ ID NO: 310 - protein, 2090 aa, synthetic construct
MPAAKRVKLDGGDKKYSIGLDIGTNSVGWAVITDEYKVPSKKFKVLGNTDRHSIKKNLIGALLFDSGETAEATRLKRTARRRYTRRKNRICYLQEIFSNEMAKVDDSFFHRLEESFLVEEDKKHERHPIFGNIVDEVAYHEKYPTIYHLRKKLVDSTDKADLRLIYLALAHMIKFRGHFLIEGDLNPDNSDVDKLFIQLVQTYNQLFEENPINASGVDAKAILSARLSKSRRLENLIAQLPGEKKNGLFGNLIALSLGLTPNFKSNFDLAEDAKLQLSKDTYDDDLDNLLAQIGDQYADLFLAAKNLSDAILLSDILRVNTEITKAPLSASMIKRYDEHHQDLTLLKALVRQQLPEKYKEIFFDQSKNGYAGYIDGGASQEEFYKFIKPILEKMDGTEELLVKLNREDLLRKQRTFDNGSIPHQIHLGELHAILRRQEDFYPFLKDNREKIEKILTFRIPYYVGPLARGNSRFAWMTRKSEETITPWNFEEVVDKGASAQSFIERMTNFDKNLPNEKVLPKHSLLYEYFTVYNELTKVKYVTEGMRKPAFLSGEQKKAIVDLLFKTNRKVTVKQLKEDYFKKIECFDSVEISGVEDRFNASLGTYHDLLKIIKDKDFLDNEENEDILEDIVLTLTLFEDREMIEERLKTYAHLFDDKVMKQLKRRRYTGWGRLSRKLINGIRDKQSGKTILDFLKSDGFANRNFMQLIHDDSLTFKEDIQKAQVSGQGDSLHEHIANLAGSPAIKKGILQTVKVVDELVKVMGRHKPENIVIEMARENQTTQKGQKNSRERMKRIEEGIKELGSQILKEHPVENTQLQNEKLYLYYLQNGRDMYVDQELDINRLSDYDVDHIVPQSFLKDDSIDNKVLTRSDKARGKSDNVPSEEVVKKMKNYWRQLLNAKLITQRKFDNLTKAERGGLSELDKAGFIKRQLVETRQITKHVAQILDSRMNTKYDENDKLIREVKVITLKSKLVSDFRKDFQFYKVREINNYHHAHDAYLNAVVGTALIKKYPKLESEFVYGDYKVYDVRKMIAKSEQEIGKATAKYFFYSNIMNFFKTEITLANGEIRKRPLIETNGETGEIVWDKGRDFATVRKVLSMPQVNIVKKTEVQTGGFSKESILPKRNSDKLIARKKDWDPKKYGGFDSPTVAYSVLVVAKVEKGKSKKLKSVKELLGITIMERSSFEKNPIDFLEAKGYKEVKKDLIIKLPKYSLFELENGRKRMLASAGELQKGNELALPSKYVNFLYLASHYEKLKGSPEDNEQKQLFVEQHKHYLDEIIEQISEFSKRVILADANLDKVLSAYNKHRDKPIREQAENIIHLFTLTNLGAPAAFKYFDTTIDRKRYTSTKEVLDATLIHQSITGLYETRIDLSQLGGDGGGSSPAPEAAAKGGTLQLDDEYRLYSPLVKPDQNIQFWLEQFPQAWAETAGMGLAKQVPPQVIQLKASATPVSVRQYPLSKEAQEGIRPHVQRLIQQGILVPVQSPWNTPLLPVRKPGTNDYRPVQDLREVNKRVQDIHPTVPNPYNLLCALPPQRSWYTVLDLKDAFFCLRLHPTSQPLFAFEWRDPGTGRTGQLTWTRLPQGFKNSPTIFNEALHRDLANFRIQHPQVTLLQYVDDLLLAGATKQDCLEGTKALLLELSDLGYRASAKKAQICRREVTYLGYSLRDGQRWLTEARKKTVVQIPAPTTAKQVREFLGTAGFCRLWIPGFATLAAPLYPLTKPKGEFSWAPEHQKAFDAIKKALLSAPALALPDVTKPFTLYVDERKGVARGVLTQTLGPWRRPVAYLSKKLDPVASGWPVCLKAIAAVAILVKDADKLTLGQNITVIAPHALENIVRQPPDRWMTNARMTHYQSLLLTERVTFAPPAALNPATLLPEETDEPVTHDCHQLLIEETGVRKDLTDIPLTGEVLTWFTDGSSYVVEGKRMAGAAVVDGTRTIWASSLPEGTSAQKAELMALTQALRLAEGKSINIYTDSRYAFATAHVHGAIYKQRGWLTSAGREIKNKEEILSLLEALHLPKRLAIIHCPGHQKAKDPISRGNQMADRVAKQAAQGVNLLAGKRTADGSEFEKRTADGSEFESPKKKAKVE

SEQ ID NO: 311 - protein, 2090 aa, synthetic construct
MPAAKRVKLDGGDKKYSIGLDIGTNSVGWAVITDEYKVPSKKFKVLGNTDRHSIKKNLIGALLFDSGETAEATRLKRTARRRYTRRKNRICYLQEIFSNEMAKVDDSFFHRLEESFLVEEDKKHERHPIFGNIVDEVAYHEKYPTIYHLRKKLVDSTDKADLRLIYLALAHMIKFRGHFLIEGDLNPDNSDVDKLFIQLVQTYNQLFEENPINASGVDAKAILSARLSKSRRLENLIAQLPGEKKNGLFGNLIALSLGLTPNFKSNFDLAEDAKLQLSKDTYDDDLDNLLAQIGDQYADLFLAAKNLSDAILLSDILRVNTEITKAPLSASMIKRYDEHHQDLTLLKALVRQQLPEKYKEIFFDQSKNGYAGYIDGGASQEEFYKFIKPILEKMDGTEELLVKLNREDLLRKQRTFDNGSIPHQIHLGELHAILRRQEDFYPFLKDNREKIEKILTFRIPYYVGPLARGNSRFAWMTRKSEETITPWNFEEVVDKGASAQSFIERMTNFDKNLPNEKVLPKHSLLYEYFTVYNELTKVKYVTEGMRKPAFLSGEQKKAIVDLLFKTNRKVTVKQLKEDYFKKIECFDSVEISGVEDRFNASLGTYHDLLKIIKDKDFLDNEENEDILEDIVLTLTLFEDREMIEERLKTYAHLFDDKVMKQLKRRRYTGWGRLSRKLINGIRDKQSGKTILDFLKSDGFANRNFMQLIHDDSLTFKEDIQKAQVSGQGDSLHEHIANLAGSPAIKKGILQTVKVVDELVKVMGRHKPENIVIEMARENQTTQKGQKNSRERMKRIEEGIKELGSQILKEHPVENTQLQNEKLYLYYLQNGRDMYVDQELDINRLSDYDVDHIVPQSFLKDDSIDNKVLTRSDKARGKSDNVPSEEVVKKMKNYWRQLLNAKLITQRKFDNLTKAERGGLSELDKAGFIKRQLVETRQITKHVAQILDSRMNTKYDENDKLIREVKVITLKSKLVSDFRKDFQFYKVREINNYHHAHDAYLNAVVGTALIKKYPKLESEFVYGDYKVYDVRKMIAKSEQEIGKATAKYFFYSNIMNFFKTEITLANGEIRKRPLIETNGETGEIVWDKGRDFATVRKVLSMPQVNIVKKTEVQTGGFSKESILPKRNSDKLIARKKDWDPKKYGGFDSPTVAYSVLVVAKVEKGKSKKLKSVKELLGITIMERSSFEKNPIDFLEAKGYKEVKKDLIIKLPKYSLFELENGRKRMLASAGELQKGNELALPSKYVNFLYLASHYEKLKGSPEDNEQKQLFVEQHKHYLDEIIEQISEFSKRVILADANLDKVLSAYNKHRDKPIREQAENIIHLFTLTNLGAPAAFKYFDTTIDRKRYTSTKEVLDATLIHQSITGLYETRIDLSQLGGDGGGGGGGSEAAAKGGTLQLDDEYRLYSPLVKPDQNIQFWLEQFPQAWAETAGMGLAKQVPPQVIQLKASATPVSVRQYPLSKEAQEGIRPHVQRLIQQGILVPVQSPWNTPLLPVRKPGTNDYRPVQDLREVNKRVQDIHPTVPNPYNLLCALPPQRSWYTVLDLKDAFFCLRLHPTSQPLFAFEWRDPGTGRTGQLTWTRLPQGFKNSPTIFNEALHRDLANFRIQHPQVTLLQYVDDLLLAGATKQDCLEGTKALLLELSDLGYRASAKKAQICRREVTYLGYSLRDGQRWLTEARKKTVVQIPAPTTAKQVREFLGTAGFCRLWIPGFATLAAPLYPLTKPKGEFSWAPEHQKAFDAIKKALLSAPALALPDVTKPFTLYVDERKGVARGVLTQTLGPWRRPVAYLSKKLDPVASGWPVCLKAIAAVAILVKDADKLTLGQNITVIAPHALENIVRQPPDRWMTNARMTHYQSLLLTERVTFAPPAALNPATLLPEETDEPVTHDCHQLLIEETGVRKDLTDIPLTGEVLTWFTDGSSYVVEGKRMAGAAVVDGTRTIWASSLPEGTSAQKAELMALTQALRLAEGKSINIYTDSRYAFATAHVHGAIYKQRGWLTSAGREIKNKEEILSLLEALHLPKRLAIIHCPGHQKAKDPISRGNQMADRVAKQAAQGVNLLAGKRTADGSEFEKRTADGSEFESPKKKAKVE

SEQ ID NO: 312 - protein, 2090 aa, synthetic construct; identical to SEQ ID NO: 116

SEQ ID NO: 313 - protein, 2109 aa, synthetic construct; identical to SEQ ID NO: 117

SEQ ID NO: 314 - protein, 2088 aa, synthetic construct
MPAAKRVKLDGGDKKYSIGLDIGTNSVGWAVITDEYKVPSKKFKVLGNTDRHSIKKNLIGALLFDSGETAEATRLKRTARRRYTRRKNRICYLQEIFSNEMAKVDDSFFHRLEESFLVEEDKKHERHPIFGNIVDEVAYHEKYPTIYHLRKKLVDSTDKADLRLIYLALAHMIKFRGHFLIEGDLNPDNSDVDKLFIQLVQTYNQLFEENPINASGVDAKAILSARLSKSRRLENLIAQLPGEKKNGLFGNLIALSLGLTPNFKSNFDLAEDAKLQLSKDTYDDDLDNLLAQIGDQYADLFLAAKNLSDAILLSDILRVNTEITKAPLSASMIKRYDEHHQDLTLLKALVRQQLPEKYKEIFFDQSKNGYAGYIDGGASQEEFYKFIKPILEKMDGTEELLVKLNREDLLRKQRTFDNGSIPHQIHLGELHAILRRQEDFYPFLKDNREKIEKILTFRIPYYVGPLARGNSRFAWMTRKSEETITPWNFEEVVDKGASAQSFIERMTNFDKNLPNEKVLPKHSLLYEYFTVYNELTKVKYVTEGMRKPAFLSGEQKKAIVDLLFKTNRKVTVKQLKEDYFKKIECFDSVEISGVEDRFNASLGTYHDLLKIIKDKDFLDNEENEDILEDIVLTLTLFEDREMIEERLKTYAHLFDDKVMKQLKRRRYTGWGRLSRKLINGIRDKQSGKTILDFLKSDGFANRNFMQLIHDDSLTFKEDIQKAQVSGQGDSLHEHIANLAGSPAIKKGILQTVKVVDELVKVMGRHKPENIVIEMARENQTTQKGQKNSRERMKRIEEGIKELGSQILKEHPVENTQLQNEKLYLYYLQNGRDMYVDQELDINRLSDYDVDHIVPQSFLKDDSIDNKVLTRSDKARGKSDNVPSEEVVKKMKNYWRQLLNAKLITQRKFDNLTKAERGGLSELDKAGFIKRQLVETRQITKHVAQILDSRMNTKYDENDKLIREVKVITLKSKLVSDFRKDFQFYKVREINNYHHAHDAYLNAVVGTALIKKYPKLESEFVYGDYKVYDVRKMIAKSEQEIGKATAKYFFYSNIMNFFKTEITLANGEIRKRPLIETNGETGEIVWDKGRDFATVRKVLSMPQVNIVKKTEVQTGGFSKESILPKRNSDKLIARKKDWDPKKYGGFDSPTVAYSVLVVAKVEKGKSKKLKSVKELLGITIMERSSFEKNPIDFLEAKGYKEVKKDLIIKLPKYSLFELENGRKRMLASAGELQKGNELALPSKYVNFLYLASHYEKLKGSPEDNEQKQLFVEQHKHYLDEIIEQISEFSKRVILADANLDKVLSAYNKHRDKPIREQAENIIHLFTLTNLGAPAAFKYFDTTIDRKRYTSTKEVLDATLIHQSITGLYETRIDLSQLGGDGGGGGPAPGSSGGTLQLDDEYRLYSPLVKPDQNIQFWLEQFPQAWAETAGMGLAKQVPPQVIQLKASATPVSVRQYPLSKEAQEGIRPHVQRLIQQGILVPVQSPWNTPLLPVRKPGTNDYRPVQDLREVNKRVQDIHPTVPNPYNLLCALPPQRSWYTVLDLKDAFFCLRLHPTSQPLFAFEWRDPGTGRTGQLTWTRLPQGFKNSPTIFNEALHRDLANFRIQHPQVTLLQYVDDLLLAGATKQDCLEGTKALLLELSDLGYRASAKKAQICRREVTYLGYSLRDGQRWLTEARKKTVVQIPAPTTAKQVREFLGTAGFCRLWIPGFATLAAPLYPLTKPKGEFSWAPEHQKAFDAIKKALLSAPALALPDVTKPFTLYVDERKGVARGVLTQTLGPWRRPVAYLSKKLDPVASGWPVCLKAIAAVAILVKDADKLTLGQNITVIAPHALENIVRQPPDRWMTNARMTHYQSLLLTERVTFAPPAALNPATLLPEETDEPVTHDCHQLLIEETGVRKDLTDIPLTGEVLTWFTDGSSYVVEGKRMAGAAVVDGTRTIWASSLPEGTSAQKAELMALTQALRLAEGKSINIYTDSRYAFATAHVHGAIYKQRGWLTSAGREIKNKEEILSLLEALHLPKRLAIIHCPGHQKAKDPISRGNQMADRVAKQAAQGVNLLAGKRTADGSEFEKRTADGSEFESPKKKAKVE

SEQ ID NO: 315 - protein, 2082 aa, synthetic construct; identical to SEQ ID NO: 120

SEQ ID NO: 316 - protein, 2097 aa, synthetic construct; identical to SEQ ID NO: 142

SEQ ID NO: 317 - protein, 2090 aa, synthetic construct
MPAAKRVKLDGGDKKYSIGLDIGTNSVGWAVITDEYKVPSKKFKVLGNTDRHSIKKNLIGALLFDSGETAEATRLKRTARRRYTRRKNRICYLQEIFSNEMAKVDDSFFHRLEESFLVEEDKKHERHPIFGNIVDEVAYHEKYPTIYHLRKKLVDSTDKADLRLIYLALAHMIKFRGHFLIEGDLNPDNSDVDKLFIQLVQTYNQLFEENPINASGVDAKAILSARLSKSRRLENLIAQLPGEKKNGLFGNLIALSLGLTPNFKSNFDLAEDAKLQLSKDTYDDDLDNLLAQIGDQYADLFLAAKNLSDAILLSDILRVNTEITKAPLSASMIKRYDEHHQDLTLLKALVRQQLPEKYKEIFFDQSKNGYAGYIDGGASQEEFYKFIKPILEKMDGTEELLVKLNREDLLRKQRTFDNGSIPHQIHLGELHAILRRQEDFYPFLKDNREKIEKILTFRIPYYVGPLARGNSRFAWMTRKSEETITPWNFEEVVDKGASAQSFIERMTNFDKNLPNEKVLPKHSLLYEYFTVYNELTKVKYVTEGMRKPAFLSGEQKKAIVDLLFKTNRKVTVKQLKEDYFKKIECFDSVEISGVEDRFNASLGTYHDLLKIIKDKDFLDNEENEDILEDIVLTLTLFEDREMIEERLKTYAHLFDDKVMKQLKRRRYTGWGRLSRKLINGIRDKQSGKTILDFLKSDGFANRNFMQLIHDDSLTFKEDIQKAQVSGQGDSLHEHIANLAGSPAIKKGILQTVKVVDELVKVMGRHKPENIVIEMARENQTTQKGQKNSRERMKRIEEGIKELGSQILKEHPVENTQLQNEKLYLYYLQNGRDMYVDQELDINRLSDYDVDHIVPQSFLKDDSIDNKVLTRSDKARGKSDNVPSEEVVKKMKNYWRQLLNAKLITQRKFDNLTKAERGGLSELDKAGFIKRQLVETRQITKHVAQILDSRMNTKYDENDKLIREVKVITLKSKLVSDFRKDFQFYKVREINNYHHAHDAYLNAVVGTALIKKYPKLESEFVYGDYKVYDVRKMIAKSEQEIGKATAKYFFYSNIMNFFKTEITLANGEIRKRPLIETNGETGEIVWDKGRDFATVRKVLSMPQVNIVKKTEVQTGGFSKESILPKRNSDKLIARKKDWDPKKYGGFDSPTVAYSVLVVAKVEKGKSKKLKSVKELLGITIMERSSFEKNPIDFLEAKGYKEVKKDLIIKLPKYSLFELENGRKRMLASAGELQKGNELALPSKYVNFLYLASHYEKLKGSPEDNEQKQLFVEQHKHYLDEIIEQISEFSKRVILADANLDKVLSAYNKHRDKPIREQAENIIHLFTLTNLGAPAAFKYFDTTIDRKRYTSTKEVLDATLIHQSITGLYETRIDLSQLGGDGGGSSGGGEAAAKGGTLQLDDEYRLYSPLVKPDQNIQFWLEQFPQAWAETAGMGLAKQVPPQVIQLKASATPVSVRQYPLSKEAQEGIRPHVQRLIQQGILVPVQSPWNTPLLPVRKPGTNDYRPVQDLREVNKRVQDIHPTVPNPYNLLCALPPQRSWYTVLDLKDAFFCLRLHPTSQPLFAFEWRDPGTGRTGQLTWTRLPQGFKNSPTIFNEALHRDLANFRIQHPQVTLLQYVDDLLLAGATKQDCLEGTKALLLELSDLGYRASAKKAQICRREVTYLGYSLRDGQRWLTEARKKTVVQIPAPTTAKQVREFLGTAGFCRLWIPGFATLAAPLYPLTKPKGEFSWAPEHQKAFDAIKKALLSAPALALPDVTKPFTLYVDERKGVARGVLTQTLGPWRRPVAYLSKKLDPVASGWPVCLKAIAAVAILVKDADKLTLGQNITVIAPHALENIVRQPPDRWMTNARMTHYQSLLLTERVTFAPPAALNPATLLPEETDEPVTHDCHQLLIEETGVRKDLTDIPLTGEVLTWFTDGSSYVVEGKRMAGAAVVDGTRTIWASSLPEGTSAQKAELMALTQALRLAEGKSINIYTDSRYAFATAHVHGAIYKQRGWLTSAGREIKNKEEILSLLEALHLPKRLAIIHCPGHQKAKDPISRGNQMADRVAKQAAQGVNLLAGKRTADGSEFEKRTADGSEFESPKKKAKVE

SEQ ID NO: 318 - protein, 2090 aa, synthetic construct; identical to SEQ ID NO: 121

SEQ ID NO: 319 - protein, 2090 aa, synthetic construct; identical to SEQ ID NO: 124

SEQ ID NO: 320 - protein, 2088 aa, synthetic construct
MPAAKRVKLDGGDKKYSIGLDIGTNSVGWAVITDEYKVPSKKFKVLGNTDRHSIKKNLIGALLFDSGETAEATRLKRTARRRYTRRKNRICYLQEIFSNEMAKVDDSFFHRLEESFLVEEDKKHERHPIFGNIVDEVAYHEKYPTIYHLRKKLVDSTDKADLRLIYLALAHMIKFRGHFLIEGDLNPDNSDVDKLFIQLVQTYNQLFEENPINASGVDAKAILSARLSKSRRLENLIAQLPGEKKNGLFGNLIALSLGLTPNFKSNFDLAEDAKLQLSKDTYDDDLDNLLAQIGDQYADLFLAAKNLSDAILLSDILRVNTEITKAPLSASMIKRYDEHHQDLTLLKALVRQQLPEKYKEIFFDQSKNGYAGYIDGGASQEEFYKFIKPILEKMDGTEELLVKLNREDLLRKQRTFDNGSIPHQIHLGELHAILRRQEDFYPFLKDNREKIEKILTFRIPYYVGPLARGNSRFAWMTRKSEETITPWNFEEVVDKGASAQSFIERMTNFDKNLPNEKVLPKHSLLYEYFTVYNELTKVKYVTEGMRKPAFLSGEQKKAIVDLLFKTNRKVTVKQLKEDYFKKIECFDSVEISGVEDRFNASLGTYHDLLKIIKDKDFLDNEENEDILEDIVLTLTLFEDREMIEERLKTYAHLFDDKVMKQLKRRRYTGWGRLSRKLINGIRDKQSGKTILDFLKSDGFANRNFMQLIHDDSLTFKEDIQKAQVSGQGDSLHEHIANLAGSPAIKKGILQTVKVVDELVKVMGRHKPENIVIEMARENQTTQKGQKNSRERMKRIEEGIKELGSQILKEHPVENTQLQNEKLYLYYLQNGRDMYVDQELDINRLSDYDVDHIVPQSFLKDDSIDNKVLTRSDKARGKSDNVPSEEVVKKMKNYWRQLLNAKLITQRKFDNLTKAERGGLSELDKAGFIKRQLVETRQITKHVAQILDSRMNTKYDENDKLIREVKVITLKSKLVSDFRKDFQFYKVREINNYHHAHDAYLNAVVGTALIKKYPKLESEFVYGDYKVYDVRKMIAKSEQEIGKATAKYFFYSNIMNFFKTEITLANGEIRKRPLIETNGETGEIVWDKGRDFATVRKVLSMPQVNIVKKTEVQTGGFSKESILPKRNSDKLIARKKDWDPKKYGGFDSPTVAYSVLVVAKVEKGKSKKLKSVKELLGITIMERSSFEKNPIDFLEAKGYKEVKKDLIIKLPKYSLFELENGRKRMLASAGELQKGNELALPSKYVNFLYLASHYEKLKGSPEDNEQKQLFVEQHKHYLDEIIEQISEFSKRVILADANLDKVLSAYNKHRDKPIREQAENIIHLFTLTNLGAPAAFKYFDTTIDRKRYTSTKEVLDATLIHQSITGLYETRIDLSQLGGDGGGGGGGSGSSGGTLQLDDEYRLYSPLVKPDQNIQFWLEQFPQAWAETAGMGLAKQVPPQVIQLKASATPVSVRQYPLSKEAQEGIRPHVQRLIQQGILVPVQSPWNTPLLPVRKPGTNDYRPVQDLREVNKRVQDIHPTVPNPYNLLCALPPQRSWYTVLDLKDAFFCLRLHPTSQPLFAFEWRDPGTGRTGQLTWTRLPQGFKNSPTIFNEALHRDLANFRIQHPQVTLLQYVDDLLLAGATKQDCLEGTKALLLELSDLGYRASAKKAQICRREVTYLGYSLRDGQRWLTEARKKTVVQIPAPTTAKQVREFLGTAGFCRLWIPGFATLAAPLYPLTKPKGEFSWAPEHQKAFDAIKKALLSAPALALPDVTKPFTLYVDERKGVARGVLTQTLGPWRRPVAYLSKKLDPVASGWPVCLKAIAAVAILVKDADKLTLGQNITVIAPHALENIVRQPPDRWMTNARMTHYQSLLLTERVTFAPPAALNPATLLPEETDEPVTHDCHQLLIEETGVRKDLTDIPLTGEVLTWFTDGSSYVVEGKRMAGAAVVDGTRTIWASSLPEGTSAQKAELMALTQALRLAEGKSINIYTDSRYAFATAHVHGAIYKQRGWLTSAGREIKNKEEILSLLEALHLPKRLAIIHCPGHQKAKDPISRGNQMADRVAKQAAQGVNLLAGKRTADGSEFEKRTADGSEFESPKKKAKVE

SEQ ID NO: 321 - protein, 2090 aa, synthetic construct; identical to SEQ ID NO: 138

SEQ ID NO: 322 - protein, 2090 aa, synthetic construct
MPAAKRVKLDGGDKKYSIGLDIGTNSVGWAVITDEYKVPSKKFKVLGNTDRHSIKKNLIGALLFDSGETAEATRLKRTARRRYTRRKNRICYLQEIFSNEMAKVDDSFFHRLEESFLVEEDKKHERHPIFGNIVDEVAYHEKYPTIYHLRKKLVDSTDKADLRLIYLALAHMIKFRGHFLIEGDLNPDNSDVDKLFIQLVQTYNQLFEENPINASGVDAKAILSARLSKSRRLENLIAQLPGEKKNGLFGNLIALSLGLTPNFKSNFDLAEDAKLQLSKDTYDDDLDNLLAQIGDQYADLFLAAKNLSDAILLSDILRVNTEITKAPLSASMIKRYDEHHQDLTLLKALVRQQLPEKYKEIFFDQSKNGYAGYIDGGASQEEFYKFIKPILEKMDGTEELLVKLNREDLLRKQRTFDNGSIPHQIHLGELHAILRRQEDFYPFLKDNREKIEKILTFRIPYYVGPLARGNSRFAWMTRKSEETITPWNFEEVVDKGASAQSFIERMTNFDKNLPNEKVLPKHSLLYEYFTVYNELTKVKYVTEGMRKPAFLSGEQKKAIVDLLFKTNRKVTVKQLKEDYFKKIECFDSVEISGVEDRFNASLGTYHDLLKIIKDKDFLDNEENEDILEDIVLTLTLFEDREMIEERLKTYAHLFDDKVMKQLKRRRYTGWGRLSRKLINGIRDKQSGKTILDFLKSDGFANRNFMQLIHDDSLTFKEDIQKAQVSGQGDSLHEHIANLAGSPAIKKGILQTVKVVDELVKVMGRHKPENIVIEMARENQTTQKGQKNSRERMKRIEEGIKELGSQILKEHPVENTQLQNEKLYLYYLQNGRDMYVDQELDINRLSDYDVDHIVPQSFLKDDSIDNKVLTRSDKARGKSDNVPSEEVVKKMKNYWRQLLNAKLITQRKFDNLTKAERGGLSELDKAGFIKRQLVETRQITKHVAQILDSRMNTKYDENDKLIREVKVITLKSKLVSDFRKDFQFYKVREINNYHHAHDAYLNAVVGTALIKKYPKLESEFVYGDYKVYDVRKMIAKSEQEIGKATAKYFFYSNIMNFFKTEITLANGEIRKRPLIETNGETGEIVWDKGRDFATVRKVLSMPQVNIVKKTEVQTGGFSKESILPKRNSDKLIARKKDWDPKKYGGFDSPTVAYSVLVVAKVEKGKSKKLKSVKELLGITIMERSSFEKNPIDFLEAKGYKEVKKDLIIKLPKYSLFELENGRKRMLASAGELQKGNELALPSKYVNFLYLASHYEKLKGSPEDNEQKQLFVEQHKHYLDEIIEQISEFSKRVILADANLDKVLSAYNKHRDKPIREQAENIIHLFTLTNLGAPAAFKYFDTTIDRKRYTSTKEVLDATLIHQSITGLYETRIDLSQLGGDGGGGGEAAAKGGSGGTLQLDDEYRLYSPLVKPDQNIQFWLEQFPQAWAETAGMGLAKQVPPQVIQLKASATPVSVRQYPLSKEAQEGIRPHVQRLIQQGILVPVQSPWNTPLLPVRKPGTNDYRPVQDLREVNKRVQDIHPTVPNPYNLLCALPPQRSWYTVLDLKDAFFCLRLHPTSQPLFAFEWRDPGTGRTGQLTWTRLPQGFKNSPTIFNEALHRDLANFRIQHPQVTLLQYVDDLLLAGATKQDCLEGTKALLLELSDLGYRASAKKAQICRREVTYLGYSLRDGQRWLTEARKKTVVQIPAPTTAKQVREFLGTAGFCRLWIPGFATLAAPLYPLTKPKGEFSWAPEHQKAFDAIKKALLSAPALALPDVTKPFTLYVDERKGVARGVLTQTLGPWRRPVAYLSKKLDPVASGWPVCLKAIAAVAILVKDADKLTLGQNITVIAPHALENIVRQPPDRWMTNARMTHYQSLLLTERVTFAPPAALNPATLLPEETDEPVTHDCHQLLIEETGVRKDLTDIPLTGEVLTWFTDGSSYVVEGKRMAGAAVVDGTRTIWASSLPEGTSAQKAELMALTQALRLAEGKSINIYTDSRYAFATAHVHGAIYKQRGWLTSAGREIKNKEEILSLLEALHLPKRLAIIHCPGHQKAKDPISRGNQMADRVAKQAAQGVNLLAGKRTADGSEFEKRTADGSEFESPKKKAKVE

SEQ ID NO: 323 - protein, 2090 aa, synthetic construct
MPAAKRVKLDGGDKKYSIGLDIGTNSVGWAVITDEYKVPSKKFKVLGNTDRHSIKKNLIGALLFDSGETAEATRLKRTARRRYTRRKNRICYLQEIFSNEMAKVDDSFFHRLEESFLVEEDKKHERHPIFGNIVDEVAYHEKYPTIYHLRKKLVDSTDKADLRLIYLALAHMIKFRGHFLIEGDLNPDNSDVDKLFIQLVQTYNQLFEENPINASGVDAKAILSARLSKSRRLENLIAQLPGEKKNGLFGNLIALSLGLTPNFKSNFDLAEDAKLQLSKDTYDDDLDNLLAQIGDQYADLFLAAKNLSDAILLSDILRVNTEITKAPLSASMIKRYDEHHQDLTLLKALVRQQLPEKYKEIFFDQSKNGYAGYIDGGASQEEFYKFIKPILEKMDGTEELLVKLNREDLLRKQRTFDNGSIPHQIHLGELHAILRRQEDFYPFLKDNREKIEKILTFRIPYYVGPLARGNSRFAWMTRKSEETITPWNFEEVVDKGASAQSFIERMTNFDKNLPNEKVLPKHSLLYEYFTVYNELTKVKYVTEGMRKPAFLSGEQKKAIVDLLFKTNRKVTVKQLKEDYFKKIECFDSVEISGVEDRFNASLGTYHDLLKIIKDKDFLDNEENEDILEDIVLTLTLFEDREMIEERLKTYAHLFDDKVMKQLKRRRYTGWGRLSRKLINGIRDKQSGKTILDFLKSDGFANRNFMQLIHDDSLTFKEDIQKAQVSGQGDSLHEHIANLAGSPAIKKGILQTVKVVDELVKVMGRHKPENIVIEMARENQTTQKGQKNSRERMKRIEEGIKELGSQILKEHPVENTQLQNEKLYLYYLQNGRDMYVDQELDINRLSDYDVDHIVPQSFLKDDSIDNKVLTRSDKARGKSDNVPSEEVVKKMKNYWRQLLNAKLITQRKFDNLTKAERGGLSELDKAGFIKRQLVETRQITKHVAQILDSRMNTKYDENDKLIREVKVITLKSKLVSDFRKDFQFYKVREINNYHHAHDAYLNAVVGTALIKKYPKLESEFVYGDYKVYDVRKMIAKSEQEIGKATAKYFFYSNIMNFFKTEITLANGEIRKRPLIETNGETGEIVWDKGRDFATVRKVLSMPQVNIVKKTEVQTGGFSKESILPKRNSDKLIARKKDWDPKKYGGFDSPTVAYSVLVVAKVEKGKSKKLKSVKELLGITIMERSSFEKNPIDFLEAKGYKEVKKDLIIKLPKYSLFELENGRKRMLASAGELQKGNELALPSKYVNFLYLASHYEKLKGSPEDNEQKQLFVEQHKHYLDEIIEQISEFSKRVILADANLDKVLSAYNKHRDKPIREQAENIIHLFTLTNLGAPAAFKYFDTTIDRKRYTSTKEVLDATLIHQSITGLYETRIDLSQLGGDGGGGSEAAAKGSSGGTLQLDDEYRLYSPLVKPDQNIQFWLEQFPQAWAETAGMGLAKQVPPQVIQLKASATPVSVRQYPLSKEAQEGIRPHVQRLIQQGILVPVQSPWNTPLLPVRKPGTNDYRPVQDLREVNKRVQDIHPTVPNPYNLLCALPPQRSWYTVLDLKDAFFCLRLHPTSQPLFAFEWRDPGTGRTGQLTWTRLPQGFKNSPTIFNEALHRDLANFRIQHPQVTLLQYVDDLLLAGATKQDCLEGTKALLLELSDLGYRASAKKAQICRREVTYLGYSLRDGQRWLTEARKKTVVQIPAPTTAKQVREFLGTAGFCRLWIPGFATLAAPLYPLTKPKGEFSWAPEHQKAFDAIKKALLSAPALALPDVTKPFTLYVDERKGVARGVLTQTLGPWRRPVAYLSKKLDPVASGWPVCLKAIAAVAILVKDADKLTLGQNITVIAPHALENIVRQPPDRWMTNARMTHYQSLLLTERVTFAPPAALNPATLLPEETDEPVTHDCHQLLIEETGVRKDLTDIPLTGEVLTWFTDGSSYVVEGKRMAGAAVVDGTRTIWASSLPEGTSAQKAELMALTQALRLAEGKSINIYTDSRYAFATAHVHGAIYKQRGWLTSAGREIKNKEEILSLLEALHLPKRLAIIHCPGHQKAKDPISRGNQMADRVAKQAAQGVNLLAGKRTADGSEFEKRTADGSEFESPKKKAKVE

SEQ ID NO: 324 - protein, 2090 aa, synthetic construct
MPAAKRVKLDGGDKKYSIGLDIGTNSVGWAVITDEYKVPSKKFKVLGNTDRHSIKKNLIGALLFDSGETAEATRLKRTARRRYTRRKNRICYLQEIFSNEMAKVDDSFFHRLEESFLVEEDKKHERHPIFGNIVDEVAYHEKYPTIYHLRKKLVDSTDKADLRLIYLALAHMIKFRGHFLIEGDLNPDNSDVDKLFIQLVQTYNQLFEENPINASGVDAKAILSARLSKSRRLENLIAQLPGEKKNGLFGNLIALSLGLTPNFKSNFDLAEDAKLQLSKDTYDDDLDNLLAQIGDQYADLFLAAKNLSDAILLSDILRVNTEITKAPLSASMIKRYDEHHQDLTLLKALVRQQLPEKYKEIFFDQSKNGYAGYIDGGASQEEFYKFIKPILEKMDGTEELLVKLNREDLLRKQRTFDNGSIPHQIHLGELHAILRRQEDFYPFLKDNREKIEKILTFRIPYYVGPLARGNSRFAWMTRKSEETITPWNFEEVVDKGASAQSFIERMTNFDKNLPNEKVLPKHSLLYEYFTVYNELTKVKYVTEGMRKPAFLSGEQKKAIVDLLFKTNRKVTVKQLKEDYFKKIECFDSVEISGVEDRFNASLGTYHDLLKIIKDKDFLDNEENEDILEDIVLTLTLFEDREMIEERLKTYAHLFDDKVMKQLKRRRYTGWGRLSRKLINGIRDKQSGKTILDFLKSDGFANRNFMQLIHDDSLTFKEDIQKAQVSGQGDSLHEHIANLAGSPAIKKGILQTVKVVDELVKVMGRHKPENIVIEMARENQTTQKGQKNSRERMKRIEEGIKELGSQILKEHPVENTQLQNEKLYLYYLQNGRDMYVDQELDINRLSDYDVDHIVPQSFLKDDSIDNKVLTRSDKARGKSDNVPSEEVVKKMKNYWRQLLNAKLITQRKFDNLTKAERGGLSELDKAGFIKRQLVETRQITKHVAQILDSRMNTKYDENDKLIREVKVITLKSKLVSDFRKDFQFYKVREINNYHHAHDAYLNAVVGTALIKKYPKLESEFVYGDYKVYDVRKMIAKSEQEIGKATAKYFFYSNIMNFFKTEITLANGEIRKRPLIETNGETGEIVWDKGRDFATVRKVLSMPQVNIVKKTEVQTGGFSKESILPKRNSDKLIARKKDWDPKKYGGFDSPTVAYSVLVVAKVEKGKSKKLKSVKELLGITIMERSSFEKNPIDFLEAKGYKEVKKDLIIKLPKYSLFELENGRKRMLASAGELQKGNELALPSKYVNFLYLASHYEKLKGSPEDNEQKQLFVEQHKHYLDEIIEQISEFSKRVILADANLDKVLSAYNKHRDKPIREQAENIIHLFTLTNLGAPAAFKYFDTTIDRKRYTSTKEVLDATLIHQSITGLYETRIDLSQLGGDGGGGGEAAAKPAPGGTLQLDDEYRLYSPLVKPDQNIQFWLEQFPQAWAETAGMGLAKQVPPQVIQLKASATPVSVRQYPLSKEAQEGIRPHVQRLIQQGILVPVQSPWNTPLLPVRKPGTNDYRPVQDLREVNKRVQDIHPTVPNPYNLLCALPPQRSWYTVLDLKDAFFCLRLHPTSQPLFAFEWRDPGTGRTGQLTWTRLPQGFKNSPTIFNEALHRDLANFRIQHPQVTLLQYVDDLLLAGATKQDCLEGTKALLLELSDLGYRASAKKAQICRREVTYLGYSLRDGQRWLTEARKKTVVQIPAPTTAKQVREFLGTAGFCRLWIPGFATLAAPLYPLTKPKGEFSWAPEHQKAFDAIKKALLSAPALALPDVTKPFTLYVDERKGVARGVLTQTLGPWRRPVAYLSKKLDPVASGWPVCLKAIAAVAILVKDADKLTLGQNITVIAPHALENIVRQPPDRWMTNARMTHYQSLLLTERVTFAPPAALNPATLLPEETDEPVTHDCHQLLIEETGVRKDLTDIPLTGEVLTWFTDGSSYVVEGKRMAGAAVVDGTRTIWASSLPEGTSAQKAELMALTQALRLAEGKSINIYTDSRYAFATAHVHGAIYKQRGWLTSAGREIKNKEEILSLLEALHLPKRLAIIHCPGHQKAKDPISRGNQMADRVAKQAAQGVNLLAGKRTADGSEFEKRTADGSEFESPKKKAKVE

SEQ ID NO: 325 - protein, 2087 aa, synthetic construct; identical to SEQ ID NO: 128

SEQ ID NO: 326 - protein, 2082 aa, synthetic construct
MPAAKRVKLDGGDKKYSIGLDIGTNSVGWAVITDEYKVPSKKFKVLGNTDRHSIKKNLIGALLFDSGETAEATRLKRTARRRYTRRKNRICYLQEIFSNEMAKVDDSFFHRLEESFLVEEDKKHERHPIFGNIVDEVAYHEKYPTIYHLRKKLVDSTDKADLRLIYLALAHMIKFRGHFLIEGDLNPDNSDVDKLFIQLVQTYNQLFEENPINASGVDAKAILSARLSKSRRLENLIAQLPGEKKNGLFGNLIALSLGLTPNFKSNFDLAEDAKLQLSKDTYDDDLDNLLAQIGDQYADLFLAAKNLSDAILLSDILRVNTEITKAPLSASMIKRYDEHHQDLTLLKALVRQQLPEKYKEIFFDQSKNGYAGYIDGGASQEEFYKFIKPILEKMDGTEELLVKLNREDLLRKQRTFDNGSIPHQIHLGELHAILRRQEDFYPFLKDNREKIEKILTFRIPYYVGPLARGNSRFAWMTRKSEETITPWNFEEVVDKGASAQSFIERMTNFDKNLPNEKVLPKHSLLYEYFTVYNELTKVKYVTEGMRKPAFLSGEQKKAIVDLLFKTNRKVTVKQLKEDYFKKIECFDSVEISGVEDRFNASLGTYHDLLKIIKDKDFLDNEENEDILEDIVLTLTLFEDREMIEERLKTYAHLFDDKVMKQLKRRRYTGWGRLSRKLINGIRDKQSGKTILDFLKSDGFANRNFMQLIHDDSLTFKEDIQKAQVSGQGDSLHEHIANLAGSPAIKKGILQTVKVVDELVKVMGRHKPENIVIEMARENQTTQKGQKNSRERMKRIEEGIKELGSQILKEHPVENTQLQNEKLYLYYLQNGRDMYVDQELDINRLSDYDVDHIVPQSFLKDDSIDNKVLTRSDKARGKSDNVPSEEVVKKMKNYWRQLLNAKLITQRKFDNLTKAERGGLSELDKAGFIKRQLVETRQITKHVAQILDSRMNTKYDENDKLIREVKVITLKSKLVSDFRKDFQFYKVREINNYHHAHDAYLNAVVGTALIKKYPKLESEFVYGDYKVYDVRKMIAKSEQEIGKATAKYFFYSNIMNFFKTEITLANGEIRKRPLIETNGETGEIVWDKGRDFATVRKVLSMPQVNIVKKTEVQTGGFSKESILPKRNSDKLIARKKDWDPKKYGGFDSPTVAYSVLVVAKVEKGKSKKLKSVKELLGITIMERSSFEKNPIDFLEAKGYKEVKKDLIIKLPKYSLFELENGRKRMLASAGELQKGNELALPSKYVNFLYLASHYEKLKGSPEDNEQKQLFVEQHKHYLDEIIEQISEFSKRVILADANLDKVLSAYNKHRDKPIREQAENIIHLFTLTNLGAPAAFKYFDTTIDRKRYTSTKEVLDATLIHQSITGLYETRIDLSQLGGDGGGGSGGTLQLDDEYRLYSPLVKPDQNIQFWLEQFPQAWAETAGMGLAKQVPPQVIQLKASATPVSVRQYPLSKEAQEGIRPHVQRLIQQGILVPVQSPWNTPLLPVRKPGTNDYRPVQDLREVNKRVQDIHPTVPNPYNLLCALPPQRSWYTVLDLKDAFFCLRLHPTSQPLFAFEWRDPGTGRTGQLTWTRLPQGFKNSPTIFNEALHRDLANFRIQHPQVTLLQYVDDLLLAGATKQDCLEGTKALLLELSDLGYRASAKKAQICRREVTYLGYSLRDGQRWLTEARKKTVVQIPAPTTAKQVREFLGTAGFCRLWIPGFATLAAPLYPLTKPKGEFSWAPEHQKAFDAIKKALLSAPALALPDVTKPFTLYVDERKGVARGVLTQTLGPWRRPVAYLSKKLDPVASGWPVCLKAIAAVAILVKDADKLTLGQNITVIAPHALENIVRQPPDRWMTNARMTHYQSLLLTERVTFAPPAALNPATLLPEETDEPVTHDCHQLLIEETGVRKDLTDIPLTGEVLTWFTDGSSYVVEGKRMAGAAVVDGTRTIWASSLPEGTSAQKAELMALTQALRLAEGKSINIYTDSRYAFATAHVHGAIYKQRGWLTSAGREIKNKEEILSLLEALHLPKRLAIIHCPGHQKAKDPISRGNQMADRVAKQAAQGVNLLAGKRTADGSEFEKRTADGSEFESPKKKAKVE

SEQ ID NO: 327 - protein, 2090 aa, synthetic construct; identical to SEQ ID NO: 132

SEQ ID NO: 328 - protein, 2095 aa, synthetic construct; identical to SEQ ID NO: 122

SEQ ID NO: 329 - protein, 2085 aa, synthetic construct; identical to SEQ ID NO: 143

SEQ ID NO: 330 - protein, 2090 aa, synthetic construct; identical to SEQ ID NO: 160

SEQ ID NO: 331 - protein, 2090 aa, synthetic construct
MPAAKRVKLDGGDKKYSIGLDIGTNSVGWAVITDEYKVPSKKFKVLGNTDRHSIKKNLIGALLFDSGETAEATRLKRTARRRYTRRKNRICYLQEIFSNEMAKVDDSFFHRLEESFLVEEDKKHERHPIFGNIVDEVAYHEKYPTIYHLRKKLVDSTDKADLRLIYLALAHMIKFRGHFLIEGDLNPDNSDVDKLFIQLVQTYNQLFEENPINASGVDAKAILSARLSKSRRLENLIAQLPGEKKNGLFGNLIALSLGLTPNFKSNFDLAEDAKLQLSKDTYDDDLDNLLAQIGDQYADLFLAAKNLSDAILLSDILRVNTEITKAPLSASMIKRYDEHHQDLTLLKALVRQQLPEKYKEIFFDQSKNGYAGYIDGGASQEEFYKFIKPILEKMDGTEELLVKLNREDLLRKQRTFDNGSIPHQIHLGELHAILRRQEDFYPFLKDNREKIEKILTFRIPYYVGPLARGNSRFAWMTRKSEETITPWNFEEVVDKGASAQSFIERMTNFDKNLPNEKVLPKHSLLYEYFTVYNELTKVKYVTEGMRKPAFLSGEQKKAIVDLLFKTNRKVTVKQLKEDYFKKIECFDSVEISGVEDRFNASLGTYHDLLKIIKDKDFLDNEENEDILEDIVLTLTLFEDREMIEERLKTYAHLFDDKVMKQLKRRRYTGWGRLSRKLINGIRDKQSGKTILDFLKSDGFANRNFMQLIHDDSLTFKEDIQKAQVSGQGDSLHEHIANLAGSPAIKKGILQTVKVVDELVKVMGRHKPENIVIEMARENQTTQKGQKNSRERMKRIEEGIKELGSQILKEHPVENTQLQNEKLYLYYLQNGRDMYVDQELDINRLSDYDVDHIVPQSFLKDDSIDNKVLTRSDKARGKSDNVPSEEVVKKMKNYWRQLLNAKLITQRKFDNLTKAERGGLSELDKAGFIKRQLVETRQITKHVAQILDSRMNTKYDENDKLIREVKVITLKSKLVSDFRKDFQFYKVREINNYHHAHDAYLNAVVGTALIKKYPKLESEFVYGDYKVYDVRKMIAKSEQEIGKATAKYFFYSNIMNFFKTEITLANGEIRKRPLIETNGETGEIVWDKGRDFATVRKVLSMPQVNIVKKTEVQTGGFSKESILPKRNSDKLIARKKDWDPKKYGGFDSPTVAYSVLVVAKVEKGKSKKLKSVKELLGITIMERSSFEKNPIDFLEAKGYKEVKKDLIIKLPKYSLFELENGRKRMLASAGELQKGNELALPSKYVNFLYLASHYEKLKGSPEDNEQKQLFVEQHKHYLDEIIEQISEFSKRVILADANLDKVLSAYNKHRDKPIREQAENIIHLFTLTNLGAPAAFKYFDTTIDRKRYTSTKEVLDATLIHQSITGLYETRIDLSQLGGDGGPAPEAAAKGGSGGTLQLDDEYRLYSPLVKPDQNIQFWLEQFPQAWAETAGMGLAKQVPPQVIQLKASATPVSVRQYPLSKEAQEGIRPHVQRLIQQGILVPVQSPWNTPLLPVRKPGTNDYRPVQDLREVNKRVQDIHPTVPNPYNLLCALPPQRSWYTVLDLKDAFFCLRLHPTSQPLFAFEWRDPGTGRTGQLTWTRLPQGFKNSPTIFNEALHRDLANFRIQHPQVTLLQYVDDLLLAGATKQDCLEGTKALLLELSDLGYRASAKKAQICRREVTYLGYSLRDGQRWLTEARKKTVVQIPAPTTAKQVREFLGTAGFCRLWIPGFATLAAPLYPLTKPKGEFSWAPEHQKAFDAIKKALLSAPALALPDVTKPFTLYVDERKGVARGVLTQTLGPWRRPVAYLSKKLDPVASGWPVCLKAIAAVAILVKDADKLTLGQNITVIAPHALENIVRQPPDRWMTNARMTHYQSLLLTERVTFAPPAALNPATLLPEETDEPVTHDCHQLLIEETGVRKDLTDIPLTGEVLTWFTDGSSYVVEGKRMAGAAVVDGTRTIWASSLPEGTSAQKAELMALTQALRLAEGKSINIYTDSRYAFATAHVHGAIYKQRGWLTSAGREIKNKEEILSLLEALHLPKRLAIIHCPGHQKAKDPISRGNQMADRVAKQAAQGVNLLAGKRTADGSEFEKRTADGSEFESPKKKAKVE

SEQ ID NO: 332 - protein, 2085 aa, synthetic construct
MPAAKRVKLDGGDKKYSIGLDIGTNSVGWAVITDEYKVPSKKFKVLGNTDRHSIKKNLIGALLFDSGETAEATRLKRTARRRYTRRKNRICYLQEIFSNEMAKVDDSFFHRLEESFLVEEDKKHERHPIFGNIVDEVAYHEKYPTIYHLRKKLVDSTDKADLRLIYLALAHMIKFRGHFLIEGDLNPDNSDVDKLFIQLVQTYNQLFEENPINASGVDAKAILSARLSKSRRLENLIAQLPGEKKNGLFGNLIALSLGLTPNFKSNFDLAEDAKLQLSKDTYDDDLDNLLAQIGDQYADLFLAAKNLSDAILLSDILRVNTEITKAPLSASMIKRYDEHHQDLTLLKALVRQQLPEKYKEIFFDQSKNGYAGYIDGGASQEEFYKFIKPILEKMDGTEELLVKLNREDLLRKQRTFDNGSIPHQIHLGELHAILRRQEDFYPFLKDNREKIEKILTFRIPYYVGPLARGNSRFAWMTRKSEETITPWNFEEVVDKGASAQSFIERMTNFDKNLPNEKVLPKHSLLYEYFTVYNELTKVKYVTEGMRKPAFLSGEQKKAIVDLLFKTNRKVTVKQLKEDYFKKIECFDSVEISGVEDRFNASLGTYHDLLKIIKDKDFLDNEENEDILEDIVLTLTLFEDREMIEERLKTYAHLFDDKVMKQLKRRRYTGWGRLSRKLINGIRDKQSGKTILDFLKSDGFANRNFMQLIHDDSLTFKEDIQKAQVSGQGDSLHEHIANLAGSPAIKKGILQTVKVVDELVKVMGRHKPENIVIEMARENQTTQKGQKNSRERMKRIEEGIKELGSQILKEHPVENTQLQNEKLYLYYLQNGRDMYVDQELDINRLSDYDVDHIVPQSFLKDDSIDNKVLTRSDKARGKSDNVPSEEVVKKMKNYWRQLLNAKLITQRKFDNLTKAERGGLSELDKAGFIKRQLVETRQITKHVAQILDSRMNTKYDENDKLIREVKVITLKSKLVSDFRKDFQFYKVREINNYHHAHDAYLNAVVGTALIKKYPKLESEFVYGDYKVYDVRKMIAKSEQEIGKATAKYFFYSNIMNFFKTEITLANGEIRKRPLIETNGETGEIVWDKGRDFATVRKVLSMPQVNIVKKTEVQTGGFSKESILPKRNSDKLIARKKDWDPKKYGGFDSPTVAYSVLVVAKVEKGKSKKLKSVKELLGITIMERSSFEKNPIDFLEAKGYKEVKKDLIIKLPKYSLFELENGRKRMLASAGELQKGNELALPSKYVNFLYLASHYEKLKGSPEDNEQKQLFVEQHKHYLDEIIEQISEFSKRVILADANLDKVLSAYNKHRDKPIREQAENIIHLFTLTNLGAPAAFKYFDTTIDRKRYTSTKEVLDATLIHQSITGLYETRIDLSQLGGDGGPAPGGGGGTLQLDDEYRLYSPLVKPDQNIQFWLEQFPQAWAETAGMGLAKQVPPQVIQLKASATPVSVRQYPLSKEAQEGIRPHVQRLIQQGILVPVQSPWNTPLLPVRKPGTNDYRPVQDLREVNKRVQDIHPTVPNPYNLLCALPPQRSWYTVLDLKDAFFCLRLHPTSQPLFAFEWRDPGTGRTGQLTWTRLPQGFKNSPTIFNEALHRDLANFRIQHPQVTLLQYVDDLLLAGATKQDCLEGTKALLLELSDLGYRASAKKAQICRREVTYLGYSLRDGQRWLTEARKKTVVQIPAPTTAKQVREFLGTAGFCRLWIPGFATLAAPLYPLTKPKGEFSWAPEHQKAFDAIKKALLSAPALALPDVTKPFTLYVDERKGVARGVLTQTLGPWRRPVAYLSKKLDPVASGWPVCLKAIAAVAILVKDADKLTLGQNITVIAPHALENIVRQPPDRWMTNARMTHYQSLLLTERVTFAPPAALNPATLLPEETDEPVTHDCHQLLIEETGVRKDLTDIPLTGEVLTWFTDGSSYVVEGKRMAGAAVVDGTRTIWASSLPEGTSAQKAELMALTQALRLAEGKSINIYTDSRYAFATAHVHGAIYKQRGWLTSAGREIKNKEEILSLLEALHLPKRLAIIHCPGHQKAKDPISRGNQMADRVAKQAAQGVNLLAGKRTADGSEFEKRTADGSEFESPKKKAKVE

SEQ ID NO: 333 - protein, 2083 aa, synthetic construct; identical to SEQ ID NO: 149

SEQ ID NO: 334 - protein, 2090 aa, synthetic construct; identical to SEQ ID NO: 146

SEQ ID NO: 335 - protein, 2087 aa, synthetic construct; identical to SEQ ID NO: 158

SEQ ID NO: 336 - protein, 2088 aa, synthetic construct
MPAAKRVKLDGGDKKYSIGLDIGTNSVGWAVITDEYKVPSKKFKVLGNTDRHSIKKNLIGALLFDSGETAEATRLKRTARRRYTRRKNRICYLQEIFSNEMAKVDDSFFHRLEESFLVEEDKKHERHPIFGNIVDEVAYHEKYPTIYHLRKKLVDSTDKADLRLIYLALAHMIKFRGHFLIEGDLNPDNSDVDKLFIQLVQTYNQLFEENPINASGVDAKAILSARLSKSRRLENLIAQLPGEKKNGLFGNLIALSLGLTPNFKSNFDLAEDAKLQLSKDTYDDDLDNLLAQIGDQYADLFLAAKNLSDAILLSDILRVNTEITKAPLSASMIKRYDEHHQDLTLLKALVRQQLPEKYKEIFFDQSKNGYAGYIDGGASQEEFYKFIKPILEKMDGTEELLVKLNREDLLRKQRTFDNGSIPHQIHLGELHAILRRQEDFYPFLKDNREKIEKILTFRIPYYVGPLARGNSRFAWMTRKSEETITPWNFEEVVDKGASAQSFIERMTNFDKNLPNEKVLPKHSLLYEYFTVYNELTKVKYVTEGMRKPAFLSGEQKKAIVDLLFKTNRKVTVKQLKEDYFKKIECFDSVEISGVEDRFNASLGTYHDLLKIIKDKDFLDNEENEDILEDIVLTLTLFEDREMIEERLKTYAHLFDDKVMKQLKRRRYTGWGRLSRKLINGIRDKQSGKTILDFLKSDGFANRNFMQLIHDDSLTFKEDIQKAQVSGQGDSLHEHIANLAGSPAIKKGILQTVKVVDELVKVMGRHKPENIVIEMARENQTTQKGQKNSRERMKRIEEGIKELGSQILKEHPVENTQLQNEKLYLYYLQNGRDMYVDQELDINRLSDYDVDHIVPQSFLKDDSIDNKVLTRSDKARGKSDNVPSEEVVKKMKNYWRQLLNAKLITQRKFDNLTKAERGGLSELDKAGFIKRQLVETRQITKHVAQILDSRMNTKYDENDKLIREVKVITLKSKLVSDFRKDFQFYKVREINNYHHAHDAYLNAVVGTALIKKYPKLESEFVYGDYKVYDVRKMIAKSEQEIGKATAKYFFYSNIMNFFKTEITLANGEIRKRPLIETNGETGEIVWDKGRDFATVRKVLSMPQVNIVKKTEVQTGGFSKESILPKRNSDKLIARKKDWDPKKYGGFDSPTVAYSVLVVAKVEKGKSKKLKSVKELLGITIMERSSFEKNPIDFLEAKGYKEVKKDLIIKLPKYSLFELENGRKRMLASAGELQKGNELALPSKYVNFLYLASHYEKLKGSPEDNEQKQLFVEQHKHYLDEIIEQISEFSKRVILADANLDKVLSAYNKHRDKPIREQAENIIHLFTLTNLGAPAAFKYFDTTIDRKRYTSTKEVLDATLIHQSITGLYETRIDLSQLGGDGGGGSGGGGSSGGTLQLDDEYRLYSPLVKPDQNIQFWLEQFPQAWAETAGMGLAKQVPPQVIQLKASATPVSVRQYPLSKEAQEGIRPHVQRLIQQGILVPVQSPWNTPLLPVRKPGTNDYRPVQDLREVNKRVQDIHPTVPNPYNLLCALPPQRSWYTVLDLKDAFFCLRLHPTSQPLFAFEWRDPGTGRTGQLTWTRLPQGFKNSPTIFNEALHRDLANFRIQHPQVTLLQYVDDLLLAGATKQDCLEGTKALLLELSDLGYRASAKKAQICRREVTYLGYSLRDGQRWLTEARKKTVVQIPAPTTAKQVREFLGTAGFCRLWIPGFATLAAPLYPLTKPKGEFSWAPEHQKAFDAIKKALLSAPALALPDVTKPFTLYVDERKGVARGVLTQTLGPWRRPVAYLSKKLDPVASGWPVCLKAIAAVAILVKDADKLTLGQNITVIAPHALENIVRQPPDRWMTNARMTHYQSLLLTERVTFAPPAALNPATLLPEETDEPVTHDCHQLLIEETGVRKDLTDIPLTGEVLTWFTDGSSYVVEGKRMAGAAVVDGTRTIWASSLPEGTSAQKAELMALTQALRLAEGKSINIYTDSRYAFATAHVHGAIYKQRGWLTSAGREIKNKEEILSLLEALHLPKRLAIIHCPGHQKAKDPISRGNQMADRVAKQAAQGVNLLAGKRTADGSEFEKRTADGSEFESPKKKAKVE

SEQ ID NO: 337 - protein, 2104 aa, synthetic construct; identical to SEQ ID NO: 150

SEQ ID NO: 338 - protein, 2088 aa, synthetic construct; identical to SEQ ID NO: 169

SEQ ID NO: 339 - protein, 2088 aa, synthetic construct; identical to SEQ ID NO: 162

SEQ ID NO: 340 - protein, 2088 aa, synthetic construct; identical to SEQ ID NO: 173

SEQ ID NO: 341 - protein, 2090 aa, synthetic construct; identical to SEQ ID NO: 141

SEQ ID NO: 342 - protein, 2094 aa, synthetic construct
MPAAKRVKLDGGDKKYSIGLDIGTNSVGWAVITDEYKVPSKKFKVLGNTDRHSIKKNLIGALLFDSGETAEATRLKRTARRRYTRRKNRICYLQEIFSNEMAKVDDSFFHRLEESFLVEEDKKHERHPIFGNIVDEVAYHEKYPTIYHLRKKLVDSTDKADLRLIYLALAHMIKFRGHFLIEGDLNPDNSDVDKLFIQLVQTYNQLFEENPINASGVDAKAILSARLSKSRRLENLIAQLPGEKKNGLFGNLIALSLGLTPNFKSNFDLAEDAKLQLSKDTYDDDLDNLLAQIGDQYADLFLAAKNLSDAILLSDILRVNTEITKAPLSASMIKRYDEHHQDLTLLKALVRQQLPEKYKEIFFDQSKNGYAGYIDGGASQEEFYKFIKPILEKMDGTEELLVKLNREDLLRKQRTFDNGSIPHQIHLGELHAILRRQEDFYPFLKDNREKIEKILTFRIPYYVGPLARGNSRFAWMTRKSEETITPWNFEEVVDKGASAQSFIERMTNFDKNLPNEKVLPKHSLLYEYFTVYNELTKVKYVTEGMRKPAFLSGEQKKAIVDLLFKTNRKVTVKQLKEDYFKKIECFDSVEISGVEDRFNASLGTYHDLLKIIKDKDFLDNEENEDILEDIVLTLTLFEDREMIEERLKTYAHLFDDKVMKQLKRRRYTGWGRLSRKLINGIRDKQSGKTILDFLKSDGFANRNFMQLIHDDSLTFKEDIQKAQVSGQGDSLHEHIANLAGSPAIKKGILQTVKVVDELVKVMGRHKPENIVIEMARENQTTQKGQKNSRERMKRIEEGIKELGSQILKEHPVENTQLQNEKLYLYYLQNGRDMYVDQELDINRLSDYDVDHIVPQSFLKDDSIDNKVLTRSDKARGKSDNVPSEEVVKKMKNYWRQLLNAKLITQRKFDNLTKAERGGLSELDKAGFIKRQLVETRQITKHVAQILDSRMNTKYDENDKLIREVKVITLKSKLVSDFRKDFQFYKVREINNYHHAHDAYLNAVVGTALIKKYPKLESEFVYGDYKVYDVRKMIAKSEQEIGKATAKYFFYSNIMNFFKTEITLANGEIRKRPLIETNGETGEIVWDKGRDFATVRKVLSMPQVNIVKKTEVQTGGFSKESILPKRNSDKLIARKKDWDPKKYGGFDSPTVAYSVLVVAKVEKGKSKKLKSVKELLGITIMERSSFEKNPIDFLEAKGYKEVKKDLIIKLPKYSLFELENGRKRMLASAGELQKGNELALPSKYVNFLYLASHYEKLKGSPEDNEQKQLFVEQHKHYLDEIIEQISEFSKRVILADANLDKVLSAYNKHRDKPIREQAENIIHLFTLTNLGAPAAFKYFDTTIDRKRYTSTKEVLDATLIHQSITGLYETRIDLSQLGGDGGEAAAKGGGGSEAAAKGGTLQLDDEYRLYSPLVKPDQNIQFWLEQFPQAWAETAGMGLAKQVPPQVIQLKASATPVSVRQYPLSKEAQEGIRPHVQRLIQQGILVPVQSPWNTPLLPVRKPGTNDYRPVQDLREVNKRVQDIHPTVPNPYNLLCALPPQRSWYTVLDLKDAFFCLRLHPTSQPLFAFEWRDPGTGRTGQLTWTRLPQGFKNSPTIFNEALHRDLANFRIQHPQVTLLQYVDDLLLAGATKQDCLEGTKALLLELSDLGYRASAKKAQICRREVTYLGYSLRDGQRWLTEARKKTVVQIPAPTTAKQVREFLGTAGFCRLWIPGFATLAAPLYPLTKPKGEFSWAPEHQKAFDAIKKALLSAPALALPDVTKPFTLYVDERKGVARGVLTQTLGPWRRPVAYLSKKLDPVASGWPVCLKAIAAVAILVKDADKLTLGQNITVIAPHALENIVRQPPDRWMTNARMTHYQSLLLTERVTFAPPAALNPATLLPEETDEPVTHDCHQLLIEETGVRKDLTDIPLTGEVLTWFTDGSSYVVEGKRMAGAAVVDGTRTIWASSLPEGTSAQKAELMALTQALRLAEGKSINIYTDSRYAFATAHVHGAIYKQRGWLTSAGREIKNKEEILSLLEALHLPKRLAIIHCPGHQKAKDPISRGNQMADRVAKQAAQGVNLLAGKRTADGSEFEKRTADGSEFESPKKKAKVE

SEQ ID NO: 343 - protein, 2087 aa, synthetic construct
MPAAKRVKLDGGDKKYSIGLDIGTNSVGWAVITDEYKVPSKKFKVLGNTDRHSIKKNLIGALLFDSGETAEATRLKRTARRRYTRRKNRICYLQEIFSNEMAKVDDSFFHRLEESFLVEEDKKHERHPIFGNIVDEVAYHEKYPTIYHLRKKLVDSTDKADLRLIYLALAHMIKFRGHFLIEGDLNPDNSDVDKLFIQLVQTYNQLFEENPINASGVDAKAILSARLSKSRRLENLIAQLPGEKKNGLFGNLIALSLGLTPNFKSNFDLAEDAKLQLSKDTYDDDLDNLLAQIGDQYADLFLAAKNLSDAILLSDILRVNTEITKAPLSASMIKRYDEHHQDLTLLKALVRQQLPEKYKEIFFDQSKNGYAGYIDGGASQEEFYKFIKPILEKMDGTEELLVKLNREDLLRKQRTFDNGSIPHQIHLGELHAILRRQEDFYPFLKDNREKIEKILTFRIPYYVGPLARGNSRFAWMTRKSEETITPWNFEEVVDKGASAQSFIERMTNFDKNLPNEKVLPKHSLLYEYFTVYNELTKVKYVTEGMRKPAFLSGEQKKAIVDLLFKTNRKVTVKQLKEDYFKKIECFDSVEISGVEDRFNASLGTYHDLLKIIKDKDFLDNEENEDILEDIVLTLTLFEDREMIEERLKTYAHLFDDKVMKQLKRRRYTGWGRLSRKLINGIRDKQSGKTILDFLKSDGFANRNFMQLIHDDSLTFKEDIQKAQVSGQGDSLHEHIANLAGSPAIKKGILQTVKVVDELVKVMGRHKPENIVIEMARENQTTQKGQKNSRERMKRIEEGIKELGSQILKEHPVENTQLQNEKLYLYYLQNGRDMYVDQELDINRLSDYDVDHIVPQSFLKDDSIDNKVLTRSDKARGKSDNVPSEEVVKKMKNYWRQLLNAKLITQRKFDNLTKAERGGLSELDKAGFIKRQLVETRQITKHVAQILDSRMNTKYDENDKLIREVKVITLKSKLVSDFRKDFQFYKVREINNYHHAHDAYLNAVVGTALIKKYPKLESEFVYGDYKVYDVRKMIAKSEQEIGKATAKYFFYSNIMNFFKTEITLANGEIRKRPLIETNGETGEIVWDKGRDFATVRKVLSMPQVNIVKKTEVQTGGFSKESILPKRNSDKLIARKKDWDPKKYGGFDSPTVAYSVLVVAKVEKGKSKKLKSVKELLGITIMERSSFEKNPIDFLEAKGYKEVKKDLIIKLPKYSLFELENGRKRMLASAGELQKGNELALPSKYVNFLYLASHYEKLKGSPEDNEQKQLFVEQHKHYLDEIIEQISEFSKRVILADANLDKVLSAYNKHRDKPIREQAENIIHLFTLTNLGAPAAFKYFDTTIDRKRYTSTKEVLDATLIHQSITGLYETRIDLSQLGGDGGEAAAKPAPGGTLQLDDEYRLYSPLVKPDQNIQFWLEQFPQAWAETAGMGLAKQVPPQVIQLKASATPVSVRQYPLSKEAQEGIRPHVQRLIQQGILVPVQSPWNTPLLPVRKPGTNDYRPVQDLREVNKRVQDIHPTVPNPYNLLCALPPQRSWYTVLDLKDAFFCLRLHPTSQPLFAFEWRDPGTGRTGQLTWTRLPQGFKNSPTIFNEALHRDLANFRIQHPQVTLLQYVDDLLLAGATKQDCLEGTKALLLELSDLGYRASAKKAQICRREVTYLGYSLRDGQRWLTEARKKTVVQIPAPTTAKQVREFLGTAGFCRLWIPGFATLAAPLYPLTKPKGEFSWAPEHQKAFDAIKKALLSAPALALPDVTKPFTLYVDERKGVARGVLTQTLGPWRRPVAYLSKKLDPVASGWPVCLKAIAAVAILVKDADKLTLGQNITVIAPHALENIVRQPPDRWMTNARMTHYQSLLLTERVTFAPPAALNPATLLPEETDEPVTHDCHQLLIEETGVRKDLTDIPLTGEVLTWFTDGSSYVVEGKRMAGAAVVDGTRTIWASSLPEGTSAQKAELMALTQALRLAEGKSINIYTDSRYAFATAHVHGAIYKQRGWLTSAGREIKNKEEILSLLEALHLPKRLAIIHCPGHQKAKDPISRGNQMADRVAKQAAQGVNLLAGKRTADGSEFEKRTADGSEFESPKKKAKVE

SEQ ID NO: 344 - protein, 2088 aa, synthetic construct; identical to SEQ ID NO: 131

SEQ ID NO: 345 - protein, 2085 aa, synthetic construct
MPAAKRVKLDGGDKKYSIGLDIGTNSVGWAVITDEYKVPSKKFKVLGNTDRHSIKKNLIGALLFDSGETAEATRLKRTARRRYTRRKNRICYLQEIFSNEMAKVDDSFFHRLEESFLVEEDKKHERHPIFGNIVDEVAYHEKYPTIYHLRKKLVDSTDKADLRLIYLALAHMIKFRGHFLIEGDLNPDNSDVDKLFIQLVQTYNQLFEENPINASGVDAKAILSARLSKSRRLENLIAQLPGEKKNGLFGNLIALSLGLTPNFKSNFDLAEDAKLQLSKDTYDDDLDNLLAQIGDQYADLFLAAKNLSDAILLSDILRVNTEITKAPLSASMIKRYDEHHQDLTLLKALVRQQLPEKYKEIFFDQSKNGYAGYIDGGASQEEFYKFIKPILEKMDGTEELLVKLNREDLLRKQRTFDNGSIPHQIHLGELHAILRRQEDFYPFLKDNREKIEKILTFRIPYYVGPLARGNSRFAWMTRKSEETITPWNFEEVVDKGASAQSFIERMTNFDKNLPNEKVLPKHSLLYEYFTVYNELTKVKYVTEGMRKPAFLSGEQKKAIVDLLFKTNRKVTVKQLKEDYFKKIECFDSVEISGVEDRFNASLGTYHDLLKIIKDKDFLDNEENEDILEDIVLTLTLFEDREMIEERLKTYAHLFDDKVMKQLKRRRYTGWGRLSRKLINGIRDKQSGKTILDFLKSDGFANRNFMQLIHDDSLTFKEDIQKAQVSGQGDSLHEHIANLAGSPAIKKGILQTVKVVDELVKVMGRHKPENIVIEMARENQTTQKGQKNSRERMKRIEEGIKELGSQILKEHPVENTQLQNEKLYLYYLQNGRDMYVDQELDINRLSDYDVDHIVPQSFLKDDSIDNKVLTRSDKARGKSDNVPSEEVVKKMKNYWRQLLNAKLITQRKFDNLTKAERGGLSELDKAGFIKRQLVETRQITKHVAQILDSRMNTKYDENDKLIREVKVITLKSKLVSDFRKDFQFYKVREINNYHHAHDAYLNAVVGTALIKKYPKLESEFVYGDYKVYDVRKMIAKSEQEIGKATAKYFFYSNIMNFFKTEITLANGEIRKRPLIETNGETGEIVWDKGRDFATVRKVLSMPQVNIVKKTEVQTGGFSKESILPKRNSDKLIARKKDWDPKKYGGFDSPTVAYSVLVVAKVEKGKSKKLKSVKELLGITIMERSSFEKNPIDFLEAKGYKEVKKDLIIKLPKYSLFELENGRKRMLASAGELQKGNELALPSKYVNFLYLASHYEKLKGSPEDNEQKQLFVEQHKHYLDEIIEQISEFSKRVILADANLDKVLSAYNKHRDKPIREQAENIIHLFTLTNLGAPAAFKYFDTTIDRKRYTSTKEVLDATLIHQSITGLYETRIDLSQLGGDGGGGSPAPGGTLQLDDEYRLYSPLVKPDQNIQFWLEQFPQAWAETAGMGLAKQVPPQVIQLKASATPVSVRQYPLSKEAQEGIRPHVQRLIQQGILVPVQSPWNTPLLPVRKPGTNDYRPVQDLREVNKRVQDIHPTVPNPYNLLCALPPQRSWYTVLDLKDAFFCLRLHPTSQPLFAFEWRDPGTGRTGQLTWTRLPQGFKNSPTIFNEALHRDLANFRIQHPQVTLLQYVDDLLLAGATKQDCLEGTKALLLELSDLGYRASAKKAQICRREVTYLGYSLRDGQRWLTEARKKTVVQIPAPTTAKQVREFLGTAGFCRLWIPGFATLAAPLYPLTKPKGEFSWAPEHQKAFDAIKKALLSAPALALPDVTKPFTLYVDERKGVARGVLTQTLGPWRRPVAYLSKKLDPVASGWPVCLKAIAAVAILVKDADKLTLGQNITVIAPHALENIVRQPPDRWMTNARMTHYQSLLLTERVTFAPPAALNPATLLPEETDEPVTHDCHQLLIEETGVRKDLTDIPLTGEVLTWFTDGSSYVVEGKRMAGAAVVDGTRTIWASSLPEGTSAQKAELMALTQALRLAEGKSINIYTDSRYAFATAHVHGAIYKQRGWLTSAGREIKNKEEILSLLEALHLPKRLAIIHCPGHQKAKDPISRGNQMADRVAKQAAQGVNLLAGKRTADGSEFEKRTADGSEFESPKKKAKVE

SEQ ID NO: 346 - protein, 2090 aa, synthetic construct
MPAAKRVKLDGGDKKYSIGLDIGTNSVGWAVITDEYKVPSKKFKVLGNTDRHSIKKNLIGALLFDSGETAEATRLKRTARRRYTRRKNRICYLQEIFSNEMAKVDDSFFHRLEESFLVEEDKKHERHPIFGNIVDEVAYHEKYPTIYHLRKKLVDSTDKADLRLIYLALAHMIKFRGHFLIEGDLNPDNSDVDKLFIQLVQTYNQLFEENPINASGVDAKAILSARLSKSRRLENLIAQLPGEKKNGLFGNLIALSLGLTPNFKSNFDLAEDAKLQLSKDTYDDDLDNLLAQIGDQYADLFLAAKNLSDAILLSDILRVNTEITKAPLSASMIKRYDEHHQDLTLLKALVRQQLPEKYKEIFFDQSKNGYAGYIDGGASQEEFYKFIKPILEKMDGTEELLVKLNREDLLRKQRTFDNGSIPHQIHLGELHAILRRQEDFYPFLKDNREKIEKILTFRIPYYVGPLARGNSRFAWMTRKSEETITPWNFEEVVDKGASAQSFIERMTNFDKNLPNEKVLPKHSLLYEYFTVYNELTKVKYVTEGMRKPAFLSGEQKKAIVDLLFKTNRKVTVKQLKEDYFKKIECFDSVEISGVEDRFNASLGTYHDLLKIIKDKDFLDNEENEDILEDIVLTLTLFEDREMIEERLKTYAHLFDDKVMKQLKRRRYTGWGRLSRKLINGIRDKQSGKTILDFLKSDGFANRNFMQLIHDDSLTFKEDIQKAQVSGQGDSLHEHIANLAGSPAIKKGILQTVKVVDELVKVMGRHKPENIVIEMARENQTTQKGQKNSRERMKRIEEGIKELGSQILKEHPVENTQLQNEKLYLYYLQNGRDMYVDQELDINRLSDYDVDHIVPQSFLKDDSIDNKVLTRSDKARGKSDNVPSEEVVKKMKNYWRQLLNAKLITQRKFDNLTKAERGGLSELDKAGFIKRQLVETRQITKHVAQILDSRMNTKYDENDKLIREVKVITLKSKLVSDFRKDFQFYKVREINNYHHAHDAYLNAVVGTALIKKYPKLESEFVYGDYKVYDVRKMIAKSEQEIGKATAKYFFYSNIMNFFKTEITLANGEIRKRPLIETNGETGEIVWDKGRDFATVRKVLSMPQVNIVKKTEVQTGGFSKESILPKRNSDKLIARKKDWDPKKYGGFDSPTVAYSVLVVAKVEKGKSKKLKSVKELLGITIMERSSFEKNPIDFLEAKGYKEVKKDLIIKLPKYSLFELENGRKRMLASAGELQKGNELALPSKYVNFLYLASHYEKLKGSPEDNEQKQLFVEQHKHYLDEIIEQISEFSKRVILADANLDKVLSAYNKHRDKPIREQAENIIHLFTLTNLGAPAAFKYFDTTIDRKRYTSTKEVLDATLIHQSITGLYETRIDLSQLGGDGGGGGPAPEAAAKGGTLQLDDEYRLYSPLVKPDQNIQFWLEQFPQAWAETAGMGLAKQVPPQVIQLKASATPVSVRQYPLSKEAQEGIRPHVQRLIQQGILVPVQSPWNTPLLPVRKPGTNDYRPVQDLREVNKRVQDIHPTVPNPYNLLCALPPQRSWYTVLDLKDAFFCLRLHPTSQPLFAFEWRDPGTGRTGQLTWTRLPQGFKNSPTIFNEALHRDLANFRIQHPQVTLLQYVDDLLLAGATKQDCLEGTKALLLELSDLGYRASAKKAQICRREVTYLGYSLRDGQRWLTEARKKTVVQIPAPTTAKQVREFLGTAGFCRLWIPGFATLAAPLYPLTKPKGEFSWAPEHQKAFDAIKKALLSAPALALPDVTKPFTLYVDERKGVARGVLTQTLGPWRRPVAYLSKKLDPVASGWPVCLKAIAAVAILVKDADKLTLGQNITVIAPHALENIVRQPPDRWMTNARMTHYQSLLLTERVTFAPPAALNPATLLPEETDEPVTHDCHQLLIEETGVRKDLTDIPLTGEVLTWFTDGSSYVVEGKRMAGAAVVDGTRTIWASSLPEGTSAQKAELMALTQALRLAEGKSINIYTDSRYAFATAHVHGAIYKQRGWLTSAGREIKNKEEILSLLEALHLPKRLAIIHCPGHQKAKDPISRGNQMADRVAKQAAQGVNLLAGKRTADGSEFEKRTADGSEFESPKKKAKVE

SEQ ID NO: 347 - protein, 2082 aa, synthetic construct; identical to SEQ ID NO: 177

SEQ ID NO: 348 - protein, 2090 aa, synthetic construct
MPAAKRVKLDGGDKKYSIGLDIGTNSVGWAVITDEYKVPSKKFKVLGNTDRHSIKKNLIGALLFDSGETAEATRLKRTARRRYTRRKNRICYLQEIFSNEMAKVDDSFFHRLEESFLVEEDKKHERHPIFGNIVDEVAYHEKYPTIYHLRKKLVDSTDKADLRLIYLALAHMIKFRGHFLIEGDLNPDNSDVDKLFIQLVQTYNQLFEENPINASGVDAKAILSARLSKSRRLENLIAQLPGEKKNGLFGNLIALSLGLTPNFKSNFDLAEDAKLQLSKDTYDDDLDNLLAQIGDQYADLFLAAKNLSDAILLSDILRVNTEITKAPLSASMIKRYDEHHQDLTLLKALVRQQLPEKYKEIFFDQSKNGYAGYIDGGASQEEFYKFIKPILEKMDGTEELLVKLNREDLLRKQRTFDNGSIPHQIHLGELHAILRRQEDFYPFLKDNREKIEKILTFRIPYYVGPLARGNSRFAWMTRKSEETITPWNFEEVVDKGASAQSFIERMTNFDKNLPNEKVLPKHSLLYEYFTVYNELTKVKYVTEGMRKPAFLSGEQKKAIVDLLFKTNRKVTVKQLKEDYFKKIECFDSVEISGVEDRFNASLGTYHDLLKIIKDKDFLDNEENEDILEDIVLTLTLFEDREMIEERLKTYAHLFDDKVMKQLKRRRYTGWGRLSRKLINGIRDKQSGKTILDFLKSDGFANRNFMQLIHDDSLTFKEDIQKAQVSGQGDSLHEHIANLAGSPAIKKGILQTVKVVDELVKVMGRHKPENIVIEMARENQTTQKGQKNSRERMKRIEEGIKELGSQILKEHPVENTQLQNEKLYLYYLQNGRDMYVDQELDINRLSDYDVDHIVPQSFLKDDSIDNKVLTRSDKARGKSDNVPSEEVVKKMKNYWRQLLNAKLITQRKFDNLTKAERGGLSELDKAGFIKRQLVETRQITKHVAQILDSRMNTKYDENDKLIREVKVITLKSKLVSDFRKDFQFYKVREINNYHHAHDAYLNAVVGTALIKKYPKLESEFVYGDYKVYDVRKMIAKSEQEIGKATAKYFFYSNIMNFFKTEITLANGEIRKRPLIETNGETGEIVWDKGRDFATVRKVLSMPQVNIVKKTEVQTGGFSKESILPKRNSDKLIARKKDWDPKKYGGFDSPTVAYSVLVVAKVEKGKSKKLKSVKELLGITIMERSSFEKNPIDFLEAKGYKEVKKDLIIKLPKYSLFELENGRKRMLASAGELQKGNELALPSKYVNFLYLASHYEKLKGSPEDNEQKQLFVEQHKHYLDEIIEQISEFSKRVILADANLDKVLSAYNKHRDKPIREQAENIIHLFTLTNLGAPAAFKYFDTTIDRKRYTSTKEVLDATLIHQSITGLYETRIDLSQLGGDGGEAAAKGGGPAPGGTLQLDDEYRLYSPLVKPDQNIQFWLEQFPQAWAETAGMGLAKQVPPQVIQLKASATPVSVRQYPLSKEAQEGIRPHVQRLIQQGILVPVQSPWNTPLLPVRKPGTNDYRPVQDLREVNKRVQDIHPTVPNPYNLLCALPPQRSWYTVLDLKDAFFCLRLHPTSQPLFAFEWRDPGTGRTGQLTWTRLPQGFKNSPTIFNEALHRDLANFRIQHPQVTLLQYVDDLLLAGATKQDCLEGTKALLLELSDLGYRASAKKAQICRREVTYLGYSLRDGQRWLTEARKKTVVQIPAPTTAKQVREFLGTAGFCRLWIPGFATLAAPLYPLTKPKGEFSWAPEHQKAFDAIKKALLSAPALALPDVTKPFTLYVDERKGVARGVLTQTLGPWRRPVAYLSKKLDPVASGWPVCLKAIAAVAILVKDADKLTLGQNITVIAPHALENIVRQPPDRWMTNARMTHYQSLLLTERVTFAPPAALNPATLLPEETDEPVTHDCHQLLIEETGVRKDLTDIPLTGEVLTWFTDGSSYVVEGKRMAGAAVVDGTRTIWASSLPEGTSAQKAELMALTQALRLAEGKSINIYTDSRYAFATAHVHGAIYKQRGWLTSAGREIKNKEEILSLLEALHLPKRLAIIHCPGHQKAKDPISRGNQMADRVAKQAAQGVNLLAGKRTADGSEFEKRTADGSEFESPKKKAKVE

SEQ ID NO: 349 - protein, 2090 aa, synthetic construct; identical to SEQ ID NO: 136

SEQ ID NO: 350 - protein, 2090 aa, synthetic construct; identical to SEQ ID NO: 115

SEQ ID NO: 351 - protein, 2099 aa, synthetic construct; identical to SEQ ID NO: 137

SEQ ID NO: 352 - protein, 2090 aa, synthetic construct
MPAAKRVKLDGGDKKYSIGLDIGTNSVGWAVITDEYKVPSKKFKVLGNTDRHSIKKNLIGALLFDSGETAEATRLKRTARRRYTRRKNRICYLQEIFSNEMAKVDDSFFHRLEESFLVEEDKKHERHPIFGNIVDEVAYHEKYPTIYHLRKKLVDSTDKADLRLIYLALAHMIKFRGHFLIEGDLNPDNSDVDKLFIQLVQTYNQLFEENPINASGVDAKAILSARLSKSRRLENLIAQLPGEKKNGLFGNLIALSLGLTPNFKSNFDLAEDAKLQLSKDTYDDDLDNLLAQIGDQYADLFLAAKNLSDAILLSDILRVNTEITKAPLSASMIKRYDEHHQDLTLLKALVRQQLPEKYKEIFFDQSKNGYAGYIDGGASQEEFYKFIKPILEKMDGTEELLVKLNREDLLRKQRTFDNGSIPHQIHLGELHAILRRQEDFYPFLKDNREKIEKILTFRIPYYVGPLARGNSRFAWMTRKSEETITPWNFEEVVDKGASAQSFIERMTNFDKNLPNEKVLPKHSLLYEYFTVYNELTKVKYVTEGMRKPAFLSGEQKKAIVDLLFKTNRKVTVKQLKEDYFKKIECFDSVEISGVEDRFNASLGTYHDLLKIIKDKDFLDNEENEDILEDIVLTLTLFEDREMIEERLKTYAHLFDDKVMKQLKRRRYTGWGRLSRKLINGIRDKQSGKTILDFLKSDGFANRNFMQLIHDDSLTFKEDIQKAQVSGQGDSLHEHIANLAGSPAIKKGILQTVKVVDELVKVMGRHKPENIVIEMARENQTTQKGQKNSRERMKRIEEGIKELGSQILKEHPVENTQLQNEKLYLYYLQNGRDMYVDQELDINRLSDYDVDHIVPQSFLKDDSIDNKVLTRSDKARGKSDNVPSEEVVKKMKNYWRQLLNAKLITQRKFDNLTKAERGGLSELDKAGFIKRQLVETRQITKHVAQILDSRMNTKYDENDKLIREVKVITLKSKLVSDFRKDFQFYKVREINNYHHAHDAYLNAVVGTALIKKYPKLESEFVYGDYKVYDVRKMIAKSEQEIGKATAKYFFYSNIMNFFKTEITLANGEIRKRPLIETNGETGEIVWDKGRDFATVRKVLSMPQVNIVKKTEVQTGGFSKESILPKRNSDKLIARKKDWDPKKYGGFDSPTVAYSVLVVAKVEKGKSKKLKSVKELLGITIMERSSFEKNPIDFLEAKGYKEVKKDLIIKLPKYSLFELENGRKRMLASAGELQKGNELALPSKYVNFLYLASHYEKLKGSPEDNEQKQLFVEQHKHYLDEIIEQISEFSKRVILADANLDKVLSAYNKHRDKPIREQAENIIHLFTLTNLGAPAAFKYFDTTIDRKRYTSTKEVLDATLIHQSITGLYETRIDLSQLGGDGGGGSEAAAKGGGGGTLQLDDEYRLYSPLVKPDQNIQFWLEQFPQAWAETAGMGLAKQVPPQVIQLKASATPVSVRQYPLSKEAQEGIRPHVQRLIQQGILVPVQSPWNTPLLPVRKPGTNDYRPVQDLREVNKRVQDIHPTVPNPYNLLCALPPQRSWYTVLDLKDAFFCLRLHPTSQPLFAFEWRDPGTGRTGQLTWTRLPQGFKNSPTIFNEALHRDLANFRIQHPQVTLLQYVDDLLLAGATKQDCLEGTKALLLELSDLGYRASAKKAQICRREVTYLGYSLRDGQRWLTEARKKTVVQIPAPTTAKQVREFLGTAGFCRLWIPGFATLAAPLYPLTKPKGEFSWAPEHQKAFDAIKKALLSAPALALPDVTKPFTLYVDERKGVARGVLTQTLGPWRRPVAYLSKKLDPVASGWPVCLKAIAAVAILVKDADKLTLGQNITVIAPHALENIVRQPPDRWMTNARMTHYQSLLLTERVTFAPPAALNPATLLPEETDEPVTHDCHQLLIEETGVRKDLTDIPLTGEVLTWFTDGSSYVVEGKRMAGAAVVDGTRTIWASSLPEGTSAQKAELMALTQALRLAEGKSINIYTDSRYAFATAHVHGAIYKQRGWLTSAGREIKNKEEILSLLEALHLPKRLAIIHCPGHQKAKDPISRGNQMADRVAKQAAQGVNLLAGKRTADGSEFEKRTADGSEFESPKKKAKVE

SEQ ID NO: 353 - protein, 2085 aa, synthetic construct; identical to SEQ ID NO: 183

SEQ ID NO: 354 - protein, 2090 aa, synthetic construct
MPAAKRVKLDGGDKKYSIGLDIGTNSVGWAVITDEYKVPSKKFKVLGNTDRHSIKKNLIGALLFDSGETAEATRLKRTARRRYTRRKNRICYLQEIFSNEMAKVDDSFFHRLEESFLVEEDKKHERHPIFGNIVDEVAYHEKYPTIYHLRKKLVDSTDKADLRLIYLALAHMIKFRGHFLIEGDLNPDNSDVDKLFIQLVQTYNQLFEENPINASGVDAKAILSARLSKSRRLENLIAQLPGEKKNGLFGNLIALSLGLTPNFKSNFDLAEDAKLQLSKDTYDDDLDNLLAQIGDQYADLFLAAKNLSDAILLSDILRVNTEITKAPLSASMIKRYDEHHQDLTLLKALVRQQLPEKYKEIFFDQSKNGYAGYIDGGASQEEFYKFIKPILEKMDGTEELLVKLNREDLLRKQRTFDNGSIPHQIHLGELHAILRRQEDFYPFLKDNREKIEKILTFRIPYYVGPLARGNSRFAWMTRKSEETITPWNFEEVVDKGASAQSFIERMTNFDKNLPNEKVLPKHSLLYEYFTVYNELTKVKYVTEGMRKPAFLSGEQKKAIVDLLFKTNRKVTVKQLKEDYFKKIECFDSVEISGVEDRFNASLGTYHDLLKIIKDKDFLDNEENEDILEDIVLTLTLFEDREMIEERLKTYAHLFDDKVMKQLKRRRYTGWGRLSRKLINGIRDKQSGKTILDFLKSDGFANRNFMQLIHDDSLTFKEDIQKAQVSGQGDSLHEHIANLAGSPAIKKGILQTVKVVDELVKVMGRHKPENIVIEMARENQTTQKGQKNSRERMKRIEEGIKELGSQILKEHPVENTQLQNEKLYLYYLQNGRDMYVDQELDINRLSDYDVDHIVPQSFLKDDSIDNKVLTRSDKARGKSDNVPSEEVVKKMKNYWRQLLNAKLITQRKFDNLTKAERGGLSELDKAGFIKRQLVETRQITKHVAQILDSRMNTKYDENDKLIREVKVITLKSKLVSDFRKDFQFYKVREINNYHHAHDAYLNAVVGTALIKKYPKLESEFVYGDYKVYDVRKMIAKSEQEIGKATAKYFFYSNIMNFFKTEITLANGEIRKRPLIETNGETGEIVWDKGRDFATVRKVLSMPQVNIVKKTEVQTGGFSKESILPKRNSDKLIARKKDWDPKKYGGFDSPTVAYSVLVVAKVEKGKSKKLKSVKELLGITIMERSSFEKNPIDFLEAKGYKEVKKDLIIKLPKYSLFELENGRKRMLASAGELQKGNELALPSKYVNFLYLASHYEKLKGSPEDNEQKQLFVEQHKHYLDEIIEQISEFSKRVILADANLDKVLSAYNKHRDKPIREQAENIIHLFTLTNLGAPAAFKYFDTTIDRKRYTSTKEVLDATLIHQSITGLYETRIDLSQLGGDGGEAAAKGGGGGSGGTLQLDDEYRLYSPLVKPDQNIQFWLEQFPQAWAETAGMGLAKQVPPQVIQLKASATPVSVRQYPLSKEAQEGIRPHVQRLIQQGILVPVQSPWNTPLLPVRKPGTNDYRPVQDLREVNKRVQDIHPTVPNPYNLLCALPPQRSWYTVLDLKDAFFCLRLHPTSQPLFAFEWRDPGTGRTGQLTWTRLPQGFKNSPTIFNEALHRDLANFRIQHPQVTLLQYVDDLLLAGATKQDCLEGTKALLLELSDLGYRASAKKAQICRREVTYLGYSLRDGQRWLTEARKKTVVQIPAPTTAKQVREFLGTAGFCRLWIPGFATLAAPLYPLTKPKGEFSWAPEHQKAFDAIKKALLSAPALALPDVTKPFTLYVDERKGVARGVLTQTLGPWRRPVAYLSKKLDPVASGWPVCLKAIAAVAILVKDADKLTLGQNITVIAPHALENIVRQPPDRWMTNARMTHYQSLLLTERVTFAPPAALNPATLLPEETDEPVTHDCHQLLIEETGVRKDLTDIPLTGEVLTWFTDGSSYVVEGKRMAGAAVVDGTRTIWASSLPEGTSAQKAELMALTQALRLAEGKSINIYTDSRYAFATAHVHGAIYKQRGWLTSAGREIKNKEEILSLLEALHLPKRLAIIHCPGHQKAKDPISRGNQMADRVAKQAAQGVNLLAGKRTADGSEFEKRTADGSEFESPKKKAKVE

SEQ ID NO: 355 - protein, 2099 aa, synthetic construct
MPAAKRVKLDGGDKKYSIGLDIGTNSVGWAVITDEYKVPSKKFKVLGNTDRHSIKKNLIGALLFDSGETAEATRLKRTARRRYTRRKNRICYLQEIFSNEMAKVDDSFFHRLEESFLVEEDKKHERHPIFGNIVDEVAYHEKYPTIYHLRKKLVDSTDKADLRLIYLALAHMIKFRGHFLIEGDLNPDNSDVDKLFIQLVQTYNQLFEENPINASGVDAKAILSARLSKSRRLENLIAQLPGEKKNGLFGNLIALSLGLTPNFKSNFDLAEDAKLQLSKDTYDDDLDNLLAQIGDQYADLFLAAKNLSDAILLSDILRVNTEITKAPLSASMIKRYDEHHQDLTLLKALVRQQLPEKYKEIFFDQSKNGYAGYIDGGASQEEFYKFIKPILEKMDGTEELLVKLNREDLLRKQRTFDNGSIPHQIHLGELHAILRRQEDFYPFLKDNREKIEKILTFRIPYYVGPLARGNSRFAWMTRKSEETITPWNFEEVVDKGASAQSFIERMTNFDKNLPNEKVLPKHSLLYEYFTVYNELTKVKYVTEGMRKPAFLSGEQKKAIVDLLFKTNRKVTVKQLKEDYFKKIECFDSVEISGVEDRFNASLGTYHDLLKIIKDKDFLDNEENEDILEDIVLTLTLFEDREMIEERLKTYAHLFDDKVMKQLKRRRYTGWGRLSRKLINGIRDKQSGKTILDFLKSDGFANRNFMQLIHDDSLTFKEDIQKAQVSGQGDSLHEHIANLAGSPAIKKGILQTVKVVDELVKVMGRHKPENIVIEMARENQTTQKGQKNSRERMKRIEEGIKELGSQILKEHPVENTQLQNEKLYLYYLQNGRDMYVDQELDINRLSDYDVDHIVPQSFLKDDSIDNKVLTRSDKARGKSDNVPSEEVVKKMKNYWRQLLNAKLITQRKFDNLTKAERGGLSELDKAGFIKRQLVETRQITKHVAQILDSRMNTKYDENDKLIREVKVITLKSKLVSDFRKDFQFYKVREINNYHHAHDAYLNAVVGTALIKKYPKLESEFVYGDYKVYDVRKMIAKSEQEIGKATAKYFFYSNIMNFFKTEITLANGEIRKRPLIETNGETGEIVWDKGRDFATVRKVLSMPQVNIVKKTEVQTGGFSKESILPKRNSDKLIARKKDWDPKKYGGFDSPTVAYSVLVVAKVEKGKSKKLKSVKELLGITIMERSSFEKNPIDFLEAKGYKEVKKDLIIKLPKYSLFELENGRKRMLASAGELQKGNELALPSKYVNFLYLASHYEKLKGSPEDNEQKQLFVEQHKHYLDEIIEQISEFSKRVILADANLDKVLSAYNKHRDKPIREQAENIIHLFTLTNLGAPAAFKYFDTTIDRKRYTSTKEVLDATLIHQSITGLYETRIDLSQLGGDGGGGGGSGGGGSGGGGSGGGGSGGTLQLDDEYRLYSPLVKPDQNIQFWLEQFPQAWAETAGMGLAKQVPPQVIQLKASATPVSVRQYPLSKEAQEGIRPHVQRLIQQGILVPVQSPWNTPLLPVRKPGTNDYRPVQDLREVNKRVQDIHPTVPNPYNLLCALPPQRSWYTVLDLKDAFFCLRLHPTSQPLFAFEWRDPGTGRTGQLTWTRLPQGFKNSPTIFNEALHRDLANFRIQHPQVTLLQYVDDLLLAGATKQDCLEGTKALLLELSDLGYRASAKKAQICRREVTYLGYSLRDGQRWLTEARKKTVVQIPAPTTAKQVREFLGTAGFCRLWIPGFATLAAPLYPLTKPKGEFSWAPEHQKAFDAIKKALLSAPALALPDVTKPFTLYVDERKGVARGVLTQTLGPWRRPVAYLSKKLDPVASGWPVCLKAIAAVAILVKDADKLTLGQNITVIAPHALENIVRQPPDRWMTNARMTHYQSLLLTERVTFAPPAALNPATLLPEETDEPVTHDCHQLLIEETGVRKDLTDIPLTGEVLTWFTDGSSYVVEGKRMAGAAVVDGTRTIWASSLPEGTSAQKAELMALTQALRLAEGKSINIYTDSRYAFATAHVHGAIYKQRGWLTSAGREIKNKEEILSLLEALHLPKRLAIIHCPGHQKAKDPISRGNQMADRVAKQAAQGVNLLAGKRTADGSEFEKRTADGSEFESPKKKAKVE

SEQ ID NO: 356 - protein, 2085 aa, synthetic construct; identical to SEQ ID NO: 125

SEQ ID NO: 357 - protein, 2091 aa, synthetic construct
MPAAKRVKLDGGDKKYSIGLDIGTNSVGWAVITDEYKVPSKKFKVLGNTDRHSIKKNLIGALLFDSGETAEATRLKRTARRRYTRRKNRICYLQEIFSNEMAKVDDSFFHRLEESFLVEEDKKHERHPIFGNIVDEVAYHEKYPTIYHLRKKLVDSTDKADLRLIYLALAHMIKFRGHFLIEGDLNPDNSDVDKLFIQLVQTYNQLFEENPINASGVDAKAILSARLSKSRRLENLIAQLPGEKKNGLFGNLIALSLGLTPNFKSNFDLAEDAKLQLSKDTYDDDLDNLLAQIGDQYADLFLAAKNLSDAILLSDILRVNTEITKAPLSASMIKRYDEHHQDLTLLKALVRQQLPEKYKEIFFDQSKNGYAGYIDGGASQEEFYKFIKPILEKMDGTEELLVKLNREDLLRKQRTFDNGSIPHQIHLGELHAILRRQEDFYPFLKDNREKIEKILTFRIPYYVGPLARGNSRFAWMTRKSEETITPWNFEEVVDKGASAQSFIERMTNFDKNLPNEKVLPKHSLLYEYFTVYNELTKVKYVTEGMRKPAFLSGEQKKAIVDLLFKTNRKVTVKQLKEDYFKKIECFDSVEISGVEDRFNASLGTYHDLLKIIKDKDFLDNEENEDILEDIVLTLTLFEDREMIEERLKTYAHLFDDKVMKQLKRRRYTGWGRLSRKLINGIRDKQSGKTILDFLKSDGFANRNFMQLIHDDSLTFKEDIQKAQVSGQGDSLHEHIANLAGSPAIKKGILQTVKVVDELVKVMGRHKPENIVIEMARENQTTQKGQKNSRERMKRIEEGIKELGSQILKEHPVENTQLQNEKLYLYYLQNGRDMYVDQELDINRLSDYDVDHIVPQSFLKDDSIDNKVLTRSDKARGKSDNVPSEEVVKKMKNYWRQLLNAKLITQRKFDNLTKAERGGLSELDKAGFIKRQLVETRQITKHVAQILDSRMNTKYDENDKLIREVKVITLKSKLVSDFRKDFQFYKVREINNYHHAHDAYLNAVVGTALIKKYPKLESEFVYGDYKVYDVRKMIAKSEQEIGKATAKYFFYSNIMNFFKTEITLANGEIRKRPLIETNGETGEIVWDKGRDFATVRKVLSMPQVNIVKKTEVQTGGFSKESILPKRNSDKLIARKKDWDPKKYGGFDSPTVAYSVLVVAKVEKGKSKKLKSVKELLGITIMERSSFEKNPIDFLEAKGYKEVKKDLIIKLPKYSLFELENGRKRMLASAGELQKGNELALPSKYVNFLYLASHYEKLKGSPEDNEQKQLFVEQHKHYLDEIIEQISEFSKRVILADANLDKVLSAYNKHRDKPIREQAENIIHLFTLTNLGAPAAFKYFDTTIDRKRYTSTKEVLDATLIHQSITGLYETRIDLSQLGGDGGGSSGSSGSSGSSGGTLQLDDEYRLYSPLVKPDQNIQFWLEQFPQAWAETAGMGLAKQVPPQVIQLKASATPVSVRQYPLSKEAQEGIRPHVQRLIQQGILVPVQSPWNTPLLPVRKPGTNDYRPVQDLREVNKRVQDIHPTVPNPYNLLCALPPQRSWYTVLDLKDAFFCLRLHPTSQPLFAFEWRDPGTGRTGQLTWTRLPQGFKNSPTIFNEALHRDLANFRIQHPQVTLLQYVDDLLLAGATKQDCLEGTKALLLELSDLGYRASAKKAQICRREVTYLGYSLRDGQRWLTEARKKTVVQIPAPTTAKQVREFLGTAGFCRLWIPGFATLAAPLYPLTKPKGEFSWAPEHQKAFDAIKKALLSAPALALPDVTKPFTLYVDERKGVARGVLTQTLGPWRRPVAYLSKKLDPVASGWPVCLKAIAAVAILVKDADKLTLGQNITVIAPHALENIVRQPPDRWMTNARMTHYQSLLLTERVTFAPPAALNPATLLPEETDEPVTHDCHQLLIEETGVRKDLTDIPLTGEVLTWFTDGSSYVVEGKRMAGAAVVDGTRTIWASSLPEGTSAQKAELMALTQALRLAEGKSINIYTDSRYAFATAHVHGAIYKQRGWLTSAGREIKNKEEILSLLEALHLPKRLAIIHCPGHQKAKDPISRGNQMADRVAKQAAQGVNLLAGKRTADGSEFEKRTADGSEFESPKKKAKVE

SEQ ID NO: 358 - protein, 2090 aa, synthetic construct
MPAAKRVKLDGGDKKYSIGLDIGTNSVGWAVITDEYKVPSKKFKVLGNTDRHSIKKNLIGALLFDSGETAEATRLKRTARRRYTRRKNRICYLQEIFSNEMAKVDDSFFHRLEESFLVEEDKKHERHPIFGNIVDEVAYHEKYPTIYHLRKKLVDSTDKADLRLIYLALAHMIKFRGHFLIEGDLNPDNSDVDKLFIQLVQTYNQLFEENPINASGVDAKAILSARLSKSRRLENLIAQLPGEKKNGLFGNLIALSLGLTPNFKSNFDLAEDAKLQLSKDTYDDDLDNLLAQIGDQYADLFLAAKNLSDAILLSDILRVNTEITKAPLSASMIKRYDEHHQDLTLLKALVRQQLPEKYKEIFFDQSKNGYAGYIDGGASQEEFYKFIKPILEKMDGTEELLVKLNREDLLRKQRTFDNGSIPHQIHLGELHAILRRQEDFYPFLKDNREKIEKILTFRIPYYVGPLARGNSRFAWMTRKSEETITPWNFEEVVDKGASAQSFIERMTNFDKNLPNEKVLPKHSLLYEYFTVYNELTKVKYVTEGMRKPAFLSGEQKKAIVDLLFKTNRKVTVKQLKEDYFKKIECFDSVEISGVEDRFNASLGTYHDLLKIIKDKDFLDNEENEDILEDIVLTLTLFEDREMIEERLKTYAHLFDDKVMKQLKRRRYTGWGRLSRKLINGIRDKQSGKTILDFLKSDGFANRNFMQLIHDDSLTFKEDIQKAQVSGQGDSLHEHIANLAGSPAIKKGILQTVKVVDELVKVMGRHKPENIVIEMARENQTTQKGQKNSRERMKRIEEGIKELGSQILKEHPVENTQLQNEKLYLYYLQNGRDMYVDQELDINRLSDYDVDHIVPQSFLKDDSIDNKVLTRSDKARGKSDNVPSEEVVKKMKNYWRQLLNAKLITQRKFDNLTKAERGGLSELDKAGFIKRQLVETRQITKHVAQILDSRMNTKYDENDKLIREVKVITLKSKLVSDFRKDFQFYKVREINNYHHAHDAYLNAVVGTALIKKYPKLESEFVYGDYKVYDVRKMIAKSEQEIGKATAKYFFYSNIMNFFKTEITLANGEIRKRPLIETNGETGEIVWDKGRDFATVRKVLSMPQVNIVKKTEVQTGGFSKESILPKRNSDKLIARKKDWDPKKYGGFDSPTVAYSVLVVAKVEKGKSKKLKSVKELLGITIMERSSFEKNPIDFLEAKGYKEVKKDLIIKLPKYSLFELENGRKRMLASAGELQKGNELALPSKYVNFLYLASHYEKLKGSPEDNEQKQLFVEQHKHYLDEIIEQISEFSKRVILADANLDKVLSAYNKHRDKPIREQAENIIHLFTLTNLGAPAAFKYFDTTIDRKRYTSTKEVLDATLIHQSITGLYETRIDLSQLGGDGGEAAAKPAPGGGGGTLQLDDEYRLYSPLVKPDQNIQFWLEQFPQAWAETAGMGLAKQVPPQVIQLKASATPVSVRQYPLSKEAQEGIRPHVQRLIQQGILVPVQSPWNTPLLPVRKPGTNDYRPVQDLREVNKRVQDIHPTVPNPYNLLCALPPQRSWYTVLDLKDAFFCLRLHPTSQPLFAFEWRDPGTGRTGQLTWTRLPQGFKNSPTIFNEALHRDLANFRIQHPQVTLLQYVDDLLLAGATKQDCLEGTKALLLELSDLGYRASAKKAQICRREVTYLGYSLRDGQRWLTEARKKTVVQIPAPTTAKQVREFLGTAGFCRLWIPGFATLAAPLYPLTKPKGEFSWAPEHQKAFDAIKKALLSAPALALPDVTKPFTLYVDERKGVARGVLTQTLGPWRRPVAYLSKKLDPVASGWPVCLKAIAAVAILVKDADKLTLGQNITVIAPHALENIVRQPPDRWMTNARMTHYQSLLLTERVTFAPPAALNPATLLPEETDEPVTHDCHQLLIEETGVRKDLTDIPLTGEVLTWFTDGSSYVVEGKRMAGAAVVDGTRTIWASSLPEGTSAQKAELMALTQALRLAEGKSINIYTDSRYAFATAHVHGAIYKQRGWLTSAGREIKNKEEILSLLEALHLPKRLAIIHCPGHQKAKDPISRGNQMADRVAKQAAQGVNLLAGKRTADGSEFEKRTADGSEFESPKKKAKVE

SEQ ID NO: 359 - protein, 2088 aa, synthetic construct; identical to SEQ ID NO: 175

SEQ ID NO: 360 - protein, 2087 aa, synthetic construct
MPAAKRVKLDGGDKKYSIGLDIGTNSVGWAVITDEYKVPSKKFKVLGNTDRHSIKKNLIGALLFDSGETAEATRLKRTARRRYTRRKNRICYLQEIFSNEMAKVDDSFFHRLEESFLVEEDKKHERHPIFGNIVDEVAYHEKYPTIYHLRKKLVDSTDKADLRLIYLALAHMIKFRGHFLIEGDLNPDNSDVDKLFIQLVQTYNQLFEENPINASGVDAKAILSARLSKSRRLENLIAQLPGEKKNGLFGNLIALSLGLTPNFKSNFDLAEDAKLQLSKDTYDDDLDNLLAQIGDQYADLFLAAKNLSDAILLSDILRVNTEITKAPLSASMIKRYDEHHQDLTLLKALVRQQLPEKYKEIFFDQSKNGYAGYIDGGASQEEFYKFIKPILEKMDGTEELLVKLNREDLLRKQRTFDNGSIPHQIHLGELHAILRRQEDFYPFLKDNREKIEKILTFRIPYYVGPLARGNSRFAWMTRKSEETITPWNFEEVVDKGASAQSFIERMTNFDKNLPNEKVLPKHSLLYEYFTVYNELTKVKYVTEGMRKPAFLSGEQKKAIVDLLFKTNRKVTVKQLKEDYFKKIECFDSVEISGVEDRFNASLGTYHDLLKIIKDKDFLDNEENEDILEDIVLTLTLFEDREMIEERLKTYAHLFDDKVMKQLKRRRYTGWGRLSRKLINGIRDKQSGKTILDFLKSDGFANRNFMQLIHDDSLTFKEDIQKAQVSGQGDSLHEHIANLAGSPAIKKGILQTVKVVDELVKVMGRHKPENIVIEMARENQTTQKGQKNSRERMKRIEEGIKELGSQILKEHPVENTQLQNEKLYLYYLQNGRDMYVDQELDINRLSDYDVDHIVPQSFLKDDSIDNKVLTRSDKARGKSDNVPSEEVVKKMKNYWRQLLNAKLITQRKFDNLTKAERGGLSELDKAGFIKRQLVETRQITKHVAQILDSRMNTKYDENDKLIREVKVITLKSKLVSDFRKDFQFYKVREINNYHHAHDAYLNAVVGTALIKKYPKLESEFVYGDYKVYDVRKMIAKSEQEIGKATAKYFFYSNIMNFFKTEITLANGEIRKRPLIETNGETGEIVWDKGRDFATVRKVLSMPQVNIVKKTEVQTGGFSKESILPKRNSDKLIARKKDWDPKKYGGFDSPTVAYSVLVVAKVEKGKSKKLKSVKELLGITIMERSSFEKNPIDFLEAKGYKEVKKDLIIKLPKYSLFELENGRKRMLASAGELQKGNELALPSKYVNFLYLASHYEKLKGSPEDNEQKQLFVEQHKHYLDEIIEQISEFSKRVILADANLDKVLSAYNKHRDKPIREQAENIIHLFTLTNLGAPAAFKYFDTTIDRKRYTSTKEVLDATLIHQSITGLYETRIDLSQLGGDGGEAAAKGSSGGTLQLDDEYRLYSPLVKPDQNIQFWLEQFPQAWAETAGMGLAKQVPPQVIQLKASATPVSVRQYPLSKEAQEGIRPHVQRLIQQGILVPVQSPWNTPLLPVRKPGTNDYRPVQDLREVNKRVQDIHPTVPNPYNLLCALPPQRSWYTVLDLKDAFFCLRLHPTSQPLFAFEWRDPGTGRTGQLTWTRLPQGFKNSPTIFNEALHRDLANFRIQHPQVTLLQYVDDLLLAGATKQDCLEGTKALLLELSDLGYRASAKKAQICRREVTYLGYSLRDGQRWLTEARKKTVVQIPAPTTAKQVREFLGTAGFCRLWIPGFATLAAPLYPLTKPKGEFSWAPEHQKAFDAIKKALLSAPALALPDVTKPFTLYVDERKGVARGVLTQTLGPWRRPVAYLSKKLDPVASGWPVCLKAIAAVAILVKDADKLTLGQNITVIAPHALENIVRQPPDRWMTNARMTHYQSLLLTERVTFAPPAALNPATLLPEETDEPVTHDCHQLLIEETGVRKDLTDIPLTGEVLTWFTDGSSYVVEGKRMAGAAVVDGTRTIWASSLPEGTSAQKAELMALTQALRLAEGKSINIYTDSRYAFATAHVHGAIYKQRGWLTSAGREIKNKEEILSLLEALHLPKRLAIIHCPGHQKAKDPISRGNQMADRVAKQAAQGVNLLAGKRTADGSEFEKRTADGSEFESPKKKAKVE

SEQ ID NO: 361 - protein, 2090 aa, synthetic construct
MPAAKRVKLDGGDKKYSIGLDIGTNSVGWAVITDEYKVPSKKFKVLGNTDRHSIKKNLIGALLFDSGETAEATRLKRTARRRYTRRKNRICYLQEIFSNEMAKVDDSFFHRLEESFLVEEDKKHERHPIFGNIVDEVAYHEKYPTIYHLRKKLVDSTDKADLRLIYLALAHMIKFRGHFLIEGDLNPDNSDVDKLFIQLVQTYNQLFEENPINASGVDAKAILSARLSKSRRLENLIAQLPGEKKNGLFGNLIALSLGLTPNFKSNFDLAEDAKLQLSKDTYDDDLDNLLAQIGDQYADLFLAAKNLSDAILLSDILRVNTEITKAPLSASMIKRYDEHHQDLTLLKALVRQQLPEKYKEIFFDQSKNGYAGYIDGGASQEEFYKFIKPILEKMDGTEELLVKLNREDLLRKQRTFDNGSIPHQIHLGELHAILRRQEDFYPFLKDNREKIEKILTFRIPYYVGPLARGNSRFAWMTRKSEETITPWNFEEVVDKGASAQSFIERMTNFDKNLPNEKVLPKHSLLYEYFTVYNELTKVKYVTEGMRKPAFLSGEQKKAIVDLLFKTNRKVTVKQLKEDYFKKIECFDSVEISGVEDRFNASLGTYHDLLKIIKDKDFLDNEENEDILEDIVLTLTLFEDREMIEERLKTYAHLFDDKVMKQLKRRRYTGWGRLSRKLINGIRDKQSGKTILDFLKSDGFANRNFMQLIHDDSLTFKEDIQKAQVSGQGDSLHEHIANLAGSPAIKKGILQTVKVVDELVKVMGRHKPENIVIEMARENQTTQKGQKNSRERMKRIEEGIKELGSQILKEHPVENTQLQNEKLYLYYLQNGRDMYVDQELDINRLSDYDVDHIVPQSFLKDDSIDNKVLTRSDKARGKSDNVPSEEVVKKMKNYWRQLLNAKLITQRKFDNLTKAERGGLSELDKAGFIKRQLVETRQITKHVAQILDSRMNTKYDENDKLIREVKVITLKSKLVSDFRKDFQFYKVREINNYHHAHDAYLNAVVGTALIKKYPKLESEFVYGDYKVYDVRKMIAKSEQEIGKATAKYFFYSNIMNFFKTEITLANGEIRKRPLIETNGETGEIVWDKGRDFATVRKVLSMPQVNIVKKTEVQTGGFSKESILPKRNSDKLIARKKDWDPKKYGGFDSPTVAYSVLVVAKVEKGKSKKLKSVKELLGITIMERSSFEKNPIDFLEAKGYKEVKKDLIIKLPKYSLFELENGRKRMLASAGELQKGNELALPSKYVNFLYLASHYEKLKGSPEDNEQKQLFVEQHKHYLDEIIEQISEFSKRVILADANLDKVLSAYNKHRDKPIREQAENIIHLFTLTNLGAPAAFKYFDTTIDRKRYTSTKEVLDATLIHQSITGLYETRIDLSQLGGDGGGSSEAAAKGGSGGTLQLDDEYRLYSPLVKPDQNIQFWLEQFPQAWAETAGMGLAKQVPPQVIQLKASATPVSVRQYPLSKEAQEGIRPHVQRLIQQGILVPVQSPWNTPLLPVRKPGTNDYRPVQDLREVNKRVQDIHPTVPNPYNLLCALPPQRSWYTVLDLKDAFFCLRLHPTSQPLFAFEWRDPGTGRTGQLTWTRLPQGFKNSPTIFNEALHRDLANFRIQHPQVTLLQYVDDLLLAGATKQDCLEGTKALLLELSDLGYRASAKKAQICRREVTYLGYSLRDGQRWLTEARKKTVVQIPAPTTAKQVREFLGTAGFCRLWIPGFATLAAPLYPLTKPKGEFSWAPEHQKAFDAIKKALLSAPALALPDVTKPFTLYVDERKGVARGVLTQTLGPWRRPVAYLSKKLDPVASGWPVCLKAIAAVAILVKDADKLTLGQNITVIAPHALENIVRQPPDRWMTNARMTHYQSLLLTERVTFAPPAALNPATLLPEETDEPVTHDCHQLLIEETGVRKDLTDIPLTGEVLTWFTDGSSYVVEGKRMAGAAVVDGTRTIWASSLPEGTSAQKAELMALTQALRLAEGKSINIYTDSRYAFATAHVHGAIYKQRGWLTSAGREIKNKEEILSLLEALHLPKRLAIIHCPGHQKAKDPISRGNQMADRVAKQAAQGVNLLAGKRTADGSEFEKRTADGSEFESPKKKAKVE

SEQ ID NO: 362 - protein, 2087 aa, synthetic construct; identical to SEQ ID NO: 114

SEQ ID NO: 363 - protein, 2090 aa, synthetic construct; identical to SEQ ID NO: 139

SEQ ID NO: 364 - protein, 2088 aa, synthetic construct; identical to SEQ ID NO: 181

SEQ ID NO: 365 - protein, 2090 aa, synthetic construct; identical to SEQ ID NO: 133

SEQ ID NO: 366 - protein, 2084 aa, synthetic construct; identical to SEQ ID NO: 163

SEQ ID NO: 367 - protein, 2084 aa, synthetic construct; identical to SEQ ID NO: 166

SEQ ID NO: 368 - protein, 2090 aa, synthetic construct; identical to SEQ ID NO: 170

SEQ ID NO: 369 - protein, 2085 aa, synthetic construct; identical to SEQ ID NO: 165

SEQ ID NO: 370 - protein, 2091 aa, synthetic construct; identical to SEQ ID NO: 153

SEQ ID NO: 371 - protein, 2088 aa, synthetic construct
MPAAKRVKLDGGDKKYSIGLDIGTNSVGWAVITDEYKVPSKKFKVLGNTDRHSIKKNLIGALLFDSGETAEATRLKRTARRRYTRRKNRICYLQEIFSNEMAKVDDSFFHRLEESFLVEEDKKHERHPIFGNIVDEVAYHEKYPTIYHLRKKLVDSTDKADLRLIYLALAHMIKFRGHFLIEGDLNPDNSDVDKLFIQLVQTYNQLFEENPINASGVDAKAILSARLSKSRRLENLIAQLPGEKKNGLFGNLIALSLGLTPNFKSNFDLAEDAKLQLSKDTYDDDLDNLLAQIGDQYADLFLAAKNLSDAILLSDILRVNTEITKAPLSASMIKRYDEHHQDLTLLKALVRQQLPEKYKEIFFDQSKNGYAGYIDGGASQEEFYKFIKPILEKMDGTEELLVKLNREDLLRKQRTFDNGSIPHQIHLGELHAILRRQEDFYPFLKDNREKIEKILTFRIPYYVGPLARGNSRFAWMTRKSEETITPWNFEEVVDKGASAQSFIERMTNFDKNLPNEKVLPKHSLLYEYFTVYNELTKVKYVTEGMRKPAFLSGEQKKAIVDLLFKTNRKVTVKQLKEDYFKKIECFDSVEISGVEDRFNASLGTYHDLLKIIKDKDFLDNEENEDILEDIVLTLTLFEDREMIEERLKTYAHLFDDKVMKQLKRRRYTGWGRLSRKLINGIRDKQSGKTILDFLKSDGFANRNFMQLIHDDSLTFKEDIQKAQVSGQGDSLHEHIANLAGSPAIKKGILQTVKVVDELVKVMGRHKPENIVIEMARENQTTQKGQKNSRERMKRIEEGIKELGSQILKEHPVENTQLQNEKLYLYYLQNGRDMYVDQELDINRLSDYDVDHIVPQSFLKDDSIDNKVLTRSDKARGKSDNVPSEEVVKKMKNYWRQLLNAKLITQRKFDNLTKAERGGLSELDKAGFIKRQLVETRQITKHVAQILDSRMNTKYDENDKLIREVKVITLKSKLVSDFRKDFQFYKVREINNYHHAHDAYLNAVVGTALIKKYPKLESEFVYGDYKVYDVRKMIAKSEQEIGKATAKYFFYSNIMNFFKTEITLANGEIRKRPLIETNGETGEIVWDKGRDFATVRKVLSMPQVNIVKKTEVQTGGFSKESILPKRNSDKLIARKKDWDPKKYGGFDSPTVAYSVLVVAKVEKGKSKKLKSVKELLGITIMERSSFEKNPIDFLEAKGYKEVKKDLIIKLPKYSLFELENGRKRMLASAGELQKGNELALPSKYVNFLYLASHYEKLKGSPEDNEQKQLFVEQHKHYLDEIIEQISEFSKRVILADANLDKVLSAYNKHRDKPIREQAENIIHLFTLTNLGAPAAFKYFDTTIDRKRYTSTKEVLDATLIHQSITGLYETRIDLSQLGGDGGPAPGGGGSSGGTLQLDDEYRLYSPLVKPDQNIQFWLEQFPQAWAETAGMGLAKQVPPQVIQLKASATPVSVRQYPLSKEAQEGIRPHVQRLIQQGILVPVQSPWNTPLLPVRKPGTNDYRPVQDLREVNKRVQDIHPTVPNPYNLLCALPPQRSWYTVLDLKDAFFCLRLHPTSQPLFAFEWRDPGTGRTGQLTWTRLPQGFKNSPTIFNEALHRDLANFRIQHPQVTLLQYVDDLLLAGATKQDCLEGTKALLLELSDLGYRASAKKAQICRREVTYLGYSLRDGQRWLTEARKKTVVQIPAPTTAKQVREFLGTAGFCRLWIPGFATLAAPLYPLTKPKGEFSWAPEHQKAFDAIKKALLSAPALALPDVTKPFTLYVDERKGVARGVLTQTLGPWRRPVAYLSKKLDPVASGWPVCLKAIAAVAILVKDADKLTLGQNITVIAPHALENIVRQPPDRWMTNARMTHYQSLLLTERVTFAPPAALNPATLLPEETDEPVTHDCHQLLIEETGVRKDLTDIPLTGEVLTWFTDGSSYVVEGKRMAGAAVVDGTRTIWASSLPEGTSAQKAELMALTQALRLAEGKSINIYTDSRYAFATAHVHGAIYKQRGWLTSAGREIKNKEEILSLLEALHLPKRLAIIHCPGHQKAKDPISRGNQMADRVAKQAAQGVNLLAGKRTADGSEFEKRTADGSEFESPKKKAKVE

SEQ ID NO: 372 - protein, 2090 aa, synthetic construct; identical to SEQ ID NO: 172

SEQ ID NO: 373 - protein, 2088 aa, synthetic construct
MPAAKRVKLDGGDKKYSIGLDIGTNSVGWAVITDEYKVPSKKFKVLGNTDRHSIKKNLIGALLFDSGETAEATRLKRTARRRYTRRKNRICYLQEIFSNEMAKVDDSFFHRLEESFLVEEDKKHERHPIFGNIVDEVAYHEKYPTIYHLRKKLVDSTDKADLRLIYLALAHMIKFRGHFLIEGDLNPDNSDVDKLFIQLVQTYNQLFEENPINASGVDAKAILSARLSKSRRLENLIAQLPGEKKNGLFGNLIALSLGLTPNFKSNFDLAEDAKLQLSKDTYDDDLDNLLAQIGDQYADLFLAAKNLSDAILLSDILRVNTEITKAPLSASMIKRYDEHHQDLTLLKALVRQQLPEKYKEIFFDQSKNGYAGYIDGGASQEEFYKFIKPILEKMDGTEELLVKLNREDLLRKQRTFDNGSIPHQIHLGELHAILRRQEDFYPFLKDNREKIEKILTFRIPYYVGPLARGNSRFAWMTRKSEETITPWNFEEVVDKGASAQSFIERMTNFDKNLPNEKVLPKHSLLYEYFTVYNELTKVKYVTEGMRKPAFLSGEQKKAIVDLLFKTNRKVTVKQLKEDYFKKIECFDSVEISGVEDRFNASLGTYHDLLKIIKDKDFLDNEENEDILEDIVLTLTLFEDREMIEERLKTYAHLFDDKVMKQLKRRRYTGWGRLSRKLINGIRDKQSGKTILDFLKSDGFANRNFMQLIHDDSLTFKEDIQKAQVSGQGDSLHEHIANLAGSPAIKKGILQTVKVVDELVKVMGRHKPENIVIEMARENQTTQKGQKNSRERMKRIEEGIKELGSQILKEHPVENTQLQNEKLYLYYLQNGRDMYVDQELDINRLSDYDVDHIVPQSFLKDDSIDNKVLTRSDKARGKSDNVPSEEVVKKMKNYWRQLLNAKLITQRKFDNLTKAERGGLSELDKAGFIKRQLVETRQITKHVAQILDSRMNTKYDENDKLIREVKVITLKSKLVSDFRKDFQFYKVREINNYHHAHDAYLNAVVGTALIKKYPKLESEFVYGDYKVYDVRKMIAKSEQEIGKATAKYFFYSNIMNFFKTEITLANGEIRKRPLIETNGETGEIVWDKGRDFATVRKVLSMPQVNIVKKTEVQTGGFSKESILPKRNSDKLIARKKDWDPKKYGGFDSPTVAYSVLVVAKVEKGKSKKLKSVKELLGITIMERSSFEKNPIDFLEAKGYKEVKKDLIIKLPKYSLFELENGRKRMLASAGELQKGNELALPSKYVNFLYLASHYEKLKGSPEDNEQKQLFVEQHKHYLDEIIEQISEFSKRVILADANLDKVLSAYNKHRDKPIREQAENIIHLFTLTNLGAPAAFKYFDTTIDRKRYTSTKEVLDATLIHQSITGLYETRIDLSQLGGDGGGGSGGGPAPGGTLQLDDEYRLYSPLVKPDQNIQFWLEQFPQAWAETAGMGLAKQVPPQVIQLKASATPVSVRQYPLSKEAQEGIRPHVQRLIQQGILVPVQSPWNTPLLPVRKPGTNDYRPVQDLREVNKRVQDIHPTVPNPYNLLCALPPQRSWYTVLDLKDAFFCLRLHPTSQPLFAFEWRDPGTGRTGQLTWTRLPQGFKNSPTIFNEALHRDLANFRIQHPQVTLLQYVDDLLLAGATKQDCLEGTKALLLELSDLGYRASAKKAQICRREVTYLGYSLRDGQRWLTEARKKTVVQIPAPTTAKQVREFLGTAGFCRLWIPGFATLAAPLYPLTKPKGEFSWAPEHQKAFDAIKKALLSAPALALPDVTKPFTLYVDERKGVARGVLTQTLGPWRRPVAYLSKKLDPVASGWPVCLKAIAAVAILVKDADKLTLGQNITVIAPHALENIVRQPPDRWMTNARMTHYQSLLLTERVTFAPPAALNPATLLPEETDEPVTHDCHQLLIEETGVRKDLTDIPLTGEVLTWFTDGSSYVVEGKRMAGAAVVDGTRTIWASSLPEGTSAQKAELMALTQALRLAEGKSINIYTDSRYAFATAHVHGAIYKQRGWLTSAGREIKNKEEILSLLEALHLPKRLAIIHCPGHQKAKDPISRGNQMADRVAKQAAQGVNLLAGKRTADGSEFEKRTADGSEFESPKKKAKVE

SEQ ID NO: 374 - protein, 2094 aa, synthetic construct; identical to SEQ ID NO: 118

SEQ ID NO: 375 - protein, 2087 aa, synthetic construct
MPAAKRVKLDGGDKKYSIGLDIGTNSVGWAVITDEYKVPSKKFKVLGNTDRHSIKKNLIGALLFDSGETAEATRLKRTARRRYTRRKNRICYLQEIFSNEMAKVDDSFFHRLEESFLVEEDKKHERHPIFGNIVDEVAYHEKYPTIYHLRKKLVDSTDKADLRLIYLALAHMIKFRGHFLIEGDLNPDNSDVDKLFIQLVQTYNQLFEENPINASGVDAKAILSARLSKSRRLENLIAQLPGEKKNGLFGNLIALSLGLTPNFKSNFDLAEDAKLQLSKDTYDDDLDNLLAQIGDQYADLFLAAKNLSDAILLSDILRVNTEITKAPLSASMIKRYDEHHQDLTLLKALVRQQLPEKYKEIFFDQSKNGYAGYIDGGASQEEFYKFIKPILEKMDGTEELLVKLNREDLLRKQRTFDNGSIPHQIHLGELHAILRRQEDFYPFLKDNREKIEKILTFRIPYYVGPLARGNSRFAWMTRKSEETITPWNFEEVVDKGASAQSFIERMTNFDKNLPNEKVLPKHSLLYEYFTVYNELTKVKYVTEGMRKPAFLSGEQKKAIVDLLFKTNRKVTVKQLKEDYFKKIECFDSVEISGVEDRFNASLGTYHDLLKIIKDKDFLDNEENEDILEDIVLTLTLFEDREMIEERLKTYAHLFDDKVMKQLKRRRYTGWGRLSRKLINGIRDKQSGKTILDFLKSDGFANRNFMQLIHDDSLTFKEDIQKAQVSGQGDSLHEHIANLAGSPAIKKGILQTVKVVDELVKVMGRHKPENIVIEMARENQTTQKGQKNSRERMKRIEEGIKELGSQILKEHPVENTQLQNEKLYLYYLQNGRDMYVDQELDINRLSDYDVDHIVPQSFLKDDSIDNKVLTRSDKARGKSDNVPSEEVVKKMKNYWRQLLNAKLITQRKFDNLTKAERGGLSELDKAGFIKRQLVETRQITKHVAQILDSRMNTKYDENDKLIREVKVITLKSKLVSDFRKDFQFYKVREINNYHHAHDAYLNAVVGTALIKKYPKLESEFVYGDYKVYDVRKMIAKSEQEIGKATAKYFFYSNIMNFFKTEITLANGEIRKRPLIETNGETGEIVWDKGRDFATVRKVLSMPQVNIVKKTEVQTGGFSKESILPKRNSDKLIARKKDWDPKKYGGFDSPTVAYSVLVVAKVEKGKSKKLKSVKELLGITIMERSSFEKNPIDFLEAKGYKEVKKDLIIKLPKYSLFELENGRKRMLASAGELQKGNELALPSKYVNFLYLASHYEKLKGSPEDNEQKQLFVEQHKHYLDEIIEQISEFSKRVILADANLDKVLSAYNKHRDKPIREQAENIIHLFTLTNLGAPAAFKYFDTTIDRKRYTSTKEVLDATLIHQSITGLYETRIDLSQLGGDGGPAPEAAAKGGTLQLDDEYRLYSPLVKPDQNIQFWLEQFPQAWAETAGMGLAKQVPPQVIQLKASATPVSVRQYPLSKEAQEGIRPHVQRLIQQGILVPVQSPWNTPLLPVRKPGTNDYRPVQDLREVNKRVQDIHPTVPNPYNLLCALPPQRSWYTVLDLKDAFFCLRLHPTSQPLFAFEWRDPGTGRTGQLTWTRLPQGFKNSPTIFNEALHRDLANFRIQHPQVTLLQYVDDLLLAGATKQDCLEGTKALLLELSDLGYRASAKKAQICRREVTYLGYSLRDGQRWLTEARKKTVVQIPAPTTAKQVREFLGTAGFCRLWIPGFATLAAPLYPLTKPKGEFSWAPEHQKAFDAIKKALLSAPALALPDVTKPFTLYVDERKGVARGVLTQTLGPWRRPVAYLSKKLDPVASGWPVCLKAIAAVAILVKDADKLTLGQNITVIAPHALENIVRQPPDRWMTNARMTHYQSLLLTERVTFAPPAALNPATLLPEETDEPVTHDCHQLLIEETGVRKDLTDIPLTGEVLTWFTDGSSYVVEGKRMAGAAVVDGTRTIWASSLPEGTSAQKAELMALTQALRLAEGKSINIYTDSRYAFATAHVHGAIYKQRGWLTSAGREIKNKEEILSLLEALHLPKRLAIIHCPGHQKAKDPISRGNQMADRVAKQAAQGVNLLAGKRTADGSEFEKRTADGSEFESPKKKAKVE

SEQ ID NO: 376 - protein, 2090 aa, synthetic construct; identical to SEQ ID NO: 154

SEQ ID NO: 377 - protein, 2091 aa, synthetic construct; identical to SEQ ID NO: 145

SEQ ID NO: 378 - protein, 2089 aa, synthetic construct
MPAAKRVKLDGGDKKYSIGLDIGTNSVGWAVITDEYKVPSKKFKVLGNTDRHSIKKNLIGALLFDSGETAEATRLKRTARRRYTRRKNRICYLQEIFSNEMAKVDDSFFHRLEESFLVEEDKKHERHPIFGNIVDEVAYHEKYPTIYHLRKKLVDSTDKADLRLIYLALAHMIKFRGHFLIEGDLNPDNSDVDKLFIQLVQTYNQLFEENPINASGVDAKAILSARLSKSRRLENLIAQLPGEKKNGLFGNLIALSLGLTPNFKSNFDLAEDAKLQLSKDTYDDDLDNLLAQIGDQYADLFLAAKNLSDAILLSDILRVNTEITKAPLSASMIKRYDEHHQDLTLLKALVRQQLPEKYKEIFFDQSKNGYAGYIDGGASQEEFYKFIKPILEKMDGTEELLVKLNREDLLRKQRTFDNGSIPHQIHLGELHAILRRQEDFYPFLKDNREKIEKILTFRIPYYVGPLARGNSRFAWMTRKSEETITPWNFEEVVDKGASAQSFIERMTNFDKNLPNEKVLPKHSLLYEYFTVYNELTKVKYVTEGMRKPAFLSGEQKKAIVDLLFKTNRKVTVKQLKEDYFKKIECFDSVEISGVEDRFNASLGTYHDLLKIIKDKDFLDNEENEDILEDIVLTLTLFEDREMIEERLKTYAHLFDDKVMKQLKRRRYTGWGRLSRKLINGIRDKQSGKTILDFLKSDGFANRNFMQLIHDDSLTFKEDIQKAQVSGQGDSLHEHIANLAGSPAIKKGILQTVKVVDELVKVMGRHKPENIVIEMARENQTTQKGQKNSRERMKRIEEGIKELGSQILKEHPVENTQLQNEKLYLYYLQNGRDMYVDQELDINRLSDYDVDHIVPQSFLKDDSIDNKVLTRSDKARGKSDNVPSEEVVKKMKNYWRQLLNAKLITQRKFDNLTKAERGGLSELDKAGFIKRQLVETRQITKHVAQILDSRMNTKYDENDKLIREVKVITLKSKLVSDFRKDFQFYKVREINNYHHAHDAYLNAVVGTALIKKYPKLESEFVYGDYKVYDVRKMIAKSEQEIGKATAKYFFYSNIMNFFKTEITLANGEIRKRPLIETNGETGEIVWDKGRDFATVRKVLSMPQVNIVKKTEVQTGGFSKESILPKRNSDKLIARKKDWDPKKYGGFDSPTVAYSVLVVAKVEKGKSKKLKSVKELLGITIMERSSFEKNPIDFLEAKGYKEVKKDLIIKLPKYSLFELENGRKRMLASAGELQKGNELALPSKYVNFLYLASHYEKLKGSPEDNEQKQLFVEQHKHYLDEIIEQISEFSKRVILADANLDKVLSAYNKHRDKPIREQAENIIHLFTLTNLGAPAAFKYFDTTIDRKRYTSTKEVLDATLIHQSITGLYETRIDLSQLGGDGGGGGGSGGGGSGGTLQLDDEYRLYSPLVKPDQNIQFWLEQFPQAWAETAGMGLAKQVPPQVIQLKASATPVSVRQYPLSKEAQEGIRPHVQRLIQQGILVPVQSPWNTPLLPVRKPGTNDYRPVQDLREVNKRVQDIHPTVPNPYNLLCALPPQRSWYTVLDLKDAFFCLRLHPTSQPLFAFEWRDPGTGRTGQLTWTRLPQGFKNSPTIFNEALHRDLANFRIQHPQVTLLQYVDDLLLAGATKQDCLEGTKALLLELSDLGYRASAKKAQICRREVTYLGYSLRDGQRWLTEARKKTVVQIPAPTTAKQVREFLGTAGFCRLWIPGFATLAAPLYPLTKPKGEFSWAPEHQKAFDAIKKALLSAPALALPDVTKPFTLYVDERKGVARGVLTQTLGPWRRPVAYLSKKLDPVASGWPVCLKAIAAVAILVKDADKLTLGQNITVIAPHALENIVRQPPDRWMTNARMTHYQSLLLTERVTFAPPAALNPATLLPEETDEPVTHDCHQLLIEETGVRKDLTDIPLTGEVLTWFTDGSSYVVEGKRMAGAAVVDGTRTIWASSLPEGTSAQKAELMALTQALRLAEGKSINIYTDSRYAFATAHVHGAIYKQRGWLTSAGREIKNKEEILSLLEALHLPKRLAIIHCPGHQKAKDPISRGNQMADRVAKQAAQGVNLLAGKRTADGSEFEKRTADGSEFESPKKKAKVE

SEQ ID NO: 379 - protein, 2088 aa, synthetic construct
MPAAKRVKLDGGDKKYSIGLDIGTNSVGWAVITDEYKVPSKKFKVLGNTDRHSIKKNLIGALLFDSGETAEATRLKRTARRRYTRRKNRICYLQEIFSNEMAKVDDSFFHRLEESFLVEEDKKHERHPIFGNIVDEVAYHEKYPTIYHLRKKLVDSTDKADLRLIYLALAHMIKFRGHFLIEGDLNPDNSDVDKLFIQLVQTYNQLFEENPINASGVDAKAILSARLSKSRRLENLIAQLPGEKKNGLFGNLIALSLGLTPNFKSNFDLAEDAKLQLSKDTYDDDLDNLLAQIGDQYADLFLAAKNLSDAILLSDILRVNTEITKAPLSASMIKRYDEHHQDLTLLKALVRQQLPEKYKEIFFDQSKNGYAGYIDGGASQEEFYKFIKPILEKMDGTEELLVKLNREDLLRKQRTFDNGSIPHQIHLGELHAILRRQEDFYPFLKDNREKIEKILTFRIPYYVGPLARGNSRFAWMTRKSEETITPWNFEEVVDKGASAQSFIERMTNFDKNLPNEKVLPKHSLLYEYFTVYNELTKVKYVTEGMRKPAFLSGEQKKAIVDLLFKTNRKVTVKQLKEDYFKKIECFDSVEISGVEDRFNASLGTYHDLLKIIKDKDFLDNEENEDILEDIVLTLTLFEDREMIEERLKTYAHLFDDKVMKQLKRRRYTGWGRLSRKLINGIRDKQSGKTILDFLKSDGFANRNFMQLIHDDSLTFKEDIQKAQVSGQGDSLHEHIANLAGSPAIKKGILQTVKVVDELVKVMGRHKPENIVIEMARENQTTQKGQKNSRERMKRIEEGIKELGSQILKEHPVENTQLQNEKLYLYYLQNGRDMYVDQELDINRLSDYDVDHIVPQSFLKDDSIDNKVLTRSDKARGKSDNVPSEEVVKKMKNYWRQLLNAKLITQRKFDNLTKAERGGLSELDKAGFIKRQLVETRQITKHVAQILDSRMNTKYDENDKLIREVKVITLKSKLVSDFRKDFQFYKVREINNYHHAHDAYLNAVVGTALIKKYPKLESEFVYGDYKVYDVRKMIAKSEQEIGKATAKYFFYSNIMNFFKTEITLANGEIRKRPLIETNGETGEIVWDKGRDFATVRKVLSMPQVNIVKKTEVQTGGFSKESILPKRNSDKLIARKKDWDPKKYGGFDSPTVAYSVLVVAKVEKGKSKKLKSVKELLGITIMERSSFEKNPIDFLEAKGYKEVKKDLIIKLPKYSLFELENGRKRMLASAGELQKGNELALPSKYVNFLYLASHYEKLKGSPEDNEQKQLFVEQHKHYLDEIIEQISEFSKRVILADANLDKVLSAYNKHRDKPIREQAENIIHLFTLTNLGAPAAFKYFDTTIDRKRYTSTKEVLDATLIHQSITGLYETRIDLSQLGGDGGGSSPAPGGGGGTLQLDDEYRLYSPLVKPDQNIQFWLEQFPQAWAETAGMGLAKQVPPQVIQLKASATPVSVRQYPLSKEAQEGIRPHVQRLIQQGILVPVQSPWNTPLLPVRKPGTNDYRPVQDLREVNKRVQDIHPTVPNPYNLLCALPPQRSWYTVLDLKDAFFCLRLHPTSQPLFAFEWRDPGTGRTGQLTWTRLPQGFKNSPTIFNEALHRDLANFRIQHPQVTLLQYVDDLLLAGATKQDCLEGTKALLLELSDLGYRASAKKAQICRREVTYLGYSLRDGQRWLTEARKKTVVQIPAPTTAKQVREFLGTAGFCRLWIPGFATLAAPLYPLTKPKGEFSWAPEHQKAFDAIKKALLSAPALALPDVTKPFTLYVDERKGVARGVLTQTLGPWRRPVAYLSKKLDPVASGWPVCLKAIAAVAILVKDADKLTLGQNITVIAPHALENIVRQPPDRWMTNARMTHYQSLLLTERVTFAPPAALNPATLLPEETDEPVTHDCHQLLIEETGVRKDLTDIPLTGEVLTWFTDGSSYVVEGKRMAGAAVVDGTRTIWASSLPEGTSAQKAELMALTQALRLAEGKSINIYTDSRYAFATAHVHGAIYKQRGWLTSAGREIKNKEEILSLLEALHLPKRLAIIHCPGHQKAKDPISRGNQMADRVAKQAAQGVNLLAGKRTADGSEFEKRTADGSEFESPKKKAKVE

SEQ ID NO: 380 - protein, 2087 aa, synthetic construct; identical to SEQ ID NO: 185

SEQ ID NO: 381 - protein, 2086 aa, synthetic construct; identical to SEQ ID NO: 152

SEQ ID NO: 382 - protein, 2088 aa, synthetic construct
MPAAKRVKLDGGDKKYSIGLDIGTNSVGWAVITDEYKVPSKKFKVLGNTDRHSIKKNLIGALLFDSGETAEATRLKRTARRRYTRRKNRICYLQEIFSNEMAKVDDSFFHRLEESFLVEEDKKHERHPIFGNIVDEVAYHEKYPTIYHLRKKLVDSTDKADLRLIYLALAHMIKFRGHFLIEGDLNPDNSDVDKLFIQLVQTYNQLFEENPINASGVDAKAILSARLSKSRRLENLIAQLPGEKKNGLFGNLIALSLGLTPNFKSNFDLAEDAKLQLSKDTYDDDLDNLLAQIGDQYADLFLAAKNLSDAILLSDILRVNTEITKAPLSASMIKRYDEHHQDLTLLKALVRQQLPEKYKEIFFDQSKNGYAGYIDGGASQEEFYKFIKPILEKMDGTEELLVKLNREDLLRKQRTFDNGSIPHQIHLGELHAILRRQEDFYPFLKDNREKIEKILTFRIPYYVGPLARGNSRFAWMTRKSEETITPWNFEEVVDKGASAQSFIERMTNFDKNLPNEKVLPKHSLLYEYFTVYNELTKVKYVTEGMRKPAFLSGEQKKAIVDLLFKTNRKVTVKQLKEDYFKKIECFDSVEISGVEDRFNASLGTYHDLLKIIKDKDFLDNEENEDILEDIVLTLTLFEDREMIEERLKTYAHLFDDKVMKQLKRRRYTGWGRLSRKLINGIRDKQSGKTILDFLKSDGFANRNFMQLIHDDSLTFKEDIQKAQVSGQGDSLHEHIANLAGSPAIKKGILQTVKVVDELVKVMGRHKPENIVIEMARENQTTQKGQKNSRERMKRIEEGIKELGSQILKEHPVENTQLQNEKLYLYYLQNGRDMYVDQELDINRLSDYDVDHIVPQSFLKDDSIDNKVLTRSDKARGKSDNVPSEEVVKKMKNYWRQLLNAKLITQRKFDNLTKAERGGLSELDKAGFIKRQLVETRQITKHVAQILDSRMNTKYDENDKLIREVKVITLKSKLVSDFRKDFQFYKVREINNYHHAHDAYLNAVVGTALIKKYPKLESEFVYGDYKVYDVRKMIAKSEQEIGKATAKYFFYSNIMNFFKTEITLANGEIRKRPLIETNGETGEIVWDKGRDFATVRKVLSMPQVNIVKKTEVQTGGFSKESILPKRNSDKLIARKKDWDPKKYGGFDSPTVAYSVLVVAKVEKGKSKKLKSVKELLGITIMERSSFEKNPIDFLEAKGYKEVKKDLIIKLPKYSLFELENGRKRMLASAGELQKGNELALPSKYVNFLYLASHYEKLKGSPEDNEQKQLFVEQHKHYLDEIIEQISEFSKRVILADANLDKVLSAYNKHRDKPIREQAENIIHLFTLTNLGAPAAFKYFDTTIDRKRYTSTKEVLDATLIHQSITGLYETRIDLSQLGGDGGPAPAPAPAPGGTLQLDDEYRLYSPLVKPDQNIQFWLEQFPQAWAETAGMGLAKQVPPQVIQLKASATPVSVRQYPLSKEAQEGIRPHVQRLIQQGILVPVQSPWNTPLLPVRKPGTNDYRPVQDLREVNKRVQDIHPTVPNPYNLLCALPPQRSWYTVLDLKDAFFCLRLHPTSQPLFAFEWRDPGTGRTGQLTWTRLPQGFKNSPTIFNEALHRDLANFRIQHPQVTLLQYVDDLLLAGATKQDCLEGTKALLLELSDLGYRASAKKAQICRREVTYLGYSLRDGQRWLTEARKKTVVQIPAPTTAKQVREFLGTAGFCRLWIPGFATLAAPLYPLTKPKGEFSWAPEHQKAFDAIKKALLSAPALALPDVTKPFTLYVDERKGVARGVLTQTLGPWRRPVAYLSKKLDPVASGWPVCLKAIAAVAILVKDADKLTLGQNITVIAPHALENIVRQPPDRWMTNARMTHYQSLLLTERVTFAPPAALNPATLLPEETDEPVTHDCHQLLIEETGVRKDLTDIPLTGEVLTWFTDGSSYVVEGKRMAGAAVVDGTRTIWASSLPEGTSAQKAELMALTQALRLAEGKSINIYTDSRYAFATAHVHGAIYKQRGWLTSAGREIKNKEEILSLLEALHLPKRLAIIHCPGHQKAKDPISRGNQMADRVAKQAAQGVNLLAGKRTADGSEFEKRTADGSEFESPKKKAKVE

SEQ ID NO: 383 - protein, 2085 aa, synthetic construct; identical to SEQ ID NO: 178

SEQ ID NO: 384 - protein, 2088 aa, synthetic construct; identical to SEQ ID NO: 144

SEQ ID NO: 385 - protein, 2090 aa, synthetic construct
MPAAKRVKLDGGDKKYSIGLDIGTNSVGWAVITDEYKVPSKKFKVLGNTDRHSIKKNLIGALLFDSGETAEATRLKRTARRRYTRRKNRICYLQEIFSNEMAKVDDSFFHRLEESFLVEEDKKHERHPIFGNIVDEVAYHEKYPTIYHLRKKLVDSTDKADLRLIYLALAHMIKFRGHFLIEGDLNPDNSDVDKLFIQLVQTYNQLFEENPINASGVDAKAILSARLSKSRRLENLIAQLPGEKKNGLFGNLIALSLGLTPNFKSNFDLAEDAKLQLSKDTYDDDLDNLLAQIGDQYADLFLAAKNLSDAILLSDILRVNTEITKAPLSASMIKRYDEHHQDLTLLKALVRQQLPEKYKEIFFDQSKNGYAGYIDGGASQEEFYKFIKPILEKMDGTEELLVKLNREDLLRKQRTFDNGSIPHQIHLGELHAILRRQEDFYPFLKDNREKIEKILTFRIPYYVGPLARGNSRFAWMTRKSEETITPWNFEEVVDKGASAQSFIERMTNFDKNLPNEKVLPKHSLLYEYFTVYNELTKVKYVTEGMRKPAFLSGEQKKAIVDLLFKTNRKVTVKQLKEDYFKKIECFDSVEISGVEDRFNASLGTYHDLLKIIKDKDFLDNEENEDILEDIVLTLTLFEDREMIEERLKTYAHLFDDKVMKQLKRRRYTGWGRLSRKLINGIRDKQSGKTILDFLKSDGFANRNFMQLIHDDSLTFKEDIQKAQVSGQGDSLHEHIANLAGSPAIKKGILQTVKVVDELVKVMGRHKPENIVIEMARENQTTQKGQKNSRERMKRIEEGIKELGSQILKEHPVENTQLQNEKLYLYYLQNGRDMYVDQELDINRLSDYDVDHIVPQSFLKDDSIDNKVLTRSDKARGKSDNVPSEEVVKKMKNYWRQLLNAKLITQRKFDNLTKAERGGLSELDKAGFIKRQLVETRQITKHVAQILDSRMNTKYDENDKLIREVKVITLKSKLVSDFRKDFQFYKVREINNYHHAHDAYLNAVVGTALIKKYPKLESEFVYGDYKVYDVRKMIAKSEQEIGKATAKYFFYSNIMNFFKTEITLANGEIRKRPLIETNGETGEIVWDKGRDFATVRKVLSMPQVNIVKKTEVQTGGFSKESILPKRNSDKLIARKKDWDPKKYGGFDSPTVAYSVLVVAKVEKGKSKKLKSVKELLGITIMERSSFEKNPIDFLEAKGYKEVKKDLIIKLPKYSLFELENGRKRMLASAGELQKGNELALPSKYVNFLYLASHYEKLKGSPEDNEQKQLFVEQHKHYLDEIIEQISEFSKRVILADANLDKVLSAYNKHRDKPIREQAENIIHLFTLTNLGAPAAFKYFDTTIDRKRYTSTKEVLDATLIHQSITGLYETRIDLSQLGGDGGPAPGSSEAAAKGGTLQLDDEYRLYSPLVKPDQNIQFWLEQFPQAWAETAGMGLAKQVPPQVIQLKASATPVSVRQYPLSKEAQEGIRPHVQRLIQQGILVPVQSPWNTPLLPVRKPGTNDYRPVQDLREVNKRVQDIHPTVPNPYNLLCALPPQRSWYTVLDLKDAFFCLRLHPTSQPLFAFEWRDPGTGRTGQLTWTRLPQGFKNSPTIFNEALHRDLANFRIQHPQVTLLQYVDDLLLAGATKQDCLEGTKALLLELSDLGYRASAKKAQICRREVTYLGYSLRDGQRWLTEARKKTVVQIPAPTTAKQVREFLGTAGFCRLWIPGFATLAAPLYPLTKPKGEFSWAPEHQKAFDAIKKALLSAPALALPDVTKPFTLYVDERKGVARGVLTQTLGPWRRPVAYLSKKLDPVASGWPVCLKAIAAVAILVKDADKLTLGQNITVIAPHALENIVRQPPDRWMTNARMTHYQSLLLTERVTFAPPAALNPATLLPEETDEPVTHDCHQLLIEETGVRKDLTDIPLTGEVLTWFTDGSSYVVEGKRMAGAAVVDGTRTIWASSLPEGTSAQKAELMALTQALRLAEGKSINIYTDSRYAFATAHVHGAIYKQRGWLTSAGREIKNKEEILSLLEALHLPKRLAIIHCPGHQKAKDPISRGNQMADRVAKQAAQGVNLLAGKRTADGSEFEKRTADGSEFESPKKKAKVE

SEQ ID NO: 386 - protein, 2085 aa, synthetic construct; identical to SEQ ID NO: 123

SEQ ID NO: 387 - protein, 2088 aa, synthetic construct; identical to SEQ ID NO: 155

SEQ ID NO: 388 - protein, 2088 aa, synthetic construct; identical to SEQ ID NO: 134

SEQ ID NO: 389 - protein, 2088 aa, synthetic construct; identical to SEQ ID NO: 171

SEQ ID NO: 390 - protein, 2090 aa, synthetic construct
MPAAKRVKLDGGDKKYSIGLDIGTNSVGWAVITDEYKVPSKKFKVLGNTDRHSIKKNLIGALLFDSGETAEATRLKRTARRRYTRRKNRICYLQEIFSNEMAKVDDSFFHRLEESFLVEEDKKHERHPIFGNIVDEVAYHEKYPTIYHLRKKLVDSTDKADLRLIYLALAHMIKFRGHFLIEGDLNPDNSDVDKLFIQLVQTYNQLFEENPINASGVDAKAILSARLSKSRRLENLIAQLPGEKKNGLFGNLIALSLGLTPNFKSNFDLAEDAKLQLSKDTYDDDLDNLLAQIGDQYADLFLAAKNLSDAILLSDILRVNTEITKAPLSASMIKRYDEHHQDLTLLKALVRQQLPEKYKEIFFDQSKNGYAGYIDGGASQEEFYKFIKPILEKMDGTEELLVKLNREDLLRKQRTFDNGSIPHQIHLGELHAILRRQEDFYPFLKDNREKIEKILTFRIPYYVGPLARGNSRFAWMTRKSEETITPWNFEEVVDKGASAQSFIERMTNFDKNLPNEKVLPKHSLLYEYFTVYNELTKVKYVTEGMRKPAFLSGEQKKAIVDLLFKTNRKVTVKQLKEDYFKKIECFDSVEISGVEDRFNASLGTYHDLLKIIKDKDFLDNEENEDILEDIVLTLTLFEDREMIEERLKTYAHLFDDKVMKQLKRRRYTGWGRLSRKLINGIRDKQSGKTILDFLKSDGFANRNFMQLIHDDSLTFKEDIQKAQVSGQGDSLHEHIANLAGSPAIKKGILQTVKVVDELVKVMGRHKPENIVIEMARENQTTQKGQKNSRERMKRIEEGIKELGSQILKEHPVENTQLQNEKLYLYYLQNGRDMYVDQELDINRLSDYDVDHIVPQSFLKDDSIDNKVLTRSDKARGKSDNVPSEEVVKKMKNYWRQLLNAKLITQRKFDNLTKAERGGLSELDKAGFIKRQLVETRQITKHVAQILDSRMNTKYDENDKLIREVKVITLKSKLVSDFRKDFQFYKVREINNYHHAHDAYLNAVVGTALIKKYPKLESEFVYGDYKVYDVRKMIAKSEQEIGKATAKYFFYSNIMNFFKTEITLANGEIRKRPLIETNGETGEIVWDKGRDFATVRKVLSMPQVNIVKKTEVQTGGFSKESILPKRNSDKLIARKKDWDPKKYGGFDSPTVAYSVLVVAKVEKGKSKKLKSVKELLGITIMERSSFEKNPIDFLEAKGYKEVKKDLIIKLPKYSLFELENGRKRMLASAGELQKGNELALPSKYVNFLYLASHYEKLKGSPEDNEQKQLFVEQHKHYLDEIIEQISEFSKRVILADANLDKVLSAYNKHRDKPIREQAENIIHLFTLTNLGAPAAFKYFDTTIDRKRYTSTKEVLDATLIHQSITGLYETRIDLSQLGGDGGEAAAKGSSPAPGGTLQLDDEYRLYSPLVKPDQNIQFWLEQFPQAWAETAGMGLAKQVPPQVIQLKASATPVSVRQYPLSKEAQEGIRPHVQRLIQQGILVPVQSPWNTPLLPVRKPGTNDYRPVQDLREVNKRVQDIHPTVPNPYNLLCALPPQRSWYTVLDLKDAFFCLRLHPTSQPLFAFEWRDPGTGRTGQLTWTRLPQGFKNSPTIFNEALHRDLANFRIQHPQVTLLQYVDDLLLAGATKQDCLEGTKALLLELSDLGYRASAKKAQICRREVTYLGYSLRDGQRWLTEARKKTVVQIPAPTTAKQVREFLGTAGFCRLWIPGFATLAAPLYPLTKPKGEFSWAPEHQKAFDAIKKALLSAPALALPDVTKPFTLYVDERKGVARGVLTQTLGPWRRPVAYLSKKLDPVASGWPVCLKAIAAVAILVKDADKLTLGQNITVIAPHALENIVRQPPDRWMTNARMTHYQSLLLTERVTFAPPAALNPATLLPEETDEPVTHDCHQLLIEETGVRKDLTDIPLTGEVLTWFTDGSSYVVEGKRMAGAAVVDGTRTIWASSLPEGTSAQKAELMALTQALRLAEGKSINIYTDSRYAFATAHVHGAIYKQRGWLTSAGREIKNKEEILSLLEALHLPKRLAIIHCPGHQKAKDPISRGNQMADRVAKQAAQGVNLLAGKRTADGSEFEKRTADGSEFESPKKKAKVE

SEQ ID NO: 391 - protein, 2094 aa, synthetic construct; identical to SEQ ID NO: 159

SEQ ID NO: 392 - protein, 2084 aa, synthetic construct; identical to SEQ ID NO: 147

SEQ ID NO: 393 - protein, 2085 aa, synthetic construct; identical to SEQ ID NO: 174

SEQ ID NO: 394 - protein, 2087 aa, synthetic construct
MPAAKRVKLDGGDKKYSIGLDIGTNSVGWAVITDEYKVPSKKFKVLGNTDRHSIKKNLIGALLFDSGETAEATRLKRTARRRYTRRKNRICYLQEIFSNEMAKVDDSFFHRLEESFLVEEDKKHERHPIFGNIVDEVAYHEKYPTIYHLRKKLVDSTDKADLRLIYLALAHMIKFRGHFLIEGDLNPDNSDVDKLFIQLVQTYNQLFEENPINASGVDAKAILSARLSKSRRLENLIAQLPGEKKNGLFGNLIALSLGLTPNFKSNFDLAEDAKLQLSKDTYDDDLDNLLAQIGDQYADLFLAAKNLSDAILLSDILRVNTEITKAPLSASMIKRYDEHHQDLTLLKALVRQQLPEKYKEIFFDQSKNGYAGYIDGGASQEEFYKFIKPILEKMDGTEELLVKLNREDLLRKQRTFDNGSIPHQIHLGELHAILRRQEDFYPFLKDNREKIEKILTFRIPYYVGPLARGNSRFAWMTRKSEETITPWNFEEVVDKGASAQSFIERMTNFDKNLPNEKVLPKHSLLYEYFTVYNELTKVKYVTEGMRKPAFLSGEQKKAIVDLLFKTNRKVTVKQLKEDYFKKIECFDSVEISGVEDRFNASLGTYHDLLKIIKDKDFLDNEENEDILEDIVLTLTLFEDREMIEERLKTYAHLFDDKVMKQLKRRRYTGWGRLSRKLINGIRDKQSGKTILDFLKSDGFANRNFMQLIHDDSLTFKEDIQKAQVSGQGDSLHEHIANLAGSPAIKKGILQTVKVVDELVKVMGRHKPENIVIEMARENQTTQKGQKNSRERMKRIEEGIKELGSQILKEHPVENTQLQNEKLYLYYLQNGRDMYVDQELDINRLSDYDVDHIVPQSFLKDDSIDNKVLTRSDKARGKSDNVPSEEVVKKMKNYWRQLLNAKLITQRKFDNLTKAERGGLSELDKAGFIKRQLVETRQITKHVAQILDSRMNTKYDENDKLIREVKVITLKSKLVSDFRKDFQFYKVREINNYHHAHDAYLNAVVGTALIKKYPKLESEFVYGDYKVYDVRKMIAKSEQEIGKATAKYFFYSNIMNFFKTEITLANGEIRKRPLIETNGETGEIVWDKGRDFATVRKVLSMPQVNIVKKTEVQTGGFSKESILPKRNSDKLIARKKDWDPKKYGGFDSPTVAYSVLVVAKVEKGKSKKLKSVKELLGITIMERSSFEKNPIDFLEAKGYKEVKKDLIIKLPKYSLFELENGRKRMLASAGELQKGNELALPSKYVNFLYLASHYEKLKGSPEDNEQKQLFVEQHKHYLDEIIEQISEFSKRVILADANLDKVLSAYNKHRDKPIREQAENIIHLFTLTNLGAPAAFKYFDTTIDRKRYTSTKEVLDATLIHQSITGLYETRIDLSQLGGDGGGGSEAAAKGGTLQLDDEYRLYSPLVKPDQNIQFWLEQFPQAWAETAGMGLAKQVPPQVIQLKASATPVSVRQYPLSKEAQEGIRPHVQRLIQQGILVPVQSPWNTPLLPVRKPGTNDYRPVQDLREVNKRVQDIHPTVPNPYNLLCALPPQRSWYTVLDLKDAFFCLRLHPTSQPLFAFEWRDPGTGRTGQLTWTRLPQGFKNSPTIFNEALHRDLANFRIQHPQVTLLQYVDDLLLAGATKQDCLEGTKALLLELSDLGYRASAKKAQICRREVTYLGYSLRDGQRWLTEARKKTVVQIPAPTTAKQVREFLGTAGFCRLWIPGFATLAAPLYPLTKPKGEFSWAPEHQKAFDAIKKALLSAPALALPDVTKPFTLYVDERKGVARGVLTQTLGPWRRPVAYLSKKLDPVASGWPVCLKAIAAVAILVKDADKLTLGQNITVIAPHALENIVRQPPDRWMTNARMTHYQSLLLTERVTFAPPAALNPATLLPEETDEPVTHDCHQLLIEETGVRKDLTDIPLTGEVLTWFTDGSSYVVEGKRMAGAAVVDGTRTIWASSLPEGTSAQKAELMALTQALRLAEGKSINIYTDSRYAFATAHVHGAIYKQRGWLTSAGREIKNKEEILSLLEALHLPKRLAIIHCPGHQKAKDPISRGNQMADRVAKQAAQGVNLLAGKRTADGSEFEKRTADGSEFESPKKKAKVE

SEQ ID NO: 395 - protein, 2088 aa, synthetic construct; identical to SEQ ID NO: 180

SEQ ID NO: 396 - protein, 2097 aa, synthetic construct; identical to SEQ ID NO: 113

SEQ ID NO: 397 - protein, 2085 aa, synthetic construct; identical to SEQ ID NO: 184

SEQ ID NO: 398 - protein, 2090 aa, synthetic construct; identical to SEQ ID NO: 119

SEQ ID NO: 399 - protein, 2089 aa, synthetic construct
MPAAKRVKLDGGDKKYSIGLDIGTNSVGWAVITDEYKVPSKKFKVLGNTDRHSIKKNLIGALLFDSGETAEATRLKRTARRRYTRRKNRICYLQEIFSNEMAKVDDSFFHRLEESFLVEEDKKHERHPIFGNIVDEVAYHEKYPTIYHLRKKLVDSTDKADLRLIYLALAHMIKFRGHFLIEGDLNPDNSDVDKLFIQLVQTYNQLFEENPINASGVDAKAILSARLSKSRRLENLIAQLPGEKKNGLFGNLIALSLGLTPNFKSNFDLAEDAKLQLSKDTYDDDLDNLLAQIGDQYADLFLAAKNLSDAILLSDILRVNTEITKAPLSASMIKRYDEHHQDLTLLKALVRQQLPEKYKEIFFDQSKNGYAGYIDGGASQEEFYKFIKPILEKMDGTEELLVKLNREDLLRKQRTFDNGSIPHQIHLGELHAILRRQEDFYPFLKDNREKIEKILTFRIPYYVGPLARGNSRFAWMTRKSEETITPWNFEEVVDKGASAQSFIERMTNFDKNLPNEKVLPKHSLLYEYFTVYNELTKVKYVTEGMRKPAFLSGEQKKAIVDLLFKTNRKVTVKQLKEDYFKKIECFDSVEISGVEDRFNASLGTYHDLLKIIKDKDFLDNEENEDILEDIVLTLTLFEDREMIEERLKTYAHLFDDKVMKQLKRRRYTGWGRLSRKLINGIRDKQSGKTILDFLKSDGFANRNFMQLIHDDSLTFKEDIQKAQVSGQGDSLHEHIANLAGSPAIKKGILQTVKVVDELVKVMGRHKPENIVIEMARENQTTQKGQKNSRERMKRIEEGIKELGSQILKEHPVENTQLQNEKLYLYYLQNGRDMYVDQELDINRLSDYDVDHIVPQSFLKDDSIDNKVLTRSDKARGKSDNVPSEEVVKKMKNYWRQLLNAKLITQRKFDNLTKAERGGLSELDKAGFIKRQLVETRQITKHVAQILDSRMNTKYDENDKLIREVKVITLKSKLVSDFRKDFQFYKVREINNYHHAHDAYLNAVVGTALIKKYPKLESEFVYGDYKVYDVRKMIAKSEQEIGKATAKYFFYSNIMNFFKTEITLANGEIRKRPLIETNGETGEIVWDKGRDFATVRKVLSMPQVNIVKKTEVQTGGFSKESILPKRNSDKLIARKKDWDPKKYGGFDSPTVAYSVLVVAKVEKGKSKKLKSVKELLGITIMERSSFEKNPIDFLEAKGYKEVKKDLIIKLPKYSLFELENGRKRMLASAGELQKGNELALPSKYVNFLYLASHYEKLKGSPEDNEQKQLFVEQHKHYLDEIIEQISEFSKRVILADANLDKVLSAYNKHRDKPIREQAENIIHLFTLTNLGAPAAFKYFDTTIDRKRYTSTKEVLDATLIHQSITGLYETRIDLSQLGGDGGEAAAKEAAAKGGTLQLDDEYRLYSPLVKPDQNIQFWLEQFPQAWAETAGMGLAKQVPPQVIQLKASATPVSVRQYPLSKEAQEGIRPHVQRLIQQGILVPVQSPWNTPLLPVRKPGTNDYRPVQDLREVNKRVQDIHPTVPNPYNLLCALPPQRSWYTVLDLKDAFFCLRLHPTSQPLFAFEWRDPGTGRTGQLTWTRLPQGFKNSPTIFNEALHRDLANFRIQHPQVTLLQYVDDLLLAGATKQDCLEGTKALLLELSDLGYRASAKKAQICRREVTYLGYSLRDGQRWLTEARKKTVVQIPAPTTAKQVREFLGTAGFCRLWIPGFATLAAPLYPLTKPKGEFSWAPEHQKAFDAIKKALLSAPALALPDVTKPFTLYVDERKGVARGVLTQTLGPWRRPVAYLSKKLDPVASGWPVCLKAIAAVAILVKDADKLTLGQNITVIAPHALENIVRQPPDRWMTNARMTHYQSLLLTERVTFAPPAALNPATLLPEETDEPVTHDCHQLLIEETGVRKDLTDIPLTGEVLTWFTDGSSYVVEGKRMAGAAVVDGTRTIWASSLPEGTSAQKAELMALTQALRLAEGKSINIYTDSRYAFATAHVHGAIYKQRGWLTSAGREIKNKEEILSLLEALHLPKRLAIIHCPGHQKAKDPISRGNQMADRVAKQAAQGVNLLAGKRTADGSEFEKRTADGSEFESPKKKAKVE

SEQ ID NO: 400 - protein, 2088 aa, synthetic construct; identical to SEQ ID NO: 129

SEQ ID NO: 401 - protein, 2088 aa, synthetic construct
MPAAKRVKLDGGDKKYSIGLDIGTNSVGWAVITDEYKVPSKKFKVLGNTDRHSIKKNLIGALLFDSGETAEATRLKRTARRRYTRRKNRICYLQEIFSNEMAKVDDSFFHRLEESFLVEEDKKHERHPIFGNIVDEVAYHEKYPTIYHLRKKLVDSTDKADLRLIYLALAHMIKFRGHFLIEGDLNPDNSDVDKLFIQLVQTYNQLFEENPINASGVDAKAILSARLSKSRRLENLIAQLPGEKKNGLFGNLIALSLGLTPNFKSNFDLAEDAKLQLSKDTYDDDLDNLLAQIGDQYADLFLAAKNLSDAILLSDILRVNTEITKAPLSASMIKRYDEHHQDLTLLKALVRQQLPEKYKEIFFDQSKNGYAGYIDGGASQEEFYKFIKPILEKMDGTEELLVKLNREDLLRKQRTFDNGSIPHQIHLGELHAILRRQEDFYPFLKDNREKIEKILTFRIPYYVGPLARGNSRFAWMTRKSEETITPWNFEEVVDKGASAQSFIERMTNFDKNLPNEKVLPKHSLLYEYFTVYNELTKVKYVTEGMRKPAFLSGEQKKAIVDLLFKTNRKVTVKQLKEDYFKKIECFDSVEISGVEDRFNASLGTYHDLLKIIKDKDFLDNEENEDILEDIVLTLTLFEDREMIEERLKTYAHLFDDKVMKQLKRRRYTGWGRLSRKLINGIRDKQSGKTILDFLKSDGFANRNFMQLIHDDSLTFKEDIQKAQVSGQGDSLHEHIANLAGSPAIKKGILQTVKVVDELVKVMGRHKPENIVIEMARENQTTQKGQKNSRERMKRIEEGIKELGSQILKEHPVENTQLQNEKLYLYYLQNGRDMYVDQELDINRLSDYDVDHIVPQSFLKDDSIDNKVLTRSDKARGKSDNVPSEEVVKKMKNYWRQLLNAKLITQRKFDNLTKAERGGLSELDKAGFIKRQLVETRQITKHVAQILDSRMNTKYDENDKLIREVKVITLKSKLVSDFRKDFQFYKVREINNYHHAHDAYLNAVVGTALIKKYPKLESEFVYGDYKVYDVRKMIAKSEQEIGKATAKYFFYSNIMNFFKTEITLANGEIRKRPLIETNGETGEIVWDKGRDFATVRKVLSMPQVNIVKKTEVQTGGFSKESILPKRNSDKLIARKKDWDPKKYGGFDSPTVAYSVLVVAKVEKGKSKKLKSVKELLGITIMERSSFEKNPIDFLEAKGYKEVKKDLIIKLPKYSLFELENGRKRMLASAGELQKGNELALPSKYVNFLYLASHYEKLKGSPEDNEQKQLFVEQHKHYLDEIIEQISEFSKRVILADANLDKVLSAYNKHRDKPIREQAENIIHLFTLTNLGAPAAFKYFDTTIDRKRYTSTKEVLDATLIHQSITGLYETRIDLSQLGGDGGGSSGGSPAPGGTLQLDDEYRLYSPLVKPDQNIQFWLEQFPQAWAETAGMGLAKQVPPQVIQLKASATPVSVRQYPLSKEAQEGIRPHVQRLIQQGILVPVQSPWNTPLLPVRKPGTNDYRPVQDLREVNKRVQDIHPTVPNPYNLLCALPPQRSWYTVLDLKDAFFCLRLHPTSQPLFAFEWRDPGTGRTGQLTWTRLPQGFKNSPTIFNEALHRDLANFRIQHPQVTLLQYVDDLLLAGATKQDCLEGTKALLLELSDLGYRASAKKAQICRREVTYLGYSLRDGQRWLTEARKKTVVQIPAPTTAKQVREFLGTAGFCRLWIPGFATLAAPLYPLTKPKGEFSWAPEHQKAFDAIKKALLSAPALALPDVTKPFTLYVDERKGVARGVLTQTLGPWRRPVAYLSKKLDPVASGWPVCLKAIAAVAILVKDADKLTLGQNITVIAPHALENIVRQPPDRWMTNARMTHYQSLLLTERVTFAPPAALNPATLLPEETDEPVTHDCHQLLIEETGVRKDLTDIPLTGEVLTWFTDGSSYVVEGKRMAGAAVVDGTRTIWASSLPEGTSAQKAELMALTQALRLAEGKSINIYTDSRYAFATAHVHGAIYKQRGWLTSAGREIKNKEEILSLLEALHLPKRLAIIHCPGHQKAKDPISRGNQMADRVAKQAAQGVNLLAGKRTADGSEFEKRTADGSEFESPKKKAKVE

SEQ ID NO: 402 - protein, 2088 aa, synthetic construct
MPAAKRVKLDGGDKKYSIGLDIGTNSVGWAVITDEYKVPSKKFKVLGNTDRHSIKKNLIGALLFDSGETAEATRLKRTARRRYTRRKNRICYLQEIFSNEMAKVDDSFFHRLEESFLVEEDKKHERHPIFGNIVDEVAYHEKYPTIYHLRKKLVDSTDKADLRLIYLALAHMIKFRGHFLIEGDLNPDNSDVDKLFIQLVQTYNQLFEENPINASGVDAKAILSARLSKSRRLENLIAQLPGEKKNGLFGNLIALSLGLTPNFKSNFDLAEDAKLQLSKDTYDDDLDNLLAQIGDQYADLFLAAKNLSDAILLSDILRVNTEITKAPLSASMIKRYDEHHQDLTLLKALVRQQLPEKYKEIFFDQSKNGYAGYIDGGASQEEFYKFIKPILEKMDGTEELLVKLNREDLLRKQRTFDNGSIPHQIHLGELHAILRRQEDFYPFLKDNREKIEKILTFRIPYYVGPLARGNSRFAWMTRKSEETITPWNFEEVVDKGASAQSFIERMTNFDKNLPNEKVLPKHSLLYEYFTVYNELTKVKYVTEGMRKPAFLSGEQKKAIVDLLFKTNRKVTVKQLKEDYFKKIECFDSVEISGVEDRFNASLGTYHDLLKIIKDKDFLDNEENEDILEDIVLTLTLFEDREMIEERLKTYAHLFDDKVMKQLKRRRYTGWGRLSRKLINGIRDKQSGKTILDFLKSDGFANRNFMQLIHDDSLTFKEDIQKAQVSGQGDSLHEHIANLAGSPAIKKGILQTVKVVDELVKVMGRHKPENIVIEMARENQTTQKGQKNSRERMKRIEEGIKELGSQILKEHPVENTQLQNEKLYLYYLQNGRDMYVDQELDINRLSDYDVDHIVPQSFLKDDSIDNKVLTRSDKARGKSDNVPSEEVVKKMKNYWRQLLNAKLITQRKFDNLTKAERGGLSELDKAGFIKRQLVETRQITKHVAQILDSRMNTKYDENDKLIREVKVITLKSKLVSDFRKDFQFYKVREINNYHHAHDAYLNAVVGTALIKKYPKLESEFVYGDYKVYDVRKMIAKSEQEIGKATAKYFFYSNIMNFFKTEITLANGEIRKRPLIETNGETGEIVWDKGRDFATVRKVLSMPQVNIVKKTEVQTGGFSKESILPKRNSDKLIARKKDWDPKKYGGFDSPTVAYSVLVVAKVEKGKSKKLKSVKELLGITIMERSSFEKNPIDFLEAKGYKEVKKDLIIKLPKYSLFELENGRKRMLASAGELQKGNELALPSKYVNFLYLASHYEKLKGSPEDNEQKQLFVEQHKHYLDEIIEQISEFSKRVILADANLDKVLSAYNKHRDKPIREQAENIIHLFTLTNLGAPAAFKYFDTTIDRKRYTSTKEVLDATLIHQSITGLYETRIDLSQLGGDGGGGGGGSPAPGGTLQLDDEYRLYSPLVKPDQNIQFWLEQFPQAWAETAGMGLAKQVPPQVIQLKASATPVSVRQYPLSKEAQEGIRPHVQRLIQQGILVPVQSPWNTPLLPVRKPGTNDYRPVQDLREVNKRVQDIHPTVPNPYNLLCALPPQRSWYTVLDLKDAFFCLRLHPTSQPLFAFEWRDPGTGRTGQLTWTRLPQGFKNSPTIFNEALHRDLANFRIQHPQVTLLQYVDDLLLAGATKQDCLEGTKALLLELSDLGYRASAKKAQICRREVTYLGYSLRDGQRWLTEARKKTVVQIPAPTTAKQVREFLGTAGFCRLWIPGFATLAAPLYPLTKPKGEFSWAPEHQKAFDAIKKALLSAPALALPDVTKPFTLYVDERKGVARGVLTQTLGPWRRPVAYLSKKLDPVASGWPVCLKAIAAVAILVKDADKLTLGQNITVIAPHALENIVRQPPDRWMTNARMTHYQSLLLTERVTFAPPAALNPATLLPEETDEPVTHDCHQLLIEETGVRKDLTDIPLTGEVLTWFTDGSSYVVEGKRMAGAAVVDGTRTIWASSLPEGTSAQKAELMALTQALRLAEGKSINIYTDSRYAFATAHVHGAIYKQRGWLTSAGREIKNKEEILSLLEALHLPKRLAIIHCPGHQKAKDPISRGNQMADRVAKQAAQGVNLLAGKRTADGSEFEKRTADGSEFESPKKKAKVE

SEQ ID NO: 403 - protein, 2088 aa, synthetic construct; identical to SEQ ID NO: 130

SEQ ID NO: 404 - protein, 2094 aa, synthetic construct; identical to SEQ ID NO: 161

SEQ ID NO: 405 - protein, 2085 aa, synthetic construct
MPAAKRVKLDGGDKKYSIGLDIGTNSVGWAVITDEYKVPSKKFKVLGNTDRHSIKKNLIGALLFDSGETAEATRLKRTARRRYTRRKNRICYLQEIFSNEMAKVDDSFFHRLEESFLVEEDKKHERHPIFGNIVDEVAYHEKYPTIYHLRKKLVDSTDKADLRLIYLALAHMIKFRGHFLIEGDLNPDNSDVDKLFIQLVQTYNQLFEENPINASGVDAKAILSARLSKSRRLENLIAQLPGEKKNGLFGNLIALSLGLTPNFKSNFDLAEDAKLQLSKDTYDDDLDNLLAQIGDQYADLFLAAKNLSDAILLSDILRVNTEITKAPLSASMIKRYDEHHQDLTLLKALVRQQLPEKYKEIFFDQSKNGYAGYIDGGASQEEFYKFIKPILEKMDGTEELLVKLNREDLLRKQRTFDNGSIPHQIHLGELHAILRRQEDFYPFLKDNREKIEKILTFRIPYYVGPLARGNSRFAWMTRKSEETITPWNFEEVVDKGASAQSFIERMTNFDKNLPNEKVLPKHSLLYEYFTVYNELTKVKYVTEGMRKPAFLSGEQKKAIVDLLFKTNRKVTVKQLKEDYFKKIECFDSVEISGVEDRFNASLGTYHDLLKIIKDKDFLDNEENEDILEDIVLTLTLFEDREMIEERLKTYAHLFDDKVMKQLKRRRYTGWGRLSRKLINGIRDKQSGKTILDFLKSDGFANRNFMQLIHDDSLTFKEDIQKAQVSGQGDSLHEHIANLAGSPAIKKGILQTVKVVDELVKVMGRHKPENIVIEMARENQTTQKGQKNSRERMKRIEEGIKELGSQILKEHPVENTQLQNEKLYLYYLQNGRDMYVDQELDINRLSDYDVDHIVPQSFLKDDSIDNKVLTRSDKARGKSDNVPSEEVVKKMKNYWRQLLNAKLITQRKFDNLTKAERGGLSELDKAGFIKRQLVETRQITKHVAQILDSRMNTKYDENDKLIREVKVITLKSKLVSDFRKDFQFYKVREINNYHHAHDAYLNAVVGTALIKKYPKLESEFVYGDYKVYDVRKMIAKSEQEIGKATAKYFFYSNIMNFFKTEITLANGEIRKRPLIETNGETGEIVWDKGRDFATVRKVLSMPQVNIVKKTEVQTGGFSKESILPKRNSDKLIARKKDWDPKKYGGFDSPTVAYSVLVVAKVEKGKSKKLKSVKELLGITIMERSSFEKNPIDFLEAKGYKEVKKDLIIKLPKYSLFELENGRKRMLASAGELQKGNELALPSKYVNFLYLASHYEKLKGSPEDNEQKQLFVEQHKHYLDEIIEQISEFSKRVILADANLDKVLSAYNKHRDKPIREQAENIIHLFTLTNLGAPAAFKYFDTTIDRKRYTSTKEVLDATLIHQSITGLYETRIDLSQLGGDGGGGGGSSGGTLQLDDEYRLYSPLVKPDQNIQFWLEQFPQAWAETAGMGLAKQVPPQVIQLKASATPVSVRQYPLSKEAQEGIRPHVQRLIQQGILVPVQSPWNTPLLPVRKPGTNDYRPVQDLREVNKRVQDIHPTVPNPYNLLCALPPQRSWYTVLDLKDAFFCLRLHPTSQPLFAFEWRDPGTGRTGQLTWTRLPQGFKNSPTIFNEALHRDLANFRIQHPQVTLLQYVDDLLLAGATKQDCLEGTKALLLELSDLGYRASAKKAQICRREVTYLGYSLRDGQRWLTEARKKTVVQIPAPTTAKQVREFLGTAGFCRLWIPGFATLAAPLYPLTKPKGEFSWAPEHQKAFDAIKKALLSAPALALPDVTKPFTLYVDERKGVARGVLTQTLGPWRRPVAYLSKKLDPVASGWPVCLKAIAAVAILVKDADKLTLGQNITVIAPHALENIVRQPPDRWMTNARMTHYQSLLLTERVTFAPPAALNPATLLPEETDEPVTHDCHQLLIEETGVRKDLTDIPLTGEVLTWFTDGSSYVVEGKRMAGAAVVDGTRTIWASSLPEGTSAQKAELMALTQALRLAEGKSINIYTDSRYAFATAHVHGAIYKQRGWLTSAGREIKNKEEILSLLEALHLPKRLAIIHCPGHQKAKDPISRGNQMADRVAKQAAQGVNLLAGKRTADGSEFEKRTADGSEFESPKKKAKVE

SEQ ID NO: 406 - protein, 2088 aa, synthetic construct; identical to SEQ ID NO: 182

SEQ ID NO: 407 - protein, 2211 aa, synthetic construct
MPAAKRVKLDGGDKKYSIGLDIGTNSVGWAVITDEYKVPSKKFKVLGNTDRHSIKKNLIGALLFDSGETAEATRLKRTARRRYTRRKNRICYLQEIFSNEMAKVDDSFFHRLEESFLVEEDKKHERHPIFGNIVDEVAYHEKYPTIYHLRKKLVDSTDKADLRLIYLALAHMIKFRGHFLIEGDLNPDNSDVDKLFIQLVQTYNQLFEENPINASGVDAKAILSARLSKSRRLENLIAQLPGEKKNGLFGNLIALSLGLTPNFKSNFDLAEDAKLQLSKDTYDDDLDNLLAQIGDQYADLFLAAKNLSDAILLSDILRVNTEITKAPLSASMIKRYDEHHQDLTLLKALVRQQLPEKYKEIFFDQSKNGYAGYIDGGASQEEFYKFIKPILEKMDGTEELLVKLNREDLLRKQRTFDNGSIPHQIHLGELHAILRRQEDFYPFLKDNREKIEKILTFRIPYYVGPLARGNSRFAWMTRKSEETITPWNFEEVVDKGASAQSFIERMTNFDKNLPNEKVLPKHSLLYEYFTVYNELTKVKYVTEGMRKPAFLSGEQKKAIVDLLFKTNRKVTVKQLKEDYFKKIECFDSVEISGVEDRFNASLGTYHDLLKIIKDKDFLDNEENEDILEDIVLTLTLFEDREMIEERLKTYAHLFDDKVMKQLKRRRYTGWGRLSRKLINGIRDKQSGKTILDFLKSDGFANRNFMQLIHDDSLTFKEDIQKAQVSGQGDSLHEHIANLAGSPAIKKGILQTVKVVDELVKVMGRHKPENIVIEMARENQTTQKGQKNSRERMKRIEEGIKELGSQILKEHPVENTQLQNEKLYLYYLQNGRDMYVDQELDINRLSDYDVDHIVPQSFLKDDSIDNKVLTRSDKARGKSDNVPSEEVVKKMKNYWRQLLNAKLITQRKFDNLTKAERGGLSELDKAGFIKRQLVETRQITKHVAQILDSRMNTKYDENDKLIREVKVITLKSKLVSDFRKDFQFYKVREINNYHHAHDAYLNAVVGTALIKKYPKLESEFVYGDYKVYDVRKMIAKSEQEIGKATAKYFFYSNIMNFFKTEITLANGEIRKRPLIETNGETGEIVWDKGRDFATVRKVLSMPQVNIVKKTEVQTGGFSKESILPKRNSDKLIARKKDWDPKKYGGFDSPTVAYSVLVVAKVEKGKSKKLKSVKELLGITIMERSSFEKNPIDFLEAKGYKEVKKDLIIKLPKYSLFELENGRKRMLASAGELQKGNELALPSKYVNFLYLASHYEKLKGSPEDNEQKQLFVEQHKHYLDEIIEQISEFSKRVILADANLDKVLSAYNKHRDKPIREQAENIIHLFTLTNLGAPAAFKYFDTTIDRKRYTSTKEVLDATLIHQSITGLYETRIDLSQLGGDGGAEAAAKEAAAKEAAAKEAAAKALEAEAAAKEAAAKEAAAKEAAAKAGGMDPLQLLQPLEAEIKGTKLKAHWNSGATITCVPEAFLEDERPIQTMLIKTIHGEKQQDVYYLTFKVQGRKVEAEVLASPYDYILLNPSDVPWLMKKPLQLTVLVPLHEYQERLLQQTALPKEQKELLQKLFLKYDALWQHWENQVGHRRIKPHNIATGTLAPRPQKQYPINPKAKPSIQIVIDDLLKQGVLIQQNSTMNTPVYPVPKPDGKWRMVLDYREVNKTIPLIAAQNQHSAGILSSIYRGKYKTTLDLTNGFWAHPITPESYWLTAFTWQGKQYCWTRLPQGFLNSPALFTADVVDLLKEIPNVQAYVDDIYISHDDPQEHLEQLEKIFSILLNAGYVVSLKKSEIAQREVEFLGFNITKEGRGLTDTFKQKLLNITPPKDLKQLQSILGLLNFARNFIPNYSELVKPLYTIVANANGKFISWTEDNSNQLQHIISVLNQADNLEERNPETRLIIKVNSSPSAGYIRYYNEGSKRPIMYVNYIFSKAEAKFTQTEKLLTTMHKGLIKAMDLAMGQEILVYSPIVSMTKIQRTPLPERKALPVRWITWMTYLEDPRIQFHYDKSLPELQQIPNVTEDVIAKTKHPSEFAMVFYTDGSAIKHPDVNKSHSAGMGIAQVQFIPEYKIVHQWSIPLGDHTAQLAEIAAVEFACKKALKISGPVLIVTDSFYVAESANKELPYWKSNGFLNNKKKPLRHVSKWKSIAECLQLKPDIIIMHEKGHQQPMTTLHTEGNNLADKLATQGSYVVHAGKRTADGSEFEKRTADGSEFESPKKKAKVE

SEQ ID NO: 408 - protein, 2198 aa, synthetic construct
MPAAKRVKLDGGDKKYSIGLDIGTNSVGWAVITDEYKVPSKKFKVLGNTDRHSIKKNLIGALLFDSGETAEATRLKRTARRRYTRRKNRICYLQEIFSNEMAKVDDSFFHRLEESFLVEEDKKHERHPIFGNIVDEVAYHEKYPTIYHLRKKLVDSTDKADLRLIYLALAHMIKFRGHFLIEGDLNPDNSDVDKLFIQLVQTYNQLFEENPINASGVDAKAILSARLSKSRRLENLIAQLPGEKKNGLFGNLIALSLGLTPNFKSNFDLAEDAKLQLSKDTYDDDLDNLLAQIGDQYADLFLAAKNLSDAILLSDILRVNTEITKAPLSASMIKRYDEHHQDLTLLKALVRQQLPEKYKEIFFDQSKNGYAGYIDGGASQEEFYKFIKPILEKMDGTEELLVKLNREDLLRKQRTFDNGSIPHQIHLGELHAILRRQEDFYPFLKDNREKIEKILTFRIPYYVGPLARGNSRFAWMTRKSEETITPWNFEEVVDKGASAQSFIERMTNFDKNLPNEKVLPKHSLLYEYFTVYNELTKVKYVTEGMRKPAFLSGEQKKAIVDLLFKTNRKVTVKQLKEDYFKKIECFDSVEISGVEDRFNASLGTYHDLLKIIKDKDFLDNEENEDILEDIVLTLTLFEDREMIEERLKTYAHLFDDKVMKQLKRRRYTGWGRLSRKLINGIRDKQSGKTILDFLKSDGFANRNFMQLIHDDSLTFKEDIQKAQVSGQGDSLHEHIANLAGSPAIKKGILQTVKVVDELVKVMGRHKPENIVIEMARENQTTQKGQKNSRERMKRIEEGIKELGSQILKEHPVENTQLQNEKLYLYYLQNGRDMYVDQELDINRLSDYDVDHIVPQSFLKDDSIDNKVLTRSDKARGKSDNVPSEEVVKKMKNYWRQLLNAKLITQRKFDNLTKAERGGLSELDKAGFIKRQLVETRQITKHVAQILDSRMNTKYDENDKLIREVKVITLKSKLVSDFRKDFQFYKVREINNYHHAHDAYLNAVVGTALIKKYPKLESEFVYGDYKVYDVRKMIAKSEQEIGKATAKYFFYSNIMNFFKTEITLANGEIRKRPLIETNGETGEIVWDKGRDFATVRKVLSMPQVNIVKKTEVQTGGFSKESILPKRNSDKLIARKKDWDPKKYGGFDSPTVAYSVLVVAKVEKGKSKKLKSVKELLGITIMERSSFEKNPIDFLEAKGYKEVKKDLIIKLPKYSLFELENGRKRMLASAGELQKGNELALPSKYVNFLYLASHYEKLKGSPEDNEQKQLFVEQHKHYLDEIIEQISEFSKRVILADANLDKVLSAYNKHRDKPIREQAENIIHLFTLTNLGAPAAFKYFDTTIDRKRYTSTKEVLDATLIHQSITGLYETRIDLSQLGGDGGSGGSSGGSSGSETPGTSESATPESSGGSSGGSSGGMDPLQLLQPLEAEIKGTKLKAHWNSGATITCVPEAFLEDERPIQTMLIKTIHGEKQQDVYYLTFKVQGRKVEAEVLASPYDYILLNPSDVPWLMKKPLQLTVLVPLHEYQERLLQQTALPKEQKELLQKLFLKYDALWQHWENQVGHRRIKPHNIATGTLAPRPQKQYPINPKAKPSIQIVIDDLLKQGVLIQQNSTMNTPVYPVPKPDGKWRMVLDYREVNKTIPLIAAQNQHSAGILSSIYRGKYKTTLDLTNGFWAHPITPESYWLTAFTWQGKQYCWTRLPQGFLNSPALFTADVVDLLKEIPNVQAYVDDIYISHDDPQEHLEQLEKIFSILLNAGYVVSLKKSEIAQREVEFLGFNITKEGRGLTDTFKQKLLNITPPKDLKQLQSILGLLNFARNFIPNYSELVKPLYTIVANANGKFISWTEDNSNQLQHIISVLNQADNLEERNPETRLIIKVNSSPSAGYIRYYNEGSKRPIMYVNYIFSKAEAKFTQTEKLLTTMHKGLIKAMDLAMGQEILVYSPIVSMTKIQRTPLPERKALPVRWITWMTYLEDPRIQFHYDKSLPELQQIPNVTEDVIAKTKHPSEFAMVFYTDGSAIKHPDVNKSHSAGMGIAQVQFIPEYKIVHQWSIPLGDHTAQLAEIAAVEFACKKALKISGPVLIVTDSFYVAESANKELPYWKSNGFLNNKKKPLRHVSKWKSIAECLQLKPDIIIMHEKGHQQPMTTLHTEGNNLADKLATQGSYVVHAGKRTADGSEFEKRTADGSEFESPKKKAKVE

SEQ ID NO: 409 - protein, 2176 aa, synthetic construct
MPAAKRVKLDGGDKKYSIGLDIGTNSVGWAVITDEYKVPSKKFKVLGNTDRHSIKKNLIGALLFDSGETAEATRLKRTARRRYTRRKNRICYLQEIFSNEMAKVDDSFFHRLEESFLVEEDKKHERHPIFGNIVDEVAYHEKYPTIYHLRKKLVDSTDKADLRLIYLALAHMIKFRGHFLIEGDLNPDNSDVDKLFIQLVQTYNQLFEENPINASGVDAKAILSARLSKSRRLENLIAQLPGEKKNGLFGNLIALSLGLTPNFKSNFDLAEDAKLQLSKDTYDDDLDNLLAQIGDQYADLFLAAKNLSDAILLSDILRVNTEITKAPLSASMIKRYDEHHQDLTLLKALVRQQLPEKYKEIFFDQSKNGYAGYIDGGASQEEFYKFIKPILEKMDGTEELLVKLNREDLLRKQRTFDNGSIPHQIHLGELHAILRRQEDFYPFLKDNREKIEKILTFRIPYYVGPLARGNSRFAWMTRKSEETITPWNFEEVVDKGASAQSFIERMTNFDKNLPNEKVLPKHSLLYEYFTVYNELTKVKYVTEGMRKPAFLSGEQKKAIVDLLFKTNRKVTVKQLKEDYFKKIECFDSVEISGVEDRFNASLGTYHDLLKIIKDKDFLDNEENEDILEDIVLTLTLFEDREMIEERLKTYAHLFDDKVMKQLKRRRYTGWGRLSRKLINGIRDKQSGKTILDFLKSDGFANRNFMQLIHDDSLTFKEDIQKAQVSGQGDSLHEHIANLAGSPAIKKGILQTVKVVDELVKVMGRHKPENIVIEMARENQTTQKGQKNSRERMKRIEEGIKELGSQILKEHPVENTQLQNEKLYLYYLQNGRDMYVDQELDINRLSDYDVDHIVPQSFLKDDSIDNKVLTRSDKARGKSDNVPSEEVVKKMKNYWRQLLNAKLITQRKFDNLTKAERGGLSELDKAGFIKRQLVETRQITKHVAQILDSRMNTKYDENDKLIREVKVITLKSKLVSDFRKDFQFYKVREINNYHHAHDAYLNAVVGTALIKKYPKLESEFVYGDYKVYDVRKMIAKSEQEIGKATAKYFFYSNIMNFFKTEITLANGEIRKRPLIETNGETGEIVWDKGRDFATVRKVLSMPQVNIVKKTEVQTGGFSKESILPKRNSDKLIARKKDWDPKKYGGFDSPTVAYSVLVVAKVEKGKSKKLKSVKELLGITIMERSSFEKNPIDFLEAKGYKEVKKDLIIKLPKYSLFELENGRKRMLASAGELQKGNELALPSKYVNFLYLASHYEKLKGSPEDNEQKQLFVEQHKHYLDEIIEQISEFSKRVILADANLDKVLSAYNKHRDKPIREQAENIIHLFTLTNLGAPAAFKYFDTTIDRKRYTSTKEVLDATLIHQSITGLYETRIDLSQLGGDGGGSSEAAAKPAPGGMDPLQLLQPLEAEIKGTKLKAHWNSGATITCVPEAFLEDERPIQTMLIKTIHGEKQQDVYYLTFKVQGRKVEAEVLASPYDYILLNPSDVPWLMKKPLQLTVLVPLHEYQERLLQQTALPKEQKELLQKLFLKYDALWQHWENQVGHRRIKPHNIATGTLAPRPQKQYPINPKAKPSIQIVIDDLLKQGVLIQQNSTMNTPVYPVPKPDGKWRMVLDYREVNKTIPLIAAQNQHSAGILSSIYRGKYKTTLDLTNGFWAHPITPESYWLTAFTWQGKQYCWTRLPQGFLNSPALFTADVVDLLKEIPNVQAYVDDIYISHDDPQEHLEQLEKIFSILLNAGYVVSLKKSEIAQREVEFLGFNITKEGRGLTDTFKQKLLNITPPKDLKQLQSILGLLNFARNFIPNYSELVKPLYTIVANANGKFISWTEDNSNQLQHIISVLNQADNLEERNPETRLIIKVNSSPSAGYIRYYNEGSKRPIMYVNYIFSKAEAKFTQTEKLLTTMHKGLIKAMDLAMGQEILVYSPIVSMTKIQRTPLPERKALPVRWITWMTYLEDPRIQFHYDKSLPELQQIPNVTEDVIAKTKHPSEFAMVFYTDGSAIKHPDVNKSHSAGMGIAQVQFIPEYKIVHQWSIPLGDHTAQLAEIAAVEFACKKALKISGPVLIVTDSFYVAESANKELPYWKSNGFLNNKKKPLRHVSKWKSIAECLQLKPDIIIMHEKGHQQPMTTLHTEGNNLADKLATQGSYVVHAGKRTADGSEFEKRTADGSEFESPKKKAKVE

SEQ ID NO: 410 - protein, 2181 aa, synthetic construct
MPAAKRVKLDGGDKKYSIGLDIGTNSVGWAVITDEYKVPSKKFKVLGNTDRHSIKKNLIGALLFDSGETAEATRLKRTARRRYTRRKNRICYLQEIFSNEMAKVDDSFFHRLEESFLVEEDKKHERHPIFGNIVDEVAYHEKYPTIYHLRKKLVDSTDKADLRLIYLALAHMIKFRGHFLIEGDLNPDNSDVDKLFIQLVQTYNQLFEENPINASGVDAKAILSARLSKSRRLENLIAQLPGEKKNGLFGNLIALSLGLTPNFKSNFDLAEDAKLQLSKDTYDDDLDNLLAQIGDQYADLFLAAKNLSDAILLSDILRVNTEITKAPLSASMIKRYDEHHQDLTLLKALVRQQLPEKYKEIFFDQSKNGYAGYIDGGASQEEFYKFIKPILEKMDGTEELLVKLNREDLLRKQRTFDNGSIPHQIHLGELHAILRRQEDFYPFLKDNREKIEKILTFRIPYYVGPLARGNSRFAWMTRKSEETITPWNFEEVVDKGASAQSFIERMTNFDKNLPNEKVLPKHSLLYEYFTVYNELTKVKYVTEGMRKPAFLSGEQKKAIVDLLFKTNRKVTVKQLKEDYFKKIECFDSVEISGVEDRFNASLGTYHDLLKIIKDKDFLDNEENEDILEDIVLTLTLFEDREMIEERLKTYAHLFDDKVMKQLKRRRYTGWGRLSRKLINGIRDKQSGKTILDFLKSDGFANRNFMQLIHDDSLTFKEDIQKAQVSGQGDSLHEHIANLAGSPAIKKGILQTVKVVDELVKVMGRHKPENIVIEMARENQTTQKGQKNSRERMKRIEEGIKELGSQILKEHPVENTQLQNEKLYLYYLQNGRDMYVDQELDINRLSDYDVDHIVPQSFLKDDSIDNKVLTRSDKARGKSDNVPSEEVVKKMKNYWRQLLNAKLITQRKFDNLTKAERGGLSELDKAGFIKRQLVETRQITKHVAQILDSRMNTKYDENDKLIREVKVITLKSKLVSDFRKDFQFYKVREINNYHHAHDAYLNAVVGTALIKKYPKLESEFVYGDYKVYDVRKMIAKSEQEIGKATAKYFFYSNIMNFFKTEITLANGEIRKRPLIETNGETGEIVWDKGRDFATVRKVLSMPQVNIVKKTEVQTGGFSKESILPKRNSDKLIARKKDWDPKKYGGFDSPTVAYSVLVVAKVEKGKSKKLKSVKELLGITIMERSSFEKNPIDFLEAKGYKEVKKDLIIKLPKYSLFELENGRKRMLASAGELQKGNELALPSKYVNFLYLASHYEKLKGSPEDNEQKQLFVEQHKHYLDEIIEQISEFSKRVILADANLDKVLSAYNKHRDKPIREQAENIIHLFTLTNLGAPAAFKYFDTTIDRKRYTSTKEVLDATLIHQSITGLYETRIDLSQLGGDGGSGSETPGTSESATPESGGMDPLQLLQPLEAEIKGTKLKAHWNSGATITCVPEAFLEDERPIQTMLIKTIHGEKQQDVYYLTFKVQGRKVEAEVLASPYDYILLNPSDVPWLMKKPLQLTVLVPLHEYQERLLQQTALPKEQKELLQKLFLKYDALWQHWENQVGHRRIKPHNIATGTLAPRPQKQYPINPKAKPSIQIVIDDLLKQGVLIQQNSTMNTPVYPVPKPDGKWRMVLDYREVNKTIPLIAAQNQHSAGILSSIYRGKYKTTLDLTNGFWAHPITPESYWLTAFTWQGKQYCWTRLPQGFLNSPALFTADVVDLLKEIPNVQAYVDDIYISHDDPQEHLEQLEKIFSILLNAGYVVSLKKSEIAQREVEFLGFNITKEGRGLTDTFKQKLLNITPPKDLKQLQSILGLLNFARNFIPNYSELVKPLYTIVANANGKFISWTEDNSNQLQHIISVLNQADNLEERNPETRLIIKVNSSPSAGYIRYYNEGSKRPIMYVNYIFSKAEAKFTQTEKLLTTMHKGLIKAMDLAMGQEILVYSPIVSMTKIQRTPLPERKALPVRWITWMTYLEDPRIQFHYDKSLPELQQIPNVTEDVIAKTKHPSEFAMVFYTDGSAIKHPDVNKSHSAGMGIAQVQFIPEYKIVHQWSIPLGDHTAQLAEIAAVEFACKKALKISGPVLIVTDSFYVAESANKELPYWKSNGFLNNKKKPLRHVSKWKSIAECLQLKPDIIIMHEKGHQQPMTTLHTEGNNLADKLATQGSYVVHAGKRTADGSEFEKRTADGSEFESPKKKAKVE

SEQ ID NO: 411 - protein, 2178 aa, synthetic construct
MPAAKRVKLDGGDKKYSIGLDIGTNSVGWAVITDEYKVPSKKFKVLGNTDRHSIKKNLIGALLFDSGETAEATRLKRTARRRYTRRKNRICYLQEIFSNEMAKVDDSFFHRLEESFLVEEDKKHERHPIFGNIVDEVAYHEKYPTIYHLRKKLVDSTDKADLRLIYLALAHMIKFRGHFLIEGDLNPDNSDVDKLFIQLVQTYNQLFEENPINASGVDAKAILSARLSKSRRLENLIAQLPGEKKNGLFGNLIALSLGLTPNFKSNFDLAEDAKLQLSKDTYDDDLDNLLAQIGDQYADLFLAAKNLSDAILLSDILRVNTEITKAPLSASMIKRYDEHHQDLTLLKALVRQQLPEKYKEIFFDQSKNGYAGYIDGGASQEEFYKFIKPILEKMDGTEELLVKLNREDLLRKQRTFDNGSIPHQIHLGELHAILRRQEDFYPFLKDNREKIEKILTFRIPYYVGPLARGNSRFAWMTRKSEETITPWNFEEVVDKGASAQSFIERMTNFDKNLPNEKVLPKHSLLYEYFTVYNELTKVKYVTEGMRKPAFLSGEQKKAIVDLLFKTNRKVTVKQLKEDYFKKIECFDSVEISGVEDRFNASLGTYHDLLKIIKDKDFLDNEENEDILEDIVLTLTLFEDREMIEERLKTYAHLFDDKVMKQLKRRRYTGWGRLSRKLINGIRDKQSGKTILDFLKSDGFANRNFMQLIHDDSLTFKEDIQKAQVSGQGDSLHEHIANLAGSPAIKKGILQTVKVVDELVKVMGRHKPENIVIEMARENQTTQKGQKNSRERMKRIEEGIKELGSQILKEHPVENTQLQNEKLYLYYLQNGRDMYVDQELDINRLSDYDVDHIVPQSFLKDDSIDNKVLTRSDKARGKSDNVPSEEVVKKMKNYWRQLLNAKLITQRKFDNLTKAERGGLSELDKAGFIKRQLVETRQITKHVAQILDSRMNTKYDENDKLIREVKVITLKSKLVSDFRKDFQFYKVREINNYHHAHDAYLNAVVGTALIKKYPKLESEFVYGDYKVYDVRKMIAKSEQEIGKATAKYFFYSNIMNFFKTEITLANGEIRKRPLIETNGETGEIVWDKGRDFATVRKVLSMPQVNIVKKTEVQTGGFSKESILPKRNSDKLIARKKDWDPKKYGGFDSPTVAYSVLVVAKVEKGKSKKLKSVKELLGITIMERSSFEKNPIDFLEAKGYKEVKKDLIIKLPKYSLFELENGRKRMLASAGELQKGNELALPSKYVNFLYLASHYEKLKGSPEDNEQKQLFVEQHKHYLDEIIEQISEFSKRVILADANLDKVLSAYNKHRDKPIREQAENIIHLFTLTNLGAPAAFKYFDTTIDRKRYTSTKEVLDATLIHQSITGLYETRIDLSQLGGDGGPAPAPAPAPAPAPGGMDPLQLLQPLEAEIKGTKLKAHWNSGATITCVPEAFLEDERPIQTMLIKTIHGEKQQDVYYLTFKVQGRKVEAEVLASPYDYILLNPSDVPWLMKKPLQLTVLVPLHEYQERLLQQTALPKEQKELLQKLFLKYDALWQHWENQVGHRRIKPHNIATGTLAPRPQKQYPINPKAKPSIQIVIDDLLKQGVLIQQNSTMNTPVYPVPKPDGKWRMVLDYREVNKTIPLIAAQNQHSAGILSSIYRGKYKTTLDLTNGFWAHPITPESYWLTAFTWQGKQYCWTRLPQGFLNSPALFTADVVDLLKEIPNVQAYVDDIYISHDDPQEHLEQLEKIFSILLNAGYVVSLKKSEIAQREVEFLGFNITKEGRGLTDTFKQKLLNITPPKDLKQLQSILGLLNFARNFIPNYSELVKPLYTIVANANGKFISWTEDNSNQLQHIISVLNQADNLEERNPETRLIIKVNSSPSAGYIRYYNEGSKRPIMYVNYIFSKAEAKFTQTEKLLTTMHKGLIKAMDLAMGQEILVYSPIVSMTKIQRTPLPERKALPVRWITWMTYLEDPRIQFHYDKSLPELQQIPNVTEDVIAKTKHPSEFAMVFYTDGSAIKHPDVNKSHSAGMGIAQVQFIPEYKIVHQWSIPLGDHTAQLAEIAAVEFACKKALKISGPVLIVTDSFYVAESANKELPYWKSNGFLNNKKKPLRHVSKWKSIAECLQLKPDIIIMHEKGHQQPMTTLHTEGNNLADKLATQGSYVVHAGKRTADGSEFEKRTADGSEFESPKKKAKVE

SEQ ID NO: 412 - protein, 2176 aa, synthetic construct
MPAAKRVKLDGGDKKYSIGLDIGTNSVGWAVITDEYKVPSKKFKVLGNTDRHSIKKNLIGALLFDSGETAEATRLKRTARRRYTRRKNRICYLQEIFSNEMAKVDDSFFHRLEESFLVEEDKKHERHPIFGNIVDEVAYHEKYPTIYHLRKKLVDSTDKADLRLIYLALAHMIKFRGHFLIEGDLNPDNSDVDKLFIQLVQTYNQLFEENPINASGVDAKAILSARLSKSRRLENLIAQLPGEKKNGLFGNLIALSLGLTPNFKSNFDLAEDAKLQLSKDTYDDDLDNLLAQIGDQYADLFLAAKNLSDAILLSDILRVNTEITKAPLSASMIKRYDEHHQDLTLLKALVRQQLPEKYKEIFFDQSKNGYAGYIDGGASQEEFYKFIKPILEKMDGTEELLVKLNREDLLRKQRTFDNGSIPHQIHLGELHAILRRQEDFYPFLKDNREKIEKILTFRIPYYVGPLARGNSRFAWMTRKSEETITPWNFEEVVDKGASAQSFIERMTNFDKNLPNEKVLPKHSLLYEYFTVYNELTKVKYVTEGMRKPAFLSGEQKKAIVDLLFKTNRKVTVKQLKEDYFKKIECFDSVEISGVEDRFNASLGTYHDLLKIIKDKDFLDNEENEDILEDIVLTLTLFEDREMIEERLKTYAHLFDDKVMKQLKRRRYTGWGRLSRKLINGIRDKQSGKTILDFLKSDGFANRNFMQLIHDDSLTFKEDIQKAQVSGQGDSLHEHIANLAGSPAIKKGILQTVKVVDELVKVMGRHKPENIVIEMARENQTTQKGQKNSRERMKRIEEGIKELGSQILKEHPVENTQLQNEKLYLYYLQNGRDMYVDQELDINRLSDYDVDHIVPQSFLKDDSIDNKVLTRSDKARGKSDNVPSEEVVKKMKNYWRQLLNAKLITQRKFDNLTKAERGGLSELDKAGFIKRQLVETRQITKHVAQILDSRMNTKYDENDKLIREVKVITLKSKLVSDFRKDFQFYKVREINNYHHAHDAYLNAVVGTALIKKYPKLESEFVYGDYKVYDVRKMIAKSEQEIGKATAKYFFYSNIMNFFKTEITLANGEIRKRPLIETNGETGEIVWDKGRDFATVRKVLSMPQVNIVKKTEVQTGGFSKESILPKRNSDKLIARKKDWDPKKYGGFDSPTVAYSVLVVAKVEKGKSKKLKSVKELLGITIMERSSFEKNPIDFLEAKGYKEVKKDLIIKLPKYSLFELENGRKRMLASAGELQKGNELALPSKYVNFLYLASHYEKLKGSPEDNEQKQLFVEQHKHYLDEIIEQISEFSKRVILADANLDKVLSAYNKHRDKPIREQAENIIHLFTLTNLGAPAAFKYFDTTIDRKRYTSTKEVLDATLIHQSITGLYETRIDLSQLGGDGGPAPEAAAKGSSGGMDPLQLLQPLEAEIKGTKLKAHWNSGATITCVPEAFLEDERPIQTMLIKTIHGEKQQDVYYLTFKVQGRKVEAEVLASPYDYILLNPSDVPWLMKKPLQLTVLVPLHEYQERLLQQTALPKEQKELLQKLFLKYDALWQHWENQVGHRRIKPHNIATGTLAPRPQKQYPINPKAKPSIQIVIDDLLKQGVLIQQNSTMNTPVYPVPKPDGKWRMVLDYREVNKTIPLIAAQNQHSAGILSSIYRGKYKTTLDLTNGFWAHPITPESYWLTAFTWQGKQYCWTRLPQGFLNSPALFTADVVDLLKEIPNVQAYVDDIYISHDDPQEHLEQLEKIFSILLNAGYVVSLKKSEIAQREVEFLGFNITKEGRGLTDTFKQKLLNITPPKDLKQLQSILGLLNFARNFIPNYSELVKPLYTIVANANGKFISWTEDNSNQLQHIISVLNQADNLEERNPETRLIIKVNSSPSAGYIRYYNEGSKRPIMYVNYIFSKAEAKFTQTEKLLTTMHKGLIKAMDLAMGQEILVYSPIVSMTKIQRTPLPERKALPVRWITWMTYLEDPRIQFHYDKSLPELQQIPNVTEDVIAKTKHPSEFAMVFYTDGSAIKHPDVNKSHSAGMGIAQVQFIPEYKIVHQWSIPLGDHTAQLAEIAAVEFACKKALKISGPVLIVTDSFYVAESANKELPYWKSNGFLNNKKKPLRHVSKWKSIAECLQLKPDIIIMHEKGHQQPMTTLHTEGNNLADKLATQGSYVVHAGKRTADGSEFEKRTADGSEFESPKKKAKVE

SEQ ID NO: 413 - protein, 2180 aa, synthetic construct
MPAAKRVKLDGGDKKYSIGLDIGTNSVGWAVITDEYKVPSKKFKVLGNTDRHSIKKNLIGALLFDSGETAEATRLKRTARRRYTRRKNRICYLQEIFSNEMAKVDDSFFHRLEESFLVEEDKKHERHPIFGNIVDEVAYHEKYPTIYHLRKKLVDSTDKADLRLIYLALAHMIKFRGHFLIEGDLNPDNSDVDKLFIQLVQTYNQLFEENPINASGVDAKAILSARLSKSRRLENLIAQLPGEKKNGLFGNLIALSLGLTPNFKSNFDLAEDAKLQLSKDTYDDDLDNLLAQIGDQYADLFLAAKNLSDAILLSDILRVNTEITKAPLSASMIKRYDEHHQDLTLLKALVRQQLPEKYKEIFFDQSKNGYAGYIDGGASQEEFYKFIKPILEKMDGTEELLVKLNREDLLRKQRTFDNGSIPHQIHLGELHAILRRQEDFYPFLKDNREKIEKILTFRIPYYVGPLARGNSRFAWMTRKSEETITPWNFEEVVDKGASAQSFIERMTNFDKNLPNEKVLPKHSLLYEYFTVYNELTKVKYVTEGMRKPAFLSGEQKKAIVDLLFKTNRKVTVKQLKEDYFKKIECFDSVEISGVEDRFNASLGTYHDLLKIIKDKDFLDNEENEDILEDIVLTLTLFEDREMIEERLKTYAHLFDDKVMKQLKRRRYTGWGRLSRKLINGIRDKQSGKTILDFLKSDGFANRNFMQLIHDDSLTFKEDIQKAQVSGQGDSLHEHIANLAGSPAIKKGILQTVKVVDELVKVMGRHKPENIVIEMARENQTTQKGQKNSRERMKRIEEGIKELGSQILKEHPVENTQLQNEKLYLYYLQNGRDMYVDQELDINRLSDYDVDHIVPQSFLKDDSIDNKVLTRSDKARGKSDNVPSEEVVKKMKNYWRQLLNAKLITQRKFDNLTKAERGGLSELDKAGFIKRQLVETRQITKHVAQILDSRMNTKYDENDKLIREVKVITLKSKLVSDFRKDFQFYKVREINNYHHAHDAYLNAVVGTALIKKYPKLESEFVYGDYKVYDVRKMIAKSEQEIGKATAKYFFYSNIMNFFKTEITLANGEIRKRPLIETNGETGEIVWDKGRDFATVRKVLSMPQVNIVKKTEVQTGGFSKESILPKRNSDKLIARKKDWDPKKYGGFDSPTVAYSVLVVAKVEKGKSKKLKSVKELLGITIMERSSFEKNPIDFLEAKGYKEVKKDLIIKLPKYSLFELENGRKRMLASAGELQKGNELALPSKYVNFLYLASHYEKLKGSPEDNEQKQLFVEQHKHYLDEIIEQISEFSKRVILADANLDKVLSAYNKHRDKPIREQAENIIHLFTLTNLGAPAAFKYFDTTIDRKRYTSTKEVLDATLIHQSITGLYETRIDLSQLGGDGGEAAAKEAAAKEAAAKGGMDPLQLLQPLEAEIKGTKLKAHWNSGATITCVPEAFLEDERPIQTMLIKTIHGEKQQDVYYLTFKVQGRKVEAEVLASPYDYILLNPSDVPWLMKKPLQLTVLVPLHEYQERLLQQTALPKEQKELLQKLFLKYDALWQHWENQVGHRRIKPHNIATGTLAPRPQKQYPINPKAKPSIQIVIDDLLKQGVLIQQNSTMNTPVYPVPKPDGKWRMVLDYREVNKTIPLIAAQNQHSAGILSSIYRGKYKTTLDLTNGFWAHPITPESYWLTAFTWQGKQYCWTRLPQGFLNSPALFTADVVDLLKEIPNVQAYVDDIYISHDDPQEHLEQLEKIFSILLNAGYVVSLKKSEIAQREVEFLGFNITKEGRGLTDTFKQKLLNITPPKDLKQLQSILGLLNFARNFIPNYSELVKPLYTIVANANGKFISWTEDNSNQLQHIISVLNQADNLEERNPETRLIIKVNSSPSAGYIRYYNEGSKRPIMYVNYIFSKAEAKFTQTEKLLTTMHKGLIKAMDLAMGQEILVYSPIVSMTKIQRTPLPERKALPVRWITWMTYLEDPRIQFHYDKSLPELQQIPNVTEDVIAKTKHPSEFAMVFYTDGSAIKHPDVNKSHSAGMGIAQVQFIPEYKIVHQWSIPLGDHTAQLAEIAAVEFACKKALKISGPVLIVTDSFYVAESANKELPYWKSNGFLNNKKKPLRHVSKWKSIAECLQLKPDIIIMHEKGHQQPMTTLHTEGNNLADKLATQGSYVVHAGKRTADGSEFEKRTADGSEFESPKKKAKVE

SEQ ID NO: 414 - protein, 2176 aa, synthetic construct
MPAAKRVKLDGGDKKYSIGLDIGTNSVGWAVITDEYKVPSKKFKVLGNTDRHSIKKNLIGALLFDSGETAEATRLKRTARRRYTRRKNRICYLQEIFSNEMAKVDDSFFHRLEESFLVEEDKKHERHPIFGNIVDEVAYHEKYPTIYHLRKKLVDSTDKADLRLIYLALAHMIKFRGHFLIEGDLNPDNSDVDKLFIQLVQTYNQLFEENPINASGVDAKAILSARLSKSRRLENLIAQLPGEKKNGLFGNLIALSLGLTPNFKSNFDLAEDAKLQLSKDTYDDDLDNLLAQIGDQYADLFLAAKNLSDAILLSDILRVNTEITKAPLSASMIKRYDEHHQDLTLLKALVRQQLPEKYKEIFFDQSKNGYAGYIDGGASQEEFYKFIKPILEKMDGTEELLVKLNREDLLRKQRTFDNGSIPHQIHLGELHAILRRQEDFYPFLKDNREKIEKILTFRIPYYVGPLARGNSRFAWMTRKSEETITPWNFEEVVDKGASAQSFIERMTNFDKNLPNEKVLPKHSLLYEYFTVYNELTKVKYVTEGMRKPAFLSGEQKKAIVDLLFKTNRKVTVKQLKEDYFKKIECFDSVEISGVEDRFNASLGTYHDLLKIIKDKDFLDNEENEDILEDIVLTLTLFEDREMIEERLKTYAHLFDDKVMKQLKRRRYTGWGRLSRKLINGIRDKQSGKTILDFLKSDGFANRNFMQLIHDDSLTFKEDIQKAQVSGQGDSLHEHIANLAGSPAIKKGILQTVKVVDELVKVMGRHKPENIVIEMARENQTTQKGQKNSRERMKRIEEGIKELGSQILKEHPVENTQLQNEKLYLYYLQNGRDMYVDQELDINRLSDYDVDHIVPQSFLKDDSIDNKVLTRSDKARGKSDNVPSEEVVKKMKNYWRQLLNAKLITQRKFDNLTKAERGGLSELDKAGFIKRQLVETRQITKHVAQILDSRMNTKYDENDKLIREVKVITLKSKLVSDFRKDFQFYKVREINNYHHAHDAYLNAVVGTALIKKYPKLESEFVYGDYKVYDVRKMIAKSEQEIGKATAKYFFYSNIMNFFKTEITLANGEIRKRPLIETNGETGEIVWDKGRDFATVRKVLSMPQVNIVKKTEVQTGGFSKESILPKRNSDKLIARKKDWDPKKYGGFDSPTVAYSVLVVAKVEKGKSKKLKSVKELLGITIMERSSFEKNPIDFLEAKGYKEVKKDLIIKLPKYSLFELENGRKRMLASAGELQKGNELALPSKYVNFLYLASHYEKLKGSPEDNEQKQLFVEQHKHYLDEIIEQISEFSKRVILADANLDKVLSAYNKHRDKPIREQAENIIHLFTLTNLGAPAAFKYFDTTIDRKRYTSTKEVLDATLIHQSITGLYETRIDLSQLGGDGGEAAAKGSSPAPGGMDPLQLLQPLEAEIKGTKLKAHWNSGATITCVPEAFLEDERPIQTMLIKTIHGEKQQDVYYLTFKVQGRKVEAEVLASPYDYILLNPSDVPWLMKKPLQLTVLVPLHEYQERLLQQTALPKEQKELLQKLFLKYDALWQHWENQVGHRRIKPHNIATGTLAPRPQKQYPINPKAKPSIQIVIDDLLKQGVLIQQNSTMNTPVYPVPKPDGKWRMVLDYREVNKTIPLIAAQNQHSAGILSSIYRGKYKTTLDLTNGFWAHPITPESYWLTAFTWQGKQYCWTRLPQGFLNSPALFTADVVDLLKEIPNVQAYVDDIYISHDDPQEHLEQLEKIFSILLNAGYVVSLKKSEIAQREVEFLGFNITKEGRGLTDTFKQKLLNITPPKDLKQLQSILGLLNFARNFIPNYSELVKPLYTIVANANGKFISWTEDNSNQLQHIISVLNQADNLEERNPETRLIIKVNSSPSAGYIRYYNEGSKRPIMYVNYIFSKAEAKFTQTEKLLTTMHKGLIKAMDLAMGQEILVYSPIVSMTKIQRTPLPERKALPVRWITWMTYLEDPRIQFHYDKSLPELQQIPNVTEDVIAKTKHPSEFAMVFYTDGSAIKHPDVNKSHSAGMGIAQVQFIPEYKIVHQWSIPLGDHTAQLAEIAAVEFACKKALKISGPVLIVTDSFYVAESANKELPYWKSNGFLNNKKKPLRHVSKWKSIAECLQLKPDIIIMHEKGHQQPMTTLHTEGNNLADKLATQGSYVVHAGKRTADGSEFEKRTADGSEFESPKKKAKVE

SEQ ID NO: 415 - protein, 2174 aa, synthetic construct
MPAAKRVKLDGGDKKYSIGLDIGTNSVGWAVITDEYKVPSKKFKVLGNTDRHSIKKNLIGALLFDSGETAEATRLKRTARRRYTRRKNRICYLQEIFSNEMAKVDDSFFHRLEESFLVEEDKKHERHPIFGNIVDEVAYHEKYPTIYHLRKKLVDSTDKADLRLIYLALAHMIKFRGHFLIEGDLNPDNSDVDKLFIQLVQTYNQLFEENPINASGVDAKAILSARLSKSRRLENLIAQLPGEKKNGLFGNLIALSLGLTPNFKSNFDLAEDAKLQLSKDTYDDDLDNLLAQIGDQYADLFLAAKNLSDAILLSDILRVNTEITKAPLSASMIKRYDEHHQDLTLLKALVRQQLPEKYKEIFFDQSKNGYAGYIDGGASQEEFYKFIKPILEKMDGTEELLVKLNREDLLRKQRTFDNGSIPHQIHLGELHAILRRQEDFYPFLKDNREKIEKILTFRIPYYVGPLARGNSRFAWMTRKSEETITPWNFEEVVDKGASAQSFIERMTNFDKNLPNEKVLPKHSLLYEYFTVYNELTKVKYVTEGMRKPAFLSGEQKKAIVDLLFKTNRKVTVKQLKEDYFKKIECFDSVEISGVEDRFNASLGTYHDLLKIIKDKDFLDNEENEDILEDIVLTLTLFEDREMIEERLKTYAHLFDDKVMKQLKRRRYTGWGRLSRKLINGIRDKQSGKTILDFLKSDGFANRNFMQLIHDDSLTFKEDIQKAQVSGQGDSLHEHIANLAGSPAIKKGILQTVKVVDELVKVMGRHKPENIVIEMARENQTTQKGQKNSRERMKRIEEGIKELGSQILKEHPVENTQLQNEKLYLYYLQNGRDMYVDQELDINRLSDYDVDHIVPQSFLKDDSIDNKVLTRSDKARGKSDNVPSEEVVKKMKNYWRQLLNAKLITQRKFDNLTKAERGGLSELDKAGFIKRQLVETRQITKHVAQILDSRMNTKYDENDKLIREVKVITLKSKLVSDFRKDFQFYKVREINNYHHAHDAYLNAVVGTALIKKYPKLESEFVYGDYKVYDVRKMIAKSEQEIGKATAKYFFYSNIMNFFKTEITLANGEIRKRPLIETNGETGEIVWDKGRDFATVRKVLSMPQVNIVKKTEVQTGGFSKESILPKRNSDKLIARKKDWDPKKYGGFDSPTVAYSVLVVAKVEKGKSKKLKSVKELLGITIMERSSFEKNPIDFLEAKGYKEVKKDLIIKLPKYSLFELENGRKRMLASAGELQKGNELALPSKYVNFLYLASHYEKLKGSPEDNEQKQLFVEQHKHYLDEIIEQISEFSKRVILADANLDKVLSAYNKHRDKPIREQAENIIHLFTLTNLGAPAAFKYFDTTIDRKRYTSTKEVLDATLIHQSITGLYETRIDLSQLGGDGGGGGPAPGSSGGMDPLQLLQPLEAEIKGTKLKAHWNSGATITCVPEAFLEDERPIQTMLIKTIHGEKQQDVYYLTFKVQGRKVEAEVLASPYDYILLNPSDVPWLMKKPLQLTVLVPLHEYQERLLQQTALPKEQKELLQKLFLKYDALWQHWENQVGHRRIKPHNIATGTLAPRPQKQYPINPKAKPSIQIVIDDLLKQGVLIQQNSTMNTPVYPVPKPDGKWRMVLDYREVNKTIPLIAAQNQHSAGILSSIYRGKYKTTLDLTNGFWAHPITPESYWLTAFTWQGKQYCWTRLPQGFLNSPALFTADVVDLLKEIPNVQAYVDDIYISHDDPQEHLEQLEKIFSILLNAGYVVSLKKSEIAQREVEFLGFNITKEGRGLTDTFKQKLLNITPPKDLKQLQSILGLLNFARNFIPNYSELVKPLYTIVANANGKFISWTEDNSNQLQHIISVLNQADNLEERNPETRLIIKVNSSPSAGYIRYYNEGSKRPIMYVNYIFSKAEAKFTQTEKLLTTMHKGLIKAMDLAMGQEILVYSPIVSMTKIQRTPLPERKALPVRWITWMTYLEDPRIQFHYDKSLPELQQIPNVTEDVIAKTKHPSEFAMVFYTDGSAIKHPDVNKSHSAGMGIAQVQFIPEYKIVHQWSIPLGDHTAQLAEIAAVEFACKKALKISGPVLIVTDSFYVAESANKELPYWKSNGFLNNKKKPLRHVSKWKSIAECLQLKPDIIIMHEKGHQQPMTTLHTEGNNLADKLATQGSYVVHAGKRTADGSEFEKRTADGSEFESPKKKAKVE

SEQ ID NO: 416 - protein, 2173 aa, synthetic construct
MPAAKRVKLDGGDKKYSIGLDIGTNSVGWAVITDEYKVPSKKFKVLGNTDRHSIKKNLIGALLFDSGETAEATRLKRTARRRYTRRKNRICYLQEIFSNEMAKVDDSFFHRLEESFLVEEDKKHERHPIFGNIVDEVAYHEKYPTIYHLRKKLVDSTDKADLRLIYLALAHMIKFRGHFLIEGDLNPDNSDVDKLFIQLVQTYNQLFEENPINASGVDAKAILSARLSKSRRLENLIAQLPGEKKNGLFGNLIALSLGLTPNFKSNFDLAEDAKLQLSKDTYDDDLDNLLAQIGDQYADLFLAAKNLSDAILLSDILRVNTEITKAPLSASMIKRYDEHHQDLTLLKALVRQQLPEKYKEIFFDQSKNGYAGYIDGGASQEEFYKFIKPILEKMDGTEELLVKLNREDLLRKQRTFDNGSIPHQIHLGELHAILRRQEDFYPFLKDNREKIEKILTFRIPYYVGPLARGNSRFAWMTRKSEETITPWNFEEVVDKGASAQSFIERMTNFDKNLPNEKVLPKHSLLYEYFTVYNELTKVKYVTEGMRKPAFLSGEQKKAIVDLLFKTNRKVTVKQLKEDYFKKIECFDSVEISGVEDRFNASLGTYHDLLKIIKDKDFLDNEENEDILEDIVLTLTLFEDREMIEERLKTYAHLFDDKVMKQLKRRRYTGWGRLSRKLINGIRDKQSGKTILDFLKSDGFANRNFMQLIHDDSLTFKEDIQKAQVSGQGDSLHEHIANLAGSPAIKKGILQTVKVVDELVKVMGRHKPENIVIEMARENQTTQKGQKNSRERMKRIEEGIKELGSQILKEHPVENTQLQNEKLYLYYLQNGRDMYVDQELDINRLSDYDVDHIVPQSFLKDDSIDNKVLTRSDKARGKSDNVPSEEVVKKMKNYWRQLLNAKLITQRKFDNLTKAERGGLSELDKAGFIKRQLVETRQITKHVAQILDSRMNTKYDENDKLIREVKVITLKSKLVSDFRKDFQFYKVREINNYHHAHDAYLNAVVGTALIKKYPKLESEFVYGDYKVYDVRKMIAKSEQEIGKATAKYFFYSNIMNFFKTEITLANGEIRKRPLIETNGETGEIVWDKGRDFATVRKVLSMPQVNIVKKTEVQTGGFSKESILPKRNSDKLIARKKDWDPKKYGGFDSPTVAYSVLVVAKVEKGKSKKLKSVKELLGITIMERSSFEKNPIDFLEAKGYKEVKKDLIIKLPKYSLFELENGRKRMLASAGELQKGNELALPSKYVNFLYLASHYEKLKGSPEDNEQKQLFVEQHKHYLDEIIEQISEFSKRVILADANLDKVLSAYNKHRDKPIREQAENIIHLFTLTNLGAPAAFKYFDTTIDRKRYTSTKEVLDATLIHQSITGLYETRIDLSQLGGDGGGGGEAAAKGGMDPLQLLQPLEAEIKGTKLKAHWNSGATITCVPEAFLEDERPIQTMLIKTIHGEKQQDVYYLTFKVQGRKVEAEVLASPYDYILLNPSDVPWLMKKPLQLTVLVPLHEYQERLLQQTALPKEQKELLQKLFLKYDALWQHWENQVGHRRIKPHNIATGTLAPRPQKQYPINPKAKPSIQIVIDDLLKQGVLIQQNSTMNTPVYPVPKPDGKWRMVLDYREVNKTIPLIAAQNQHSAGILSSIYRGKYKTTLDLTNGFWAHPITPESYWLTAFTWQGKQYCWTRLPQGFLNSPALFTADVVDLLKEIPNVQAYVDDIYISHDDPQEHLEQLEKIFSILLNAGYVVSLKKSEIAQREVEFLGFNITKEGRGLTDTFKQKLLNITPPKDLKQLQSILGLLNFARNFIPNYSELVKPLYTIVANANGKFISWTEDNSNQLQHIISVLNQADNLEERNPETRLIIKVNSSPSAGYIRYYNEGSKRPIMYVNYIFSKAEAKFTQTEKLLTTMHKGLIKAMDLAMGQEILVYSPIVSMTKIQRTPLPERKALPVRWITWMTYLEDPRIQFHYDKSLPELQQIPNVTEDVIAKTKHPSEFAMVFYTDGSAIKHPDVNKSHSAGMGIAQVQFIPEYKIVHQWSIPLGDHTAQLAEIAAVEFACKKALKISGPVLIVTDSFYVAESANKELPYWKSNGFLNNKKKPLRHVSKWKSIAECLQLKPDIIIMHEKGHQQPMTTLHTEGNNLADKLATQGSYVVHAGKRTADGSEFEKRTADGSEFESPKKKAKVE

SEQ ID NO: 417 - protein, 2176 aa, synthetic construct
MPAAKRVKLDGGDKKYSIGLDIGTNSVGWAVITDEYKVPSKKFKVLGNTDRHSIKKNLIGALLFDSGETAEATRLKRTARRRYTRRKNRICYLQEIFSNEMAKVDDSFFHRLEESFLVEEDKKHERHPIFGNIVDEVAYHEKYPTIYHLRKKLVDSTDKADLRLIYLALAHMIKFRGHFLIEGDLNPDNSDVDKLFIQLVQTYNQLFEENPINASGVDAKAILSARLSKSRRLENLIAQLPGEKKNGLFGNLIALSLGLTPNFKSNFDLAEDAKLQLSKDTYDDDLDNLLAQIGDQYADLFLAAKNLSDAILLSDILRVNTEITKAPLSASMIKRYDEHHQDLTLLKALVRQQLPEKYKEIFFDQSKNGYAGYIDGGASQEEFYKFIKPILEKMDGTEELLVKLNREDLLRKQRTFDNGSIPHQIHLGELHAILRRQEDFYPFLKDNREKIEKILTFRIPYYVGPLARGNSRFAWMTRKSEETITPWNFEEVVDKGASAQSFIERMTNFDKNLPNEKVLPKHSLLYEYFTVYNELTKVKYVTEGMRKPAFLSGEQKKAIVDLLFKTNRKVTVKQLKEDYFKKIECFDSVEISGVEDRFNASLGTYHDLLKIIKDKDFLDNEENEDILEDIVLTLTLFEDREMIEERLKTYAHLFDDKVMKQLKRRRYTGWGRLSRKLINGIRDKQSGKTILDFLKSDGFANRNFMQLIHDDSLTFKEDIQKAQVSGQGDSLHEHIANLAGSPAIKKGILQTVKVVDELVKVMGRHKPENIVIEMARENQTTQKGQKNSRERMKRIEEGIKELGSQILKEHPVENTQLQNEKLYLYYLQNGRDMYVDQELDINRLSDYDVDHIVPQSFLKDDSIDNKVLTRSDKARGKSDNVPSEEVVKKMKNYWRQLLNAKLITQRKFDNLTKAERGGLSELDKAGFIKRQLVETRQITKHVAQILDSRMNTKYDENDKLIREVKVITLKSKLVSDFRKDFQFYKVREINNYHHAHDAYLNAVVGTALIKKYPKLESEFVYGDYKVYDVRKMIAKSEQEIGKATAKYFFYSNIMNFFKTEITLANGEIRKRPLIETNGETGEIVWDKGRDFATVRKVLSMPQVNIVKKTEVQTGGFSKESILPKRNSDKLIARKKDWDPKKYGGFDSPTVAYSVLVVAKVEKGKSKKLKSVKELLGITIMERSSFEKNPIDFLEAKGYKEVKKDLIIKLPKYSLFELENGRKRMLASAGELQKGNELALPSKYVNFLYLASHYEKLKGSPEDNEQKQLFVEQHKHYLDEIIEQISEFSKRVILADANLDKVLSAYNKHRDKPIREQAENIIHLFTLTNLGAPAAFKYFDTTIDRKRYTSTKEVLDATLIHQSITGLYETRIDLSQLGGDGGGGSEAAAKPAPGGMDPLQLLQPLEAEIKGTKLKAHWNSGATITCVPEAFLEDERPIQTMLIKTIHGEKQQDVYYLTFKVQGRKVEAEVLASPYDYILLNPSDVPWLMKKPLQLTVLVPLHEYQERLLQQTALPKEQKELLQKLFLKYDALWQHWENQVGHRRIKPHNIATGTLAPRPQKQYPINPKAKPSIQIVIDDLLKQGVLIQQNSTMNTPVYPVPKPDGKWRMVLDYREVNKTIPLIAAQNQHSAGILSSIYRGKYKTTLDLTNGFWAHPITPESYWLTAFTWQGKQYCWTRLPQGFLNSPALFTADVVDLLKEIPNVQAYVDDIYISHDDPQEHLEQLEKIFSILLNAGYVVSLKKSEIAQREVEFLGFNITKEGRGLTDTFKQKLLNITPPKDLKQLQSILGLLNFARNFIPNYSELVKPLYTIVANANGKFISWTEDNSNQLQHIISVLNQADNLEERNPETRLIIKVNSSPSAGYIRYYNEGSKRPIMYVNYIFSKAEAKFTQTEKLLTTMHKGLIKAMDLAMGQEILVYSPIVSMTKIQRTPLPERKALPVRWITWMTYLEDPRIQFHYDKSLPELQQIPNVTEDVIAKTKHPSEFAMVFYTDGSAIKHPDVNKSHSAGMGIAQVQFIPEYKIVHQWSIPLGDHTAQLAEIAAVEFACKKALKISGPVLIVTDSFYVAESANKELPYWKSNGFLNNKKKPLRHVSKWKSIAECLQLKPDIIIMHEKGHQQPMTTLHTEGNNLADKLATQGSYVVHAGKRTADGSEFEKRTADGSEFESPKKKAKVE

SEQ ID NO: 418 - protein, 2177 aa, synthetic construct
MPAAKRVKLDGGDKKYSIGLDIGTNSVGWAVITDEYKVPSKKFKVLGNTDRHSIKKNLIGALLFDSGETAEATRLKRTARRRYTRRKNRICYLQEIFSNEMAKVDDSFFHRLEESFLVEEDKKHERHPIFGNIVDEVAYHEKYPTIYHLRKKLVDSTDKADLRLIYLALAHMIKFRGHFLIEGDLNPDNSDVDKLFIQLVQTYNQLFEENPINASGVDAKAILSARLSKSRRLENLIAQLPGEKKNGLFGNLIALSLGLTPNFKSNFDLAEDAKLQLSKDTYDDDLDNLLAQIGDQYADLFLAAKNLSDAILLSDILRVNTEITKAPLSASMIKRYDEHHQDLTLLKALVRQQLPEKYKEIFFDQSKNGYAGYIDGGASQEEFYKFIKPILEKMDGTEELLVKLNREDLLRKQRTFDNGSIPHQIHLGELHAILRRQEDFYPFLKDNREKIEKILTFRIPYYVGPLARGNSRFAWMTRKSEETITPWNFEEVVDKGASAQSFIERMTNFDKNLPNEKVLPKHSLLYEYFTVYNELTKVKYVTEGMRKPAFLSGEQKKAIVDLLFKTNRKVTVKQLKEDYFKKIECFDSVEISGVEDRFNASLGTYHDLLKIIKDKDFLDNEENEDILEDIVLTLTLFEDREMIEERLKTYAHLFDDKVMKQLKRRRYTGWGRLSRKLINGIRDKQSGKTILDFLKSDGFANRNFMQLIHDDSLTFKEDIQKAQVSGQGDSLHEHIANLAGSPAIKKGILQTVKVVDELVKVMGRHKPENIVIEMARENQTTQKGQKNSRERMKRIEEGIKELGSQILKEHPVENTQLQNEKLYLYYLQNGRDMYVDQELDINRLSDYDVDHIVPQSFLKDDSIDNKVLTRSDKARGKSDNVPSEEVVKKMKNYWRQLLNAKLITQRKFDNLTKAERGGLSELDKAGFIKRQLVETRQITKHVAQILDSRMNTKYDENDKLIREVKVITLKSKLVSDFRKDFQFYKVREINNYHHAHDAYLNAVVGTALIKKYPKLESEFVYGDYKVYDVRKMIAKSEQEIGKATAKYFFYSNIMNFFKTEITLANGEIRKRPLIETNGETGEIVWDKGRDFATVRKVLSMPQVNIVKKTEVQTGGFSKESILPKRNSDKLIARKKDWDPKKYGGFDSPTVAYSVLVVAKVEKGKSKKLKSVKELLGITIMERSSFEKNPIDFLEAKGYKEVKKDLIIKLPKYSLFELENGRKRMLASAGELQKGNELALPSKYVNFLYLASHYEKLKGSPEDNEQKQLFVEQHKHYLDEIIEQISEFSKRVILADANLDKVLSAYNKHRDKPIREQAENIIHLFTLTNLGAPAAFKYFDTTIDRKRYTSTKEVLDATLIHQSITGLYETRIDLSQLGGDGGGSSGSSGSSGSSGGMDPLQLLQPLEAEIKGTKLKAHWNSGATITCVPEAFLEDERPIQTMLIKTIHGEKQQDVYYLTFKVQGRKVEAEVLASPYDYILLNPSDVPWLMKKPLQLTVLVPLHEYQERLLQQTALPKEQKELLQKLFLKYDALWQHWENQVGHRRIKPHNIATGTLAPRPQKQYPINPKAKPSIQIVIDDLLKQGVLIQQNSTMNTPVYPVPKPDGKWRMVLDYREVNKTIPLIAAQNQHSAGILSSIYRGKYKTTLDLTNGFWAHPITPESYWLTAFTWQGKQYCWTRLPQGFLNSPALFTADVVDLLKEIPNVQAYVDDIYISHDDPQEHLEQLEKIFSILLNAGYVVSLKKSEIAQREVEFLGFNITKEGRGLTDTFKQKLLNITPPKDLKQLQSILGLLNFARNFIPNYSELVKPLYTIVANANGKFISWTEDNSNQLQHIISVLNQADNLEERNPETRLIIKVNSSPSAGYIRYYNEGSKRPIMYVNYIFSKAEAKFTQTEKLLTTMHKGLIKAMDLAMGQEILVYSPIVSMTKIQRTPLPERKALPVRWITWMTYLEDPRIQFHYDKSLPELQQIPNVTEDVIAKTKHPSEFAMVFYTDGSAIKHPDVNKSHSAGMGIAQVQFIPEYKIVHQWSIPLGDHTAQLAEIAAVEFACKKALKISGPVLIVTDSFYVAESANKELPYWKSNGFLNNKKKPLRHVSKWKSIAECLQLKPDIIIMHEKGHQQPMTTLHTEGNNLADKLATQGSYVVHAGKRTADGSEFEKRTADGSEFESPKKKAKVE

SEQ ID NO: 419 - protein, 2174 aa, synthetic construct
MPAAKRVKLDGGDKKYSIGLDIGTNSVGWAVITDEYKVPSKKFKVLGNTDRHSIKKNLIGALLFDSGETAEATRLKRTARRRYTRRKNRICYLQEIFSNEMAKVDDSFFHRLEESFLVEEDKKHERHPIFGNIVDEVAYHEKYPTIYHLRKKLVDSTDKADLRLIYLALAHMIKFRGHFLIEGDLNPDNSDVDKLFIQLVQTYNQLFEENPINASGVDAKAILSARLSKSRRLENLIAQLPGEKKNGLFGNLIALSLGLTPNFKSNFDLAEDAKLQLSKDTYDDDLDNLLAQIGDQYADLFLAAKNLSDAILLSDILRVNTEITKAPLSASMIKRYDEHHQDLTLLKALVRQQLPEKYKEIFFDQSKNGYAGYIDGGASQEEFYKFIKPILEKMDGTEELLVKLNREDLLRKQRTFDNGSIPHQIHLGELHAILRRQEDFYPFLKDNREKIEKILTFRIPYYVGPLARGNSRFAWMTRKSEETITPWNFEEVVDKGASAQSFIERMTNFDKNLPNEKVLPKHSLLYEYFTVYNELTKVKYVTEGMRKPAFLSGEQKKAIVDLLFKTNRKVTVKQLKEDYFKKIECFDSVEISGVEDRFNASLGTYHDLLKIIKDKDFLDNEENEDILEDIVLTLTLFEDREMIEERLKTYAHLFDDKVMKQLKRRRYTGWGRLSRKLINGIRDKQSGKTILDFLKSDGFANRNFMQLIHDDSLTFKEDIQKAQVSGQGDSLHEHIANLAGSPAIKKGILQTVKVVDELVKVMGRHKPENIVIEMARENQTTQKGQKNSRERMKRIEEGIKELGSQILKEHPVENTQLQNEKLYLYYLQNGRDMYVDQELDINRLSDYDVDHIVPQSFLKDDSIDNKVLTRSDKARGKSDNVPSEEVVKKMKNYWRQLLNAKLITQRKFDNLTKAERGGLSELDKAGFIKRQLVETRQITKHVAQILDSRMNTKYDENDKLIREVKVITLKSKLVSDFRKDFQFYKVREINNYHHAHDAYLNAVVGTALIKKYPKLESEFVYGDYKVYDVRKMIAKSEQEIGKATAKYFFYSNIMNFFKTEITLANGEIRKRPLIETNGETGEIVWDKGRDFATVRKVLSMPQVNIVKKTEVQTGGFSKESILPKRNSDKLIARKKDWDPKKYGGFDSPTVAYSVLVVAKVEKGKSKKLKSVKELLGITIMERSSFEKNPIDFLEAKGYKEVKKDLIIKLPKYSLFELENGRKRMLASAGELQKGNELALPSKYVNFLYLASHYEKLKGSPEDNEQKQLFVEQHKHYLDEIIEQISEFSKRVILADANLDKVLSAYNKHRDKPIREQAENIIHLFTLTNLGAPAAFKYFDTTIDRKRYTSTKEVLDATLIHQSITGLYETRIDLSQLGGDGGGGGGSSPAPGGMDPLQLLQPLEAEIKGTKLKAHWNSGATITCVPEAFLEDERPIQTMLIKTIHGEKQQDVYYLTFKVQGRKVEAEVLASPYDYILLNPSDVPWLMKKPLQLTVLVPLHEYQERLLQQTALPKEQKELLQKLFLKYDALWQHWENQVGHRRIKPHNIATGTLAPRPQKQYPINPKAKPSIQIVIDDLLKQGVLIQQNSTMNTPVYPVPKPDGKWRMVLDYREVNKTIPLIAAQNQHSAGILSSIYRGKYKTTLDLTNGFWAHPITPESYWLTAFTWQGKQYCWTRLPQGFLNSPALFTADVVDLLKEIPNVQAYVDDIYISHDDPQEHLEQLEKIFSILLNAGYVVSLKKSEIAQREVEFLGFNITKEGRGLTDTFKQKLLNITPPKDLKQLQSILGLLNFARNFIPNYSELVKPLYTIVANANGKFISWTEDNSNQLQHIISVLNQADNLEERNPETRLIIKVNSSPSAGYIRYYNEGSKRPIMYVNYIFSKAEAKFTQTEKLLTTMHKGLIKAMDLAMGQEILVYSPIVSMTKIQRTPLPERKALPVRWITWMTYLEDPRIQFHYDKSLPELQQIPNVTEDVIAKTKHPSEFAMVFYTDGSAIKHPDVNKSHSAGMGIAQVQFIPEYKIVHQWSIPLGDHTAQLAEIAAVEFACKKALKISGPVLIVTDSFYVAESANKELPYWKSNGFLNNKKKPLRHVSKWKSIAECLQLKPDIIIMHEKGHQQPMTTLHTEGNNLADKLATQGSYVVHAGKRTADGSEFEKRTADGSEFESPKKKAKVE

SEQ ID NO: 420 - protein, 2176 aa, synthetic construct
MPAAKRVKLDGGDKKYSIGLDIGTNSVGWAVITDEYKVPSKKFKVLGNTDRHSIKKNLIGALLFDSGETAEATRLKRTARRRYTRRKNRICYLQEIFSNEMAKVDDSFFHRLEESFLVEEDKKHERHPIFGNIVDEVAYHEKYPTIYHLRKKLVDSTDKADLRLIYLALAHMIKFRGHFLIEGDLNPDNSDVDKLFIQLVQTYNQLFEENPINASGVDAKAILSARLSKSRRLENLIAQLPGEKKNGLFGNLIALSLGLTPNFKSNFDLAEDAKLQLSKDTYDDDLDNLLAQIGDQYADLFLAAKNLSDAILLSDILRVNTEITKAPLSASMIKRYDEHHQDLTLLKALVRQQLPEKYKEIFFDQSKNGYAGYIDGGASQEEFYKFIKPILEKMDGTEELLVKLNREDLLRKQRTFDNGSIPHQIHLGELHAILRRQEDFYPFLKDNREKIEKILTFRIPYYVGPLARGNSRFAWMTRKSEETITPWNFEEVVDKGASAQSFIERMTNFDKNLPNEKVLPKHSLLYEYFTVYNELTKVKYVTEGMRKPAFLSGEQKKAIVDLLFKTNRKVTVKQLKEDYFKKIECFDSVEISGVEDRFNASLGTYHDLLKIIKDKDFLDNEENEDILEDIVLTLTLFEDREMIEERLKTYAHLFDDKVMKQLKRRRYTGWGRLSRKLINGIRDKQSGKTILDFLKSDGFANRNFMQLIHDDSLTFKEDIQKAQVSGQGDSLHEHIANLAGSPAIKKGILQTVKVVDELVKVMGRHKPENIVIEMARENQTTQKGQKNSRERMKRIEEGIKELGSQILKEHPVENTQLQNEKLYLYYLQNGRDMYVDQELDINRLSDYDVDHIVPQSFLKDDSIDNKVLTRSDKARGKSDNVPSEEVVKKMKNYWRQLLNAKLITQRKFDNLTKAERGGLSELDKAGFIKRQLVETRQITKHVAQILDSRMNTKYDENDKLIREVKVITLKSKLVSDFRKDFQFYKVREINNYHHAHDAYLNAVVGTALIKKYPKLESEFVYGDYKVYDVRKMIAKSEQEIGKATAKYFFYSNIMNFFKTEITLANGEIRKRPLIETNGETGEIVWDKGRDFATVRKVLSMPQVNIVKKTEVQTGGFSKESILPKRNSDKLIARKKDWDPKKYGGFDSPTVAYSVLVVAKVEKGKSKKLKSVKELLGITIMERSSFEKNPIDFLEAKGYKEVKKDLIIKLPKYSLFELENGRKRMLASAGELQKGNELALPSKYVNFLYLASHYEKLKGSPEDNEQKQLFVEQHKHYLDEIIEQISEFSKRVILADANLDKVLSAYNKHRDKPIREQAENIIHLFTLTNLGAPAAFKYFDTTIDRKRYTSTKEVLDATLIHQSITGLYETRIDLSQLGGDGGGGGGSSEAAAKGGMDPLQLLQPLEAEIKGTKLKAHWNSGATITCVPEAFLEDERPIQTMLIKTIHGEKQQDVYYLTFKVQGRKVEAEVLASPYDYILLNPSDVPWLMKKPLQLTVLVPLHEYQERLLQQTALPKEQKELLQKLFLKYDALWQHWENQVGHRRIKPHNIATGTLAPRPQKQYPINPKAKPSIQIVIDDLLKQGVLIQQNSTMNTPVYPVPKPDGKWRMVLDYREVNKTIPLIAAQNQHSAGILSSIYRGKYKTTLDLTNGFWAHPITPESYWLTAFTWQGKQYCWTRLPQGFLNSPALFTADVVDLLKEIPNVQAYVDDIYISHDDPQEHLEQLEKIFSILLNAGYVVSLKKSEIAQREVEFLGFNITKEGRGLTDTFKQKLLNITPPKDLKQLQSILGLLNFARNFIPNYSELVKPLYTIVANANGKFISWTEDNSNQLQHIISVLNQADNLEERNPETRLIIKVNSSPSAGYIRYYNEGSKRPIMYVNYIFSKAEAKFTQTEKLLTTMHKGLIKAMDLAMGQEILVYSPIVSMTKIQRTPLPERKALPVRWITWMTYLEDPRIQFHYDKSLPELQQIPNVTEDVIAKTKHPSEFAMVFYTDGSAIKHPDVNKSHSAGMGIAQVQFIPEYKIVHQWSIPLGDHTAQLAEIAAVEFACKKALKISGPVLIVTDSFYVAESANKELPYWKSNGFLNNKKKPLRHVSKWKSIAECLQLKPDIIIMHEKGHQQPMTTLHTEGNNLADKLATQGSYVVHAGKRTADGSEFEKRTADGSEFESPKKKAKVE

SEQ ID NO: 421 - protein, 2180 aa, synthetic construct
MPAAKRVKLDGGDKKYSIGLDIGTNSVGWAVITDEYKVPSKKFKVLGNTDRHSIKKNLIGALLFDSGETAEATRLKRTARRRYTRRKNRICYLQEIFSNEMAKVDDSFFHRLEESFLVEEDKKHERHPIFGNIVDEVAYHEKYPTIYHLRKKLVDSTDKADLRLIYLALAHMIKFRGHFLIEGDLNPDNSDVDKLFIQLVQTYNQLFEENPINASGVDAKAILSARLSKSRRLENLIAQLPGEKKNGLFGNLIALSLGLTPNFKSNFDLAEDAKLQLSKDTYDDDLDNLLAQIGDQYADLFLAAKNLSDAILLSDILRVNTEITKAPLSASMIKRYDEHHQDLTLLKALVRQQLPEKYKEIFFDQSKNGYAGYIDGGASQEEFYKFIKPILEKMDGTEELLVKLNREDLLRKQRTFDNGSIPHQIHLGELHAILRRQEDFYPFLKDNREKIEKILTFRIPYYVGPLARGNSRFAWMTRKSEETITPWNFEEVVDKGASAQSFIERMTNFDKNLPNEKVLPKHSLLYEYFTVYNELTKVKYVTEGMRKPAFLSGEQKKAIVDLLFKTNRKVTVKQLKEDYFKKIECFDSVEISGVEDRFNASLGTYHDLLKIIKDKDFLDNEENEDILEDIVLTLTLFEDREMIEERLKTYAHLFDDKVMKQLKRRRYTGWGRLSRKLINGIRDKQSGKTILDFLKSDGFANRNFMQLIHDDSLTFKEDIQKAQVSGQGDSLHEHIANLAGSPAIKKGILQTVKVVDELVKVMGRHKPENIVIEMARENQTTQKGQKNSRERMKRIEEGIKELGSQILKEHPVENTQLQNEKLYLYYLQNGRDMYVDQELDINRLSDYDVDHIVPQSFLKDDSIDNKVLTRSDKARGKSDNVPSEEVVKKMKNYWRQLLNAKLITQRKFDNLTKAERGGLSELDKAGFIKRQLVETRQITKHVAQILDSRMNTKYDENDKLIREVKVITLKSKLVSDFRKDFQFYKVREINNYHHAHDAYLNAVVGTALIKKYPKLESEFVYGDYKVYDVRKMIAKSEQEIGKATAKYFFYSNIMNFFKTEITLANGEIRKRPLIETNGETGEIVWDKGRDFATVRKVLSMPQVNIVKKTEVQTGGFSKESILPKRNSDKLIARKKDWDPKKYGGFDSPTVAYSVLVVAKVEKGKSKKLKSVKELLGITIMERSSFEKNPIDFLEAKGYKEVKKDLIIKLPKYSLFELENGRKRMLASAGELQKGNELALPSKYVNFLYLASHYEKLKGSPEDNEQKQLFVEQHKHYLDEIIEQISEFSKRVILADANLDKVLSAYNKHRDKPIREQAENIIHLFTLTNLGAPAAFKYFDTTIDRKRYTSTKEVLDATLIHQSITGLYETRIDLSQLGGDGGGGGGSEAAAKGGGGSGGMDPLQLLQPLEAEIKGTKLKAHWNSGATITCVPEAFLEDERPIQTMLIKTIHGEKQQDVYYLTFKVQGRKVEAEVLASPYDYILLNPSDVPWLMKKPLQLTVLVPLHEYQERLLQQTALPKEQKELLQKLFLKYDALWQHWENQVGHRRIKPHNIATGTLAPRPQKQYPINPKAKPSIQIVIDDLLKQGVLIQQNSTMNTPVYPVPKPDGKWRMVLDYREVNKTIPLIAAQNQHSAGILSSIYRGKYKTTLDLTNGFWAHPITPESYWLTAFTWQGKQYCWTRLPQGFLNSPALFTADVVDLLKEIPNVQAYVDDIYISHDDPQEHLEQLEKIFSILLNAGYVVSLKKSEIAQREVEFLGFNITKEGRGLTDTFKQKLLNITPPKDLKQLQSILGLLNFARNFIPNYSELVKPLYTIVANANGKFISWTEDNSNQLQHIISVLNQADNLEERNPETRLIIKVNSSPSAGYIRYYNEGSKRPIMYVNYIFSKAEAKFTQTEKLLTTMHKGLIKAMDLAMGQEILVYSPIVSMTKIQRTPLPERKALPVRWITWMTYLEDPRIQFHYDKSLPELQQIPNVTEDVIAKTKHPSEFAMVFYTDGSAIKHPDVNKSHSAGMGIAQVQFIPEYKIVHQWSIPLGDHTAQLAEIAAVEFACKKALKISGPVLIVTDSFYVAESANKELPYWKSNGFLNNKKKPLRHVSKWKSIAECLQLKPDIIIMHEKGHQQPMTTLHTEGNNLADKLATQGSYVVHAGKRTADGSEFEKRTADGSEFESPKKKAKVE

SEQ ID NO: 422 - protein, 2176 aa, synthetic construct
MPAAKRVKLDGGDKKYSIGLDIGTNSVGWAVITDEYKVPSKKFKVLGNTDRHSIKKNLIGALLFDSGETAEATRLKRTARRRYTRRKNRICYLQEIFSNEMAKVDDSFFHRLEESFLVEEDKKHERHPIFGNIVDEVAYHEKYPTIYHLRKKLVDSTDKADLRLIYLALAHMIKFRGHFLIEGDLNPDNSDVDKLFIQLVQTYNQLFEENPINASGVDAKAILSARLSKSRRLENLIAQLPGEKKNGLFGNLIALSLGLTPNFKSNFDLAEDAKLQLSKDTYDDDLDNLLAQIGDQYADLFLAAKNLSDAILLSDILRVNTEITKAPLSASMIKRYDEHHQDLTLLKALVRQQLPEKYKEIFFDQSKNGYAGYIDGGASQEEFYKFIKPILEKMDGTEELLVKLNREDLLRKQRTFDNGSIPHQIHLGELHAILRRQEDFYPFLKDNREKIEKILTFRIPYYVGPLARGNSRFAWMTRKSEETITPWNFEEVVDKGASAQSFIERMTNFDKNLPNEKVLPKHSLLYEYFTVYNELTKVKYVTEGMRKPAFLSGEQKKAIVDLLFKTNRKVTVKQLKEDYFKKIECFDSVEISGVEDRFNASLGTYHDLLKIIKDKDFLDNEENEDILEDIVLTLTLFEDREMIEERLKTYAHLFDDKVMKQLKRRRYTGWGRLSRKLINGIRDKQSGKTILDFLKSDGFANRNFMQLIHDDSLTFKEDIQKAQVSGQGDSLHEHIANLAGSPAIKKGILQTVKVVDELVKVMGRHKPENIVIEMARENQTTQKGQKNSRERMKRIEEGIKELGSQILKEHPVENTQLQNEKLYLYYLQNGRDMYVDQELDINRLSDYDVDHIVPQSFLKDDSIDNKVLTRSDKARGKSDNVPSEEVVKKMKNYWRQLLNAKLITQRKFDNLTKAERGGLSELDKAGFIKRQLVETRQITKHVAQILDSRMNTKYDENDKLIREVKVITLKSKLVSDFRKDFQFYKVREINNYHHAHDAYLNAVVGTALIKKYPKLESEFVYGDYKVYDVRKMIAKSEQEIGKATAKYFFYSNIMNFFKTEITLANGEIRKRPLIETNGETGEIVWDKGRDFATVRKVLSMPQVNIVKKTEVQTGGFSKESILPKRNSDKLIARKKDWDPKKYGGFDSPTVAYSVLVVAKVEKGKSKKLKSVKELLGITIMERSSFEKNPIDFLEAKGYKEVKKDLIIKLPKYSLFELENGRKRMLASAGELQKGNELALPSKYVNFLYLASHYEKLKGSPEDNEQKQLFVEQHKHYLDEIIEQISEFSKRVILADANLDKVLSAYNKHRDKPIREQAENIIHLFTLTNLGAPAAFKYFDTTIDRKRYTSTKEVLDATLIHQSITGLYETRIDLSQLGGDGGGGGEAAAKGGSGGMDPLQLLQPLEAEIKGTKLKAHWNSGATITCVPEAFLEDERPIQTMLIKTIHGEKQQDVYYLTFKVQGRKVEAEVLASPYDYILLNPSDVPWLMKKPLQLTVLVPLHEYQERLLQQTALPKEQKELLQKLFLKYDALWQHWENQVGHRRIKPHNIATGTLAPRPQKQYPINPKAKPSIQIVIDDLLKQGVLIQQNSTMNTPVYPVPKPDGKWRMVLDYREVNKTIPLIAAQNQHSAGILSSIYRGKYKTTLDLTNGFWAHPITPESYWLTAFTWQGKQYCWTRLPQGFLNSPALFTADVVDLLKEIPNVQAYVDDIYISHDDPQEHLEQLEKIFSILLNAGYVVSLKKSEIAQREVEFLGFNITKEGRGLTDTFKQKLLNITPPKDLKQLQSILGLLNFARNFIPNYSELVKPLYTIVANANGKFISWTEDNSNQLQHIISVLNQADNLEERNPETRLIIKVNSSPSAGYIRYYNEGSKRPIMYVNYIFSKAEAKFTQTEKLLTTMHKGLIKAMDLAMGQEILVYSPIVSMTKIQRTPLPERKALPVRWITWMTYLEDPRIQFHYDKSLPELQQIPNVTEDVIAKTKHPSEFAMVFYTDGSAIKHPDVNKSHSAGMGIAQVQFIPEYKIVHQWSIPLGDHTAQLAEIAAVEFACKKALKISGPVLIVTDSFYVAESANKELPYWKSNGFLNNKKKPLRHVSKWKSIAECLQLKPDIIIMHEKGHQQPMTTLHTEGNNLADKLATQGSYVVHAGKRTADGSEFEKRTADGSEFESPKKKAKVE

SEQ ID NO: 423 - protein, 2171 aa, synthetic construct
MPAAKRVKLDGGDKKYSIGLDIGTNSVGWAVITDEYKVPSKKFKVLGNTDRHSIKKNLIGALLFDSGETAEATRLKRTARRRYTRRKNRICYLQEIFSNEMAKVDDSFFHRLEESFLVEEDKKHERHPIFGNIVDEVAYHEKYPTIYHLRKKLVDSTDKADLRLIYLALAHMIKFRGHFLIEGDLNPDNSDVDKLFIQLVQTYNQLFEENPINASGVDAKAILSARLSKSRRLENLIAQLPGEKKNGLFGNLIALSLGLTPNFKSNFDLAEDAKLQLSKDTYDDDLDNLLAQIGDQYADLFLAAKNLSDAILLSDILRVNTEITKAPLSASMIKRYDEHHQDLTLLKALVRQQLPEKYKEIFFDQSKNGYAGYIDGGASQEEFYKFIKPILEKMDGTEELLVKLNREDLLRKQRTFDNGSIPHQIHLGELHAILRRQEDFYPFLKDNREKIEKILTFRIPYYVGPLARGNSRFAWMTRKSEETITPWNFEEVVDKGASAQSFIERMTNFDKNLPNEKVLPKHSLLYEYFTVYNELTKVKYVTEGMRKPAFLSGEQKKAIVDLLFKTNRKVTVKQLKEDYFKKIECFDSVEISGVEDRFNASLGTYHDLLKIIKDKDFLDNEENEDILEDIVLTLTLFEDREMIEERLKTYAHLFDDKVMKQLKRRRYTGWGRLSRKLINGIRDKQSGKTILDFLKSDGFANRNFMQLIHDDSLTFKEDIQKAQVSGQGDSLHEHIANLAGSPAIKKGILQTVKVVDELVKVMGRHKPENIVIEMARENQTTQKGQKNSRERMKRIEEGIKELGSQILKEHPVENTQLQNEKLYLYYLQNGRDMYVDQELDINRLSDYDVDHIVPQSFLKDDSIDNKVLTRSDKARGKSDNVPSEEVVKKMKNYWRQLLNAKLITQRKFDNLTKAERGGLSELDKAGFIKRQLVETRQITKHVAQILDSRMNTKYDENDKLIREVKVITLKSKLVSDFRKDFQFYKVREINNYHHAHDAYLNAVVGTALIKKYPKLESEFVYGDYKVYDVRKMIAKSEQEIGKATAKYFFYSNIMNFFKTEITLANGEIRKRPLIETNGETGEIVWDKGRDFATVRKVLSMPQVNIVKKTEVQTGGFSKESILPKRNSDKLIARKKDWDPKKYGGFDSPTVAYSVLVVAKVEKGKSKKLKSVKELLGITIMERSSFEKNPIDFLEAKGYKEVKKDLIIKLPKYSLFELENGRKRMLASAGELQKGNELALPSKYVNFLYLASHYEKLKGSPEDNEQKQLFVEQHKHYLDEIIEQISEFSKRVILADANLDKVLSAYNKHRDKPIREQAENIIHLFTLTNLGAPAAFKYFDTTIDRKRYTSTKEVLDATLIHQSITGLYETRIDLSQLGGDGGGSSGSSGGMDPLQLLQPLEAEIKGTKLKAHWNSGATITCVPEAFLEDERPIQTMLIKTIHGEKQQDVYYLTFKVQGRKVEAEVLASPYDYILLNPSDVPWLMKKPLQLTVLVPLHEYQERLLQQTALPKEQKELLQKLFLKYDALWQHWENQVGHRRIKPHNIATGTLAPRPQKQYPINPKAKPSIQIVIDDLLKQGVLIQQNSTMNTPVYPVPKPDGKWRMVLDYREVNKTIPLIAAQNQHSAGILSSIYRGKYKTTLDLTNGFWAHPITPESYWLTAFTWQGKQYCWTRLPQGFLNSPALFTADVVDLLKEIPNVQAYVDDIYISHDDPQEHLEQLEKIFSILLNAGYVVSLKKSEIAQREVEFLGFNITKEGRGLTDTFKQKLLNITPPKDLKQLQSILGLLNFARNFIPNYSELVKPLYTIVANANGKFISWTEDNSNQLQHIISVLNQADNLEERNPETRLIIKVNSSPSAGYIRYYNEGSKRPIMYVNYIFSKAEAKFTQTEKLLTTMHKGLIKAMDLAMGQEILVYSPIVSMTKIQRTPLPERKALPVRWITWMTYLEDPRIQFHYDKSLPELQQIPNVTEDVIAKTKHPSEFAMVFYTDGSAIKHPDVNKSHSAGMGIAQVQFIPEYKIVHQWSIPLGDHTAQLAEIAAVEFACKKALKISGPVLIVTDSFYVAESANKELPYWKSNGFLNNKKKPLRHVSKWKSIAECLQLKPDIIIMHEKGHQQPMTTLHTEGNNLADKLATQGSYVVHAGKRTADGSEFEKRTADGSEFESPKKKAKVE

SEQ ID NO: 424 - protein, 2176 aa, synthetic construct
MPAAKRVKLDGGDKKYSIGLDIGTNSVGWAVITDEYKVPSKKFKVLGNTDRHSIKKNLIGALLFDSGETAEATRLKRTARRRYTRRKNRICYLQEIFSNEMAKVDDSFFHRLEESFLVEEDKKHERHPIFGNIVDEVAYHEKYPTIYHLRKKLVDSTDKADLRLIYLALAHMIKFRGHFLIEGDLNPDNSDVDKLFIQLVQTYNQLFEENPINASGVDAKAILSARLSKSRRLENLIAQLPGEKKNGLFGNLIALSLGLTPNFKSNFDLAEDAKLQLSKDTYDDDLDNLLAQIGDQYADLFLAAKNLSDAILLSDILRVNTEITKAPLSASMIKRYDEHHQDLTLLKALVRQQLPEKYKEIFFDQSKNGYAGYIDGGASQEEFYKFIKPILEKMDGTEELLVKLNREDLLRKQRTFDNGSIPHQIHLGELHAILRRQEDFYPFLKDNREKIEKILTFRIPYYVGPLARGNSRFAWMTRKSEETITPWNFEEVVDKGASAQSFIERMTNFDKNLPNEKVLPKHSLLYEYFTVYNELTKVKYVTEGMRKPAFLSGEQKKAIVDLLFKTNRKVTVKQLKEDYFKKIECFDSVEISGVEDRFNASLGTYHDLLKIIKDKDFLDNEENEDILEDIVLTLTLFEDREMIEERLKTYAHLFDDKVMKQLKRRRYTGWGRLSRKLINGIRDKQSGKTILDFLKSDGFANRNFMQLIHDDSLTFKEDIQKAQVSGQGDSLHEHIANLAGSPAIKKGILQTVKVVDELVKVMGRHKPENIVIEMARENQTTQKGQKNSRERMKRIEEGIKELGSQILKEHPVENTQLQNEKLYLYYLQNGRDMYVDQELDINRLSDYDVDHIVPQSFLKDDSIDNKVLTRSDKARGKSDNVPSEEVVKKMKNYWRQLLNAKLITQRKFDNLTKAERGGLSELDKAGFIKRQLVETRQITKHVAQILDSRMNTKYDENDKLIREVKVITLKSKLVSDFRKDFQFYKVREINNYHHAHDAYLNAVVGTALIKKYPKLESEFVYGDYKVYDVRKMIAKSEQEIGKATAKYFFYSNIMNFFKTEITLANGEIRKRPLIETNGETGEIVWDKGRDFATVRKVLSMPQVNIVKKTEVQTGGFSKESILPKRNSDKLIARKKDWDPKKYGGFDSPTVAYSVLVVAKVEKGKSKKLKSVKELLGITIMERSSFEKNPIDFLEAKGYKEVKKDLIIKLPKYSLFELENGRKRMLASAGELQKGNELALPSKYVNFLYLASHYEKLKGSPEDNEQKQLFVEQHKHYLDEIIEQISEFSKRVILADANLDKVLSAYNKHRDKPIREQAENIIHLFTLTNLGAPAAFKYFDTTIDRKRYTSTKEVLDATLIHQSITGLYETRIDLSQLGGDGGPAPGGGEAAAKGGMDPLQLLQPLEAEIKGTKLKAHWNSGATITCVPEAFLEDERPIQTMLIKTIHGEKQQDVYYLTFKVQGRKVEAEVLASPYDYILLNPSDVPWLMKKPLQLTVLVPLHEYQERLLQQTALPKEQKELLQKLFLKYDALWQHWENQVGHRRIKPHNIATGTLAPRPQKQYPINPKAKPSIQIVIDDLLKQGVLIQQNSTMNTPVYPVPKPDGKWRMVLDYREVNKTIPLIAAQNQHSAGILSSIYRGKYKTTLDLTNGFWAHPITPESYWLTAFTWQGKQYCWTRLPQGFLNSPALFTADVVDLLKEIPNVQAYVDDIYISHDDPQEHLEQLEKIFSILLNAGYVVSLKKSEIAQREVEFLGFNITKEGRGLTDTFKQKLLNITPPKDLKQLQSILGLLNFARNFIPNYSELVKPLYTIVANANGKFISWTEDNSNQLQHIISVLNQADNLEERNPETRLIIKVNSSPSAGYIRYYNEGSKRPIMYVNYIFSKAEAKFTQTEKLLTTMHKGLIKAMDLAMGQEILVYSPIVSMTKIQRTPLPERKALPVRWITWMTYLEDPRIQFHYDKSLPELQQIPNVTEDVIAKTKHPSEFAMVFYTDGSAIKHPDVNKSHSAGMGIAQVQFIPEYKIVHQWSIPLGDHTAQLAEIAAVEFACKKALKISGPVLIVTDSFYVAESANKELPYWKSNGFLNNKKKPLRHVSKWKSIAECLQLKPDIIIMHEKGHQQPMTTLHTEGNNLADKLATQGSYVVHAGKRTADGSEFEKRTADGSEFESPKKKAKVE

SEQ ID NO: 425 - protein, 2174 aa, synthetic construct
MPAAKRVKLDGGDKKYSIGLDIGTNSVGWAVITDEYKVPSKKFKVLGNTDRHSIKKNLIGALLFDSGETAEATRLKRTARRRYTRRKNRICYLQEIFSNEMAKVDDSFFHRLEESFLVEEDKKHERHPIFGNIVDEVAYHEKYPTIYHLRKKLVDSTDKADLRLIYLALAHMIKFRGHFLIEGDLNPDNSDVDKLFIQLVQTYNQLFEENPINASGVDAKAILSARLSKSRRLENLIAQLPGEKKNGLFGNLIALSLGLTPNFKSNFDLAEDAKLQLSKDTYDDDLDNLLAQIGDQYADLFLAAKNLSDAILLSDILRVNTEITKAPLSASMIKRYDEHHQDLTLLKALVRQQLPEKYKEIFFDQSKNGYAGYIDGGASQEEFYKFIKPILEKMDGTEELLVKLNREDLLRKQRTFDNGSIPHQIHLGELHAILRRQEDFYPFLKDNREKIEKILTFRIPYYVGPLARGNSRFAWMTRKSEETITPWNFEEVVDKGASAQSFIERMTNFDKNLPNEKVLPKHSLLYEYFTVYNELTKVKYVTEGMRKPAFLSGEQKKAIVDLLFKTNRKVTVKQLKEDYFKKIECFDSVEISGVEDRFNASLGTYHDLLKIIKDKDFLDNEENEDILEDIVLTLTLFEDREMIEERLKTYAHLFDDKVMKQLKRRRYTGWGRLSRKLINGIRDKQSGKTILDFLKSDGFANRNFMQLIHDDSLTFKEDIQKAQVSGQGDSLHEHIANLAGSPAIKKGILQTVKVVDELVKVMGRHKPENIVIEMARENQTTQKGQKNSRERMKRIEEGIKELGSQILKEHPVENTQLQNEKLYLYYLQNGRDMYVDQELDINRLSDYDVDHIVPQSFLKDDSIDNKVLTRSDKARGKSDNVPSEEVVKKMKNYWRQLLNAKLITQRKFDNLTKAERGGLSELDKAGFIKRQLVETRQITKHVAQILDSRMNTKYDENDKLIREVKVITLKSKLVSDFRKDFQFYKVREINNYHHAHDAYLNAVVGTALIKKYPKLESEFVYGDYKVYDVRKMIAKSEQEIGKATAKYFFYSNIMNFFKTEITLANGEIRKRPLIETNGETGEIVWDKGRDFATVRKVLSMPQVNIVKKTEVQTGGFSKESILPKRNSDKLIARKKDWDPKKYGGFDSPTVAYSVLVVAKVEKGKSKKLKSVKELLGITIMERSSFEKNPIDFLEAKGYKEVKKDLIIKLPKYSLFELENGRKRMLASAGELQKGNELALPSKYVNFLYLASHYEKLKGSPEDNEQKQLFVEQHKHYLDEIIEQISEFSKRVILADANLDKVLSAYNKHRDKPIREQAENIIHLFTLTNLGAPAAFKYFDTTIDRKRYTSTKEVLDATLIHQSITGLYETRIDLSQLGGDGGGGSGGSGGSGGMDPLQLLQPLEAEIKGTKLKAHWNSGATITCVPEAFLEDERPIQTMLIKTIHGEKQQDVYYLTFKVQGRKVEAEVLASPYDYILLNPSDVPWLMKKPLQLTVLVPLHEYQERLLQQTALPKEQKELLQKLFLKYDALWQHWENQVGHRRIKPHNIATGTLAPRPQKQYPINPKAKPSIQIVIDDLLKQGVLIQQNSTMNTPVYPVPKPDGKWRMVLDYREVNKTIPLIAAQNQHSAGILSSIYRGKYKTTLDLTNGFWAHPITPESYWLTAFTWQGKQYCWTRLPQGFLNSPALFTADVVDLLKEIPNVQAYVDDIYISHDDPQEHLEQLEKIFSILLNAGYVVSLKKSEIAQREVEFLGFNITKEGRGLTDTFKQKLLNITPPKDLKQLQSILGLLNFARNFIPNYSELVKPLYTIVANANGKFISWTEDNSNQLQHIISVLNQADNLEERNPETRLIIKVNSSPSAGYIRYYNEGSKRPIMYVNYIFSKAEAKFTQTEKLLTTMHKGLIKAMDLAMGQEILVYSPIVSMTKIQRTPLPERKALPVRWITWMTYLEDPRIQFHYDKSLPELQQIPNVTEDVIAKTKHPSEFAMVFYTDGSAIKHPDVNKSHSAGMGIAQVQFIPEYKIVHQWSIPLGDHTAQLAEIAAVEFACKKALKISGPVLIVTDSFYVAESANKELPYWKSNGFLNNKKKPLRHVSKWKSIAECLQLKPDIIIMHEKGHQQPMTTLHTEGNNLADKLATQGSYVVHAGKRTADGSEFEKRTADGSEFESPKKKAKVE

SEQ ID NO: 426 - protein, 2094 aa, synthetic construct
MPAAKRVKLDGGDKKYSIGLDIGTNSVGWAVITDEYKVPSKKFKVLGNTDRHSIKKNLIGALLFDSGETAEATRLKRTARRRYTRRKNRICYLQEIFSNEMAKVDDSFFHRLEESFLVEEDKKHERHPIFGNIVDEVAYHEKYPTIYHLRKKLVDSTDKADLRLIYLALAHMIKFRGHFLIEGDLNPDNSDVDKLFIQLVQTYNQLFEENPINASGVDAKAILSARLSKSRRLENLIAQLPGEKKNGLFGNLIALSLGLTPNFKSNFDLAEDAKLQLSKDTYDDDLDNLLAQIGDQYADLFLAAKNLSDAILLSDILRVNTEITKAPLSASMIKRYDEHHQDLTLLKALVRQQLPEKYKEIFFDQSKNGYAGYIDGGASQEEFYKFIKPILEKMDGTEELLVKLNREDLLRKQRTFDNGSIPHQIHLGELHAILRRQEDFYPFLKDNREKIEKILTFRIPYYVGPLARGNSRFAWMTRKSEETITPWNFEEVVDKGASAQSFIERMTNFDKNLPNEKVLPKHSLLYEYFTVYNELTKVKYVTEGMRKPAFLSGEQKKAIVDLLFKTNRKVTVKQLKEDYFKKIECFDSVEISGVEDRFNASLGTYHDLLKIIKDKDFLDNEENEDILEDIVLTLTLFEDREMIEERLKTYAHLFDDKVMKQLKRRRYTGWGRLSRKLINGIRDKQSGKTILDFLKSDGFANRNFMQLIHDDSLTFKEDIQKAQVSGQGDSLHEHIANLAGSPAIKKGILQTVKVVDELVKVMGRHKPENIVIEMARENQTTQKGQKNSRERMKRIEEGIKELGSQILKEHPVENTQLQNEKLYLYYLQNGRDMYVDQELDINRLSDYDVDHIVPQSFLKDDSIDNKVLTRSDKARGKSDNVPSEEVVKKMKNYWRQLLNAKLITQRKFDNLTKAERGGLSELDKAGFIKRQLVETRQITKHVAQILDSRMNTKYDENDKLIREVKVITLKSKLVSDFRKDFQFYKVREINNYHHAHDAYLNAVVGTALIKKYPKLESEFVYGDYKVYDVRKMIAKSEQEIGKATAKYFFYSNIMNFFKTEITLANGEIRKRPLIETNGETGEIVWDKGRDFATVRKVLSMPQVNIVKKTEVQTGGFSKESILPKRNSDKLIARKKDWDPKKYGGFDSPTVAYSVLVVAKVEKGKSKKLKSVKELLGITIMERSSFEKNPIDFLEAKGYKEVKKDLIIKLPKYSLFELENGRKRMLASAGELQKGNELALPSKYVNFLYLASHYEKLKGSPEDNEQKQLFVEQHKHYLDEIIEQISEFSKRVILADANLDKVLSAYNKHRDKPIREQAENIIHLFTLTNLGAPAAFKYFDTTIDRKRYTSTKEVLDATLIHQSITGLYETRIDLSQLGGDGGGSSGSSGSSGSSGSSGSSGGVPWLMKKPLQLTVLVPLHEYQERLLQQTALPKEQKELLQKLFLKYDALWQHWENQVGHRRIKPHNIATGTLAPRPQKQYPINPKAKPSIQIVIDDLLKQGVLIQQNSTMNTPVYPVPKPDGKWRMVLDYREVNKTIPLIAAQNQHSAGILSSIYRGKYKTTLDLTNGFWAHPITPESYWLTAFTWQGKQYCWTRLPQGFLNSPALFTADVVDLLKEIPNVQAYVDDIYISHDDPQEHLEQLEKIFSILLNAGYVVSLKKSEIAQREVEFLGFNITKEGRGLTDTFKQKLLNITPPKDLKQLQSILGLLNFARNFIPNYSELVKPLYTIVANANGKFISWTEDNSNQLQHIISVLNQADNLEERNPETRLIIKVNSSPSAGYIRYYNEGSKRPIMYVNYIFSKAEAKFTQTEKLLTTMHKGLIKAMDLAMGQEILVYSPIVSMTKIQRTPLPERKALPVRWITWMTYLEDPRIQFHYDKSLPELQQIPNVTEDVIAKTKHPSEFAMVFYTDGSAIKHPDVNKSHSAGMGIAQVQFIPEYKIVHQWSIPLGDHTAQLAEIAAVEFACKKALKISGPVLIVTDSFYVAESANKELPYWKSNGFLNNKKKPLRHVSKWKSIAECLQLKPDIIIMHEKGHQQPMTTLHTEGNNLADKLATQGSYVVHAGKRTADGSEFEKRTADGSEFESPKKKAKVE

SEQ ID NO: 427 - protein, 2087 aa, synthetic construct
MPAAKRVKLDGGDKKYSIGLDIGTNSVGWAVITDEYKVPSKKFKVLGNTDRHSIKKNLIGALLFDSGETAEATRLKRTARRRYTRRKNRICYLQEIFSNEMAKVDDSFFHRLEESFLVEEDKKHERHPIFGNIVDEVAYHEKYPTIYHLRKKLVDSTDKADLRLIYLALAHMIKFRGHFLIEGDLNPDNSDVDKLFIQLVQTYNQLFEENPINASGVDAKAILSARLSKSRRLENLIAQLPGEKKNGLFGNLIALSLGLTPNFKSNFDLAEDAKLQLSKDTYDDDLDNLLAQIGDQYADLFLAAKNLSDAILLSDILRVNTEITKAPLSASMIKRYDEHHQDLTLLKALVRQQLPEKYKEIFFDQSKNGYAGYIDGGASQEEFYKFIKPILEKMDGTEELLVKLNREDLLRKQRTFDNGSIPHQIHLGELHAILRRQEDFYPFLKDNREKIEKILTFRIPYYVGPLARGNSRFAWMTRKSEETITPWNFEEVVDKGASAQSFIERMTNFDKNLPNEKVLPKHSLLYEYFTVYNELTKVKYVTEGMRKPAFLSGEQKKAIVDLLFKTNRKVTVKQLKEDYFKKIECFDSVEISGVEDRFNASLGTYHDLLKIIKDKDFLDNEENEDILEDIVLTLTLFEDREMIEERLKTYAHLFDDKVMKQLKRRRYTGWGRLSRKLINGIRDKQSGKTILDFLKSDGFANRNFMQLIHDDSLTFKEDIQKAQVSGQGDSLHEHIANLAGSPAIKKGILQTVKVVDELVKVMGRHKPENIVIEMARENQTTQKGQKNSRERMKRIEEGIKELGSQILKEHPVENTQLQNEKLYLYYLQNGRDMYVDQELDINRLSDYDVDHIVPQSFLKDDSIDNKVLTRSDKARGKSDNVPSEEVVKKMKNYWRQLLNAKLITQRKFDNLTKAERGGLSELDKAGFIKRQLVETRQITKHVAQILDSRMNTKYDENDKLIREVKVITLKSKLVSDFRKDFQFYKVREINNYHHAHDAYLNAVVGTALIKKYPKLESEFVYGDYKVYDVRKMIAKSEQEIGKATAKYFFYSNIMNFFKTEITLANGEIRKRPLIETNGETGEIVWDKGRDFATVRKVLSMPQVNIVKKTEVQTGGFSKESILPKRNSDKLIARKKDWDPKKYGGFDSPTVAYSVLVVAKVEKGKSKKLKSVKELLGITIMERSSFEKNPIDFLEAKGYKEVKKDLIIKLPKYSLFELENGRKRMLASAGELQKGNELALPSKYVNFLYLASHYEKLKGSPEDNEQKQLFVEQHKHYLDEIIEQISEFSKRVILADANLDKVLSAYNKHRDKPIREQAENIIHLFTLTNLGAPAAFKYFDTTIDRKRYTSTKEVLDATLIHQSITGLYETRIDLSQLGGDGGPAPEAAAKGSSGGVPWLMKKPLQLTVLVPLHEYQERLLQQTALPKEQKELLQKLFLKYDALWQHWENQVGHRRIKPHNIATGTLAPRPQKQYPINPKAKPSIQIVIDDLLKQGVLIQQNSTMNTPVYPVPKPDGKWRMVLDYREVNKTIPLIAAQNQHSAGILSSIYRGKYKTTLDLTNGFWAHPITPESYWLTAFTWQGKQYCWTRLPQGFLNSPALFTADVVDLLKEIPNVQAYVDDIYISHDDPQEHLEQLEKIFSILLNAGYVVSLKKSEIAQREVEFLGFNITKEGRGLTDTFKQKLLNITPPKDLKQLQSILGLLNFARNFIPNYSELVKPLYTIVANANGKFISWTEDNSNQLQHIISVLNQADNLEERNPETRLIIKVNSSPSAGYIRYYNEGSKRPIMYVNYIFSKAEAKFTQTEKLLTTMHKGLIKAMDLAMGQEILVYSPIVSMTKIQRTPLPERKALPVRWITWMTYLEDPRIQFHYDKSLPELQQIPNVTEDVIAKTKHPSEFAMVFYTDGSAIKHPDVNKSHSAGMGIAQVQFIPEYKIVHQWSIPLGDHTAQLAEIAAVEFACKKALKISGPVLIVTDSFYVAESANKELPYWKSNGFLNNKKKPLRHVSKWKSIAECLQLKPDIIIMHEKGHQQPMTTLHTEGNNLADKLATQGSYVVHAGKRTADGSEFEKRTADGSEFESPKKKAKVE

SEQ ID NO: 428 - protein, 2091 aa, synthetic construct
MPAAKRVKLDGGDKKYSIGLDIGTNSVGWAVITDEYKVPSKKFKVLGNTDRHSIKKNLIGALLFDSGETAEATRLKRTARRRYTRRKNRICYLQEIFSNEMAKVDDSFFHRLEESFLVEEDKKHERHPIFGNIVDEVAYHEKYPTIYHLRKKLVDSTDKADLRLIYLALAHMIKFRGHFLIEGDLNPDNSDVDKLFIQLVQTYNQLFEENPINASGVDAKAILSARLSKSRRLENLIAQLPGEKKNGLFGNLIALSLGLTPNFKSNFDLAEDAKLQLSKDTYDDDLDNLLAQIGDQYADLFLAAKNLSDAILLSDILRVNTEITKAPLSASMIKRYDEHHQDLTLLKALVRQQLPEKYKEIFFDQSKNGYAGYIDGGASQEEFYKFIKPILEKMDGTEELLVKLNREDLLRKQRTFDNGSIPHQIHLGELHAILRRQEDFYPFLKDNREKIEKILTFRIPYYVGPLARGNSRFAWMTRKSEETITPWNFEEVVDKGASAQSFIERMTNFDKNLPNEKVLPKHSLLYEYFTVYNELTKVKYVTEGMRKPAFLSGEQKKAIVDLLFKTNRKVTVKQLKEDYFKKIECFDSVEISGVEDRFNASLGTYHDLLKIIKDKDFLDNEENEDILEDIVLTLTLFEDREMIEERLKTYAHLFDDKVMKQLKRRRYTGWGRLSRKLINGIRDKQSGKTILDFLKSDGFANRNFMQLIHDDSLTFKEDIQKAQVSGQGDSLHEHIANLAGSPAIKKGILQTVKVVDELVKVMGRHKPENIVIEMARENQTTQKGQKNSRERMKRIEEGIKELGSQILKEHPVENTQLQNEKLYLYYLQNGRDMYVDQELDINRLSDYDVDHIVPQSFLKDDSIDNKVLTRSDKARGKSDNVPSEEVVKKMKNYWRQLLNAKLITQRKFDNLTKAERGGLSELDKAGFIKRQLVETRQITKHVAQILDSRMNTKYDENDKLIREVKVITLKSKLVSDFRKDFQFYKVREINNYHHAHDAYLNAVVGTALIKKYPKLESEFVYGDYKVYDVRKMIAKSEQEIGKATAKYFFYSNIMNFFKTEITLANGEIRKRPLIETNGETGEIVWDKGRDFATVRKVLSMPQVNIVKKTEVQTGGFSKESILPKRNSDKLIARKKDWDPKKYGGFDSPTVAYSVLVVAKVEKGKSKKLKSVKELLGITIMERSSFEKNPIDFLEAKGYKEVKKDLIIKLPKYSLFELENGRKRMLASAGELQKGNELALPSKYVNFLYLASHYEKLKGSPEDNEQKQLFVEQHKHYLDEIIEQISEFSKRVILADANLDKVLSAYNKHRDKPIREQAENIIHLFTLTNLGAPAAFKYFDTTIDRKRYTSTKEVLDATLIHQSITGLYETRIDLSQLGGDGGGSSGSSGSSGSSGSSGGVPWLMKKPLQLTVLVPLHEYQERLLQQTALPKEQKELLQKLFLKYDALWQHWENQVGHRRIKPHNIATGTLAPRPQKQYPINPKAKPSIQIVIDDLLKQGVLIQQNSTMNTPVYPVPKPDGKWRMVLDYREVNKTIPLIAAQNQHSAGILSSIYRGKYKTTLDLTNGFWAHPITPESYWLTAFTWQGKQYCWTRLPQGFLNSPALFTADVVDLLKEIPNVQAYVDDIYISHDDPQEHLEQLEKIFSILLNAGYVVSLKKSEIAQREVEFLGFNITKEGRGLTDTFKQKLLNITPPKDLKQLQSILGLLNFARNFIPNYSELVKPLYTIVANANGKFISWTEDNSNQLQHIISVLNQADNLEERNPETRLIIKVNSSPSAGYIRYYNEGSKRPIMYVNYIFSKAEAKFTQTEKLLTTMHKGLIKAMDLAMGQEILVYSPIVSMTKIQRTPLPERKALPVRWITWMTYLEDPRIQFHYDKSLPELQQIPNVTEDVIAKTKHPSEFAMVFYTDGSAIKHPDVNKSHSAGMGIAQVQFIPEYKIVHQWSIPLGDHTAQLAEIAAVEFACKKALKISGPVLIVTDSFYVAESANKELPYWKSNGFLNNKKKPLRHVSKWKSIAECLQLKPDIIIMHEKGHQQPMTTLHTEGNNLADKLATQGSYVVHAGKRTADGSEFEKRTADGSEFESPKKKAKVE

SEQ ID NO: 429 - protein, 2084 aa, synthetic construct
MPAAKRVKLDGGDKKYSIGLDIGTNSVGWAVITDEYKVPSKKFKVLGNTDRHSIKKNLIGALLFDSGETAEATRLKRTARRRYTRRKNRICYLQEIFSNEMAKVDDSFFHRLEESFLVEEDKKHERHPIFGNIVDEVAYHEKYPTIYHLRKKLVDSTDKADLRLIYLALAHMIKFRGHFLIEGDLNPDNSDVDKLFIQLVQTYNQLFEENPINASGVDAKAILSARLSKSRRLENLIAQLPGEKKNGLFGNLIALSLGLTPNFKSNFDLAEDAKLQLSKDTYDDDLDNLLAQIGDQYADLFLAAKNLSDAILLSDILRVNTEITKAPLSASMIKRYDEHHQDLTLLKALVRQQLPEKYKEIFFDQSKNGYAGYIDGGASQEEFYKFIKPILEKMDGTEELLVKLNREDLLRKQRTFDNGSIPHQIHLGELHAILRRQEDFYPFLKDNREKIEKILTFRIPYYVGPLARGNSRFAWMTRKSEETITPWNFEEVVDKGASAQSFIERMTNFDKNLPNEKVLPKHSLLYEYFTVYNELTKVKYVTEGMRKPAFLSGEQKKAIVDLLFKTNRKVTVKQLKEDYFKKIECFDSVEISGVEDRFNASLGTYHDLLKIIKDKDFLDNEENEDILEDIVLTLTLFEDREMIEERLKTYAHLFDDKVMKQLKRRRYTGWGRLSRKLINGIRDKQSGKTILDFLKSDGFANRNFMQLIHDDSLTFKEDIQKAQVSGQGDSLHEHIANLAGSPAIKKGILQTVKVVDELVKVMGRHKPENIVIEMARENQTTQKGQKNSRERMKRIEEGIKELGSQILKEHPVENTQLQNEKLYLYYLQNGRDMYVDQELDINRLSDYDVDHIVPQSFLKDDSIDNKVLTRSDKARGKSDNVPSEEVVKKMKNYWRQLLNAKLITQRKFDNLTKAERGGLSELDKAGFIKRQLVETRQITKHVAQILDSRMNTKYDENDKLIREVKVITLKSKLVSDFRKDFQFYKVREINNYHHAHDAYLNAVVGTALIKKYPKLESEFVYGDYKVYDVRKMIAKSEQEIGKATAKYFFYSNIMNFFKTEITLANGEIRKRPLIETNGETGEIVWDKGRDFATVRKVLSMPQVNIVKKTEVQTGGFSKESILPKRNSDKLIARKKDWDPKKYGGFDSPTVAYSVLVVAKVEKGKSKKLKSVKELLGITIMERSSFEKNPIDFLEAKGYKEVKKDLIIKLPKYSLFELENGRKRMLASAGELQKGNELALPSKYVNFLYLASHYEKLKGSPEDNEQKQLFVEQHKHYLDEIIEQISEFSKRVILADANLDKVLSAYNKHRDKPIREQAENIIHLFTLTNLGAPAAFKYFDTTIDRKRYTSTKEVLDATLIHQSITGLYETRIDLSQLGGDGGGGGGGGGGGGVPWLMKKPLQLTVLVPLHEYQERLLQQTALPKEQKELLQKLFLKYDALWQHWENQVGHRRIKPHNIATGTLAPRPQKQYPINPKAKPSIQIVIDDLLKQGVLIQQNSTMNTPVYPVPKPDGKWRMVLDYREVNKTIPLIAAQNQHSAGILSSIYRGKYKTTLDLTNGFWAHPITPESYWLTAFTWQGKQYCWTRLPQGFLNSPALFTADVVDLLKEIPNVQAYVDDIYISHDDPQEHLEQLEKIFSILLNAGYVVSLKKSEIAQREVEFLGFNITKEGRGLTDTFKQKLLNITPPKDLKQLQSILGLLNFARNFIPNYSELVKPLYTIVANANGKFISWTEDNSNQLQHIISVLNQADNLEERNPETRLIIKVNSSPSAGYIRYYNEGSKRPIMYVNYIFSKAEAKFTQTEKLLTTMHKGLIKAMDLAMGQEILVYSPIVSMTKIQRTPLPERKALPVRWITWMTYLEDPRIQFHYDKSLPELQQIPNVTEDVIAKTKHPSEFAMVFYTDGSAIKHPDVNKSHSAGMGIAQVQFIPEYKIVHQWSIPLGDHTAQLAEIAAVEFACKKALKISGPVLIVTDSFYVAESANKELPYWKSNGFLNNKKKPLRHVSKWKSIAECLQLKPDIIIMHEKGHQQPMTTLHTEGNNLADKLATQGSYVVHAGKRTADGSEFEKRTADGSEFESPKKKAKVE

SEQ ID NO: 430 - protein, 2084 aa, synthetic construct
MPAAKRVKLDGGDKKYSIGLDIGTNSVGWAVITDEYKVPSKKFKVLGNTDRHSIKKNLIGALLFDSGETAEATRLKRTARRRYTRRKNRICYLQEIFSNEMAKVDDSFFHRLEESFLVEEDKKHERHPIFGNIVDEVAYHEKYPTIYHLRKKLVDSTDKADLRLIYLALAHMIKFRGHFLIEGDLNPDNSDVDKLFIQLVQTYNQLFEENPINASGVDAKAILSARLSKSRRLENLIAQLPGEKKNGLFGNLIALSLGLTPNFKSNFDLAEDAKLQLSKDTYDDDLDNLLAQIGDQYADLFLAAKNLSDAILLSDILRVNTEITKAPLSASMIKRYDEHHQDLTLLKALVRQQLPEKYKEIFFDQSKNGYAGYIDGGASQEEFYKFIKPILEKMDGTEELLVKLNREDLLRKQRTFDNGSIPHQIHLGELHAILRRQEDFYPFLKDNREKIEKILTFRIPYYVGPLARGNSRFAWMTRKSEETITPWNFEEVVDKGASAQSFIERMTNFDKNLPNEKVLPKHSLLYEYFTVYNELTKVKYVTEGMRKPAFLSGEQKKAIVDLLFKTNRKVTVKQLKEDYFKKIECFDSVEISGVEDRFNASLGTYHDLLKIIKDKDFLDNEENEDILEDIVLTLTLFEDREMIEERLKTYAHLFDDKVMKQLKRRRYTGWGRLSRKLINGIRDKQSGKTILDFLKSDGFANRNFMQLIHDDSLTFKEDIQKAQVSGQGDSLHEHIANLAGSPAIKKGILQTVKVVDELVKVMGRHKPENIVIEMARENQTTQKGQKNSRERMKRIEEGIKELGSQILKEHPVENTQLQNEKLYLYYLQNGRDMYVDQELDINRLSDYDVDHIVPQSFLKDDSIDNKVLTRSDKARGKSDNVPSEEVVKKMKNYWRQLLNAKLITQRKFDNLTKAERGGLSELDKAGFIKRQLVETRQITKHVAQILDSRMNTKYDENDKLIREVKVITLKSKLVSDFRKDFQFYKVREINNYHHAHDAYLNAVVGTALIKKYPKLESEFVYGDYKVYDVRKMIAKSEQEIGKATAKYFFYSNIMNFFKTEITLANGEIRKRPLIETNGETGEIVWDKGRDFATVRKVLSMPQVNIVKKTEVQTGGFSKESILPKRNSDKLIARKKDWDPKKYGGFDSPTVAYSVLVVAKVEKGKSKKLKSVKELLGITIMERSSFEKNPIDFLEAKGYKEVKKDLIIKLPKYSLFELENGRKRMLASAGELQKGNELALPSKYVNFLYLASHYEKLKGSPEDNEQKQLFVEQHKHYLDEIIEQISEFSKRVILADANLDKVLSAYNKHRDKPIREQAENIIHLFTLTNLGAPAAFKYFDTTIDRKRYTSTKEVLDATLIHQSITGLYETRIDLSQLGGDGGPAPEAAAKGGVPWLMKKPLQLTVLVPLHEYQERLLQQTALPKEQKELLQKLFLKYDALWQHWENQVGHRRIKPHNIATGTLAPRPQKQYPINPKAKPSIQIVIDDLLKQGVLIQQNSTMNTPVYPVPKPDGKWRMVLDYREVNKTIPLIAAQNQHSAGILSSIYRGKYKTTLDLTNGFWAHPITPESYWLTAFTWQGKQYCWTRLPQGFLNSPALFTADVVDLLKEIPNVQAYVDDIYISHDDPQEHLEQLEKIFSILLNAGYVVSLKKSEIAQREVEFLGFNITKEGRGLTDTFKQKLLNITPPKDLKQLQSILGLLNFARNFIPNYSELVKPLYTIVANANGKFISWTEDNSNQLQHIISVLNQADNLEERNPETRLIIKVNSSPSAGYIRYYNEGSKRPIMYVNYIFSKAEAKFTQTEKLLTTMHKGLIKAMDLAMGQEILVYSPIVSMTKIQRTPLPERKALPVRWITWMTYLEDPRIQFHYDKSLPELQQIPNVTEDVIAKTKHPSEFAMVFYTDGSAIKHPDVNKSHSAGMGIAQVQFIPEYKIVHQWSIPLGDHTAQLAEIAAVEFACKKALKISGPVLIVTDSFYVAESANKELPYWKSNGFLNNKKKPLRHVSKWKSIAECLQLKPDIIIMHEKGHQQPMTTLHTEGNNLADKLATQGSYVVHAGKRTADGSEFEKRTADGSEFESPKKKAKVE

SEQ ID NO: 431 - protein, 2082 aa, synthetic construct
MPAAKRVKLDGGDKKYSIGLDIGTNSVGWAVITDEYKVPSKKFKVLGNTDRHSIKKNLIGALLFDSGETAEATRLKRTARRRYTRRKNRICYLQEIFSNEMAKVDDSFFHRLEESFLVEEDKKHERHPIFGNIVDEVAYHEKYPTIYHLRKKLVDSTDKADLRLIYLALAHMIKFRGHFLIEGDLNPDNSDVDKLFIQLVQTYNQLFEENPINASGVDAKAILSARLSKSRRLENLIAQLPGEKKNGLFGNLIALSLGLTPNFKSNFDLAEDAKLQLSKDTYDDDLDNLLAQIGDQYADLFLAAKNLSDAILLSDILRVNTEITKAPLSASMIKRYDEHHQDLTLLKALVRQQLPEKYKEIFFDQSKNGYAGYIDGGASQEEFYKFIKPILEKMDGTEELLVKLNREDLLRKQRTFDNGSIPHQIHLGELHAILRRQEDFYPFLKDNREKIEKILTFRIPYYVGPLARGNSRFAWMTRKSEETITPWNFEEVVDKGASAQSFIERMTNFDKNLPNEKVLPKHSLLYEYFTVYNELTKVKYVTEGMRKPAFLSGEQKKAIVDLLFKTNRKVTVKQLKEDYFKKIECFDSVEISGVEDRFNASLGTYHDLLKIIKDKDFLDNEENEDILEDIVLTLTLFEDREMIEERLKTYAHLFDDKVMKQLKRRRYTGWGRLSRKLINGIRDKQSGKTILDFLKSDGFANRNFMQLIHDDSLTFKEDIQKAQVSGQGDSLHEHIANLAGSPAIKKGILQTVKVVDELVKVMGRHKPENIVIEMARENQTTQKGQKNSRERMKRIEEGIKELGSQILKEHPVENTQLQNEKLYLYYLQNGRDMYVDQELDINRLSDYDVDHIVPQSFLKDDSIDNKVLTRSDKARGKSDNVPSEEVVKKMKNYWRQLLNAKLITQRKFDNLTKAERGGLSELDKAGFIKRQLVETRQITKHVAQILDSRMNTKYDENDKLIREVKVITLKSKLVSDFRKDFQFYKVREINNYHHAHDAYLNAVVGTALIKKYPKLESEFVYGDYKVYDVRKMIAKSEQEIGKATAKYFFYSNIMNFFKTEITLANGEIRKRPLIETNGETGEIVWDKGRDFATVRKVLSMPQVNIVKKTEVQTGGFSKESILPKRNSDKLIARKKDWDPKKYGGFDSPTVAYSVLVVAKVEKGKSKKLKSVKELLGITIMERSSFEKNPIDFLEAKGYKEVKKDLIIKLPKYSLFELENGRKRMLASAGELQKGNELALPSKYVNFLYLASHYEKLKGSPEDNEQKQLFVEQHKHYLDEIIEQISEFSKRVILADANLDKVLSAYNKHRDKPIREQAENIIHLFTLTNLGAPAAFKYFDTTIDRKRYTSTKEVLDATLIHQSITGLYETRIDLSQLGGDGGGGGGGGGGVPWLMKKPLQLTVLVPLHEYQERLLQQTALPKEQKELLQKLFLKYDALWQHWENQVGHRRIKPHNIATGTLAPRPQKQYPINPKAKPSIQIVIDDLLKQGVLIQQNSTMNTPVYPVPKPDGKWRMVLDYREVNKTIPLIAAQNQHSAGILSSIYRGKYKTTLDLTNGFWAHPITPESYWLTAFTWQGKQYCWTRLPQGFLNSPALFTADVVDLLKEIPNVQAYVDDIYISHDDPQEHLEQLEKIFSILLNAGYVVSLKKSEIAQREVEFLGFNITKEGRGLTDTFKQKLLNITPPKDLKQLQSILGLLNFARNFIPNYSELVKPLYTIVANANGKFISWTEDNSNQLQHIISVLNQADNLEERNPETRLIIKVNSSPSAGYIRYYNEGSKRPIMYVNYIFSKAEAKFTQTEKLLTTMHKGLIKAMDLAMGQEILVYSPIVSMTKIQRTPLPERKALPVRWITWMTYLEDPRIQFHYDKSLPELQQIPNVTEDVIAKTKHPSEFAMVFYTDGSAIKHPDVNKSHSAGMGIAQVQFIPEYKIVHQWSIPLGDHTAQLAEIAAVEFACKKALKISGPVLIVTDSFYVAESANKELPYWKSNGFLNNKKKPLRHVSKWKSIAECLQLKPDIIIMHEKGHQQPMTTLHTEGNNLADKLATQGSYVVHAGKRTADGSEFEKRTADGSEFESPKKKAKVE

SEQ ID NO: 432 - protein, 2087 aa, synthetic construct
MPAAKRVKLDGGDKKYSIGLDIGTNSVGWAVITDEYKVPSKKFKVLGNTDRHSIKKNLIGALLFDSGETAEATRLKRTARRRYTRRKNRICYLQEIFSNEMAKVDDSFFHRLEESFLVEEDKKHERHPIFGNIVDEVAYHEKYPTIYHLRKKLVDSTDKADLRLIYLALAHMIKFRGHFLIEGDLNPDNSDVDKLFIQLVQTYNQLFEENPINASGVDAKAILSARLSKSRRLENLIAQLPGEKKNGLFGNLIALSLGLTPNFKSNFDLAEDAKLQLSKDTYDDDLDNLLAQIGDQYADLFLAAKNLSDAILLSDILRVNTEITKAPLSASMIKRYDEHHQDLTLLKALVRQQLPEKYKEIFFDQSKNGYAGYIDGGASQEEFYKFIKPILEKMDGTEELLVKLNREDLLRKQRTFDNGSIPHQIHLGELHAILRRQEDFYPFLKDNREKIEKILTFRIPYYVGPLARGNSRFAWMTRKSEETITPWNFEEVVDKGASAQSFIERMTNFDKNLPNEKVLPKHSLLYEYFTVYNELTKVKYVTEGMRKPAFLSGEQKKAIVDLLFKTNRKVTVKQLKEDYFKKIECFDSVEISGVEDRFNASLGTYHDLLKIIKDKDFLDNEENEDILEDIVLTLTLFEDREMIEERLKTYAHLFDDKVMKQLKRRRYTGWGRLSRKLINGIRDKQSGKTILDFLKSDGFANRNFMQLIHDDSLTFKEDIQKAQVSGQGDSLHEHIANLAGSPAIKKGILQTVKVVDELVKVMGRHKPENIVIEMARENQTTQKGQKNSRERMKRIEEGIKELGSQILKEHPVENTQLQNEKLYLYYLQNGRDMYVDQELDINRLSDYDVDHIVPQSFLKDDSIDNKVLTRSDKARGKSDNVPSEEVVKKMKNYWRQLLNAKLITQRKFDNLTKAERGGLSELDKAGFIKRQLVETRQITKHVAQILDSRMNTKYDENDKLIREVKVITLKSKLVSDFRKDFQFYKVREINNYHHAHDAYLNAVVGTALIKKYPKLESEFVYGDYKVYDVRKMIAKSEQEIGKATAKYFFYSNIMNFFKTEITLANGEIRKRPLIETNGETGEIVWDKGRDFATVRKVLSMPQVNIVKKTEVQTGGFSKESILPKRNSDKLIARKKDWDPKKYGGFDSPTVAYSVLVVAKVEKGKSKKLKSVKELLGITIMERSSFEKNPIDFLEAKGYKEVKKDLIIKLPKYSLFELENGRKRMLASAGELQKGNELALPSKYVNFLYLASHYEKLKGSPEDNEQKQLFVEQHKHYLDEIIEQISEFSKRVILADANLDKVLSAYNKHRDKPIREQAENIIHLFTLTNLGAPAAFKYFDTTIDRKRYTSTKEVLDATLIHQSITGLYETRIDLSQLGGDGGGGSEAAAKPAPGGVPWLMKKPLQLTVLVPLHEYQERLLQQTALPKEQKELLQKLFLKYDALWQHWENQVGHRRIKPHNIATGTLAPRPQKQYPINPKAKPSIQIVIDDLLKQGVLIQQNSTMNTPVYPVPKPDGKWRMVLDYREVNKTIPLIAAQNQHSAGILSSIYRGKYKTTLDLTNGFWAHPITPESYWLTAFTWQGKQYCWTRLPQGFLNSPALFTADVVDLLKEIPNVQAYVDDIYISHDDPQEHLEQLEKIFSILLNAGYVVSLKKSEIAQREVEFLGFNITKEGRGLTDTFKQKLLNITPPKDLKQLQSILGLLNFARNFIPNYSELVKPLYTIVANANGKFISWTEDNSNQLQHIISVLNQADNLEERNPETRLIIKVNSSPSAGYIRYYNEGSKRPIMYVNYIFSKAEAKFTQTEKLLTTMHKGLIKAMDLAMGQEILVYSPIVSMTKIQRTPLPERKALPVRWITWMTYLEDPRIQFHYDKSLPELQQIPNVTEDVIAKTKHPSEFAMVFYTDGSAIKHPDVNKSHSAGMGIAQVQFIPEYKIVHQWSIPLGDHTAQLAEIAAVEFACKKALKISGPVLIVTDSFYVAESANKELPYWKSNGFLNNKKKPLRHVSKWKSIAECLQLKPDIIIMHEKGHQQPMTTLHTEGNNLADKLATQGSYVVHAGKRTADGSEFEKRTADGSEFESPKKKAKVE

SEQ ID NO: 433 - protein, 2087 aa, synthetic construct
MPAAKRVKLDGGDKKYSIGLDIGTNSVGWAVITDEYKVPSKKFKVLGNTDRHSIKKNLIGALLFDSGETAEATRLKRTARRRYTRRKNRICYLQEIFSNEMAKVDDSFFHRLEESFLVEEDKKHERHPIFGNIVDEVAYHEKYPTIYHLRKKLVDSTDKADLRLIYLALAHMIKFRGHFLIEGDLNPDNSDVDKLFIQLVQTYNQLFEENPINASGVDAKAILSARLSKSRRLENLIAQLPGEKKNGLFGNLIALSLGLTPNFKSNFDLAEDAKLQLSKDTYDDDLDNLLAQIGDQYADLFLAAKNLSDAILLSDILRVNTEITKAPLSASMIKRYDEHHQDLTLLKALVRQQLPEKYKEIFFDQSKNGYAGYIDGGASQEEFYKFIKPILEKMDGTEELLVKLNREDLLRKQRTFDNGSIPHQIHLGELHAILRRQEDFYPFLKDNREKIEKILTFRIPYYVGPLARGNSRFAWMTRKSEETITPWNFEEVVDKGASAQSFIERMTNFDKNLPNEKVLPKHSLLYEYFTVYNELTKVKYVTEGMRKPAFLSGEQKKAIVDLLFKTNRKVTVKQLKEDYFKKIECFDSVEISGVEDRFNASLGTYHDLLKIIKDKDFLDNEENEDILEDIVLTLTLFEDREMIEERLKTYAHLFDDKVMKQLKRRRYTGWGRLSRKLINGIRDKQSGKTILDFLKSDGFANRNFMQLIHDDSLTFKEDIQKAQVSGQGDSLHEHIANLAGSPAIKKGILQTVKVVDELVKVMGRHKPENIVIEMARENQTTQKGQKNSRERMKRIEEGIKELGSQILKEHPVENTQLQNEKLYLYYLQNGRDMYVDQELDINRLSDYDVDHIVPQSFLKDDSIDNKVLTRSDKARGKSDNVPSEEVVKKMKNYWRQLLNAKLITQRKFDNLTKAERGGLSELDKAGFIKRQLVETRQITKHVAQILDSRMNTKYDENDKLIREVKVITLKSKLVSDFRKDFQFYKVREINNYHHAHDAYLNAVVGTALIKKYPKLESEFVYGDYKVYDVRKMIAKSEQEIGKATAKYFFYSNIMNFFKTEITLANGEIRKRPLIETNGETGEIVWDKGRDFATVRKVLSMPQVNIVKKTEVQTGGFSKESILPKRNSDKLIARKKDWDPKKYGGFDSPTVAYSVLVVAKVEKGKSKKLKSVKELLGITIMERSSFEKNPIDFLEAKGYKEVKKDLIIKLPKYSLFELENGRKRMLASAGELQKGNELALPSKYVNFLYLASHYEKLKGSPEDNEQKQLFVEQHKHYLDEIIEQISEFSKRVILADANLDKVLSAYNKHRDKPIREQAENIIHLFTLTNLGAPAAFKYFDTTIDRKRYTSTKEVLDATLIHQSITGLYETRIDLSQLGGDGGGGGEAAAKGSSGGVPWLMKKPLQLTVLVPLHEYQERLLQQTALPKEQKELLQKLFLKYDALWQHWENQVGHRRIKPHNIATGTLAPRPQKQYPINPKAKPSIQIVIDDLLKQGVLIQQNSTMNTPVYPVPKPDGKWRMVLDYREVNKTIPLIAAQNQHSAGILSSIYRGKYKTTLDLTNGFWAHPITPESYWLTAFTWQGKQYCWTRLPQGFLNSPALFTADVVDLLKEIPNVQAYVDDIYISHDDPQEHLEQLEKIFSILLNAGYVVSLKKSEIAQREVEFLGFNITKEGRGLTDTFKQKLLNITPPKDLKQLQSILGLLNFARNFIPNYSELVKPLYTIVANANGKFISWTEDNSNQLQHIISVLNQADNLEERNPETRLIIKVNSSPSAGYIRYYNEGSKRPIMYVNYIFSKAEAKFTQTEKLLTTMHKGLIKAMDLAMGQEILVYSPIVSMTKIQRTPLPERKALPVRWITWMTYLEDPRIQFHYDKSLPELQQIPNVTEDVIAKTKHPSEFAMVFYTDGSAIKHPDVNKSHSAGMGIAQVQFIPEYKIVHQWSIPLGDHTAQLAEIAAVEFACKKALKISGPVLIVTDSFYVAESANKELPYWKSNGFLNNKKKPLRHVSKWKSIAECLQLKPDIIIMHEKGHQQPMTTLHTEGNNLADKLATQGSYVVHAGKRTADGSEFEKRTADGSEFESPKKKAKVE

SEQ ID NO: 434 - protein, 2082 aa, synthetic construct
MPAAKRVKLDGGDKKYSIGLDIGTNSVGWAVITDEYKVPSKKFKVLGNTDRHSIKKNLIGALLFDSGETAEATRLKRTARRRYTRRKNRICYLQEIFSNEMAKVDDSFFHRLEESFLVEEDKKHERHPIFGNIVDEVAYHEKYPTIYHLRKKLVDSTDKADLRLIYLALAHMIKFRGHFLIEGDLNPDNSDVDKLFIQLVQTYNQLFEENPINASGVDAKAILSARLSKSRRLENLIAQLPGEKKNGLFGNLIALSLGLTPNFKSNFDLAEDAKLQLSKDTYDDDLDNLLAQIGDQYADLFLAAKNLSDAILLSDILRVNTEITKAPLSASMIKRYDEHHQDLTLLKALVRQQLPEKYKEIFFDQSKNGYAGYIDGGASQEEFYKFIKPILEKMDGTEELLVKLNREDLLRKQRTFDNGSIPHQIHLGELHAILRRQEDFYPFLKDNREKIEKILTFRIPYYVGPLARGNSRFAWMTRKSEETITPWNFEEVVDKGASAQSFIERMTNFDKNLPNEKVLPKHSLLYEYFTVYNELTKVKYVTEGMRKPAFLSGEQKKAIVDLLFKTNRKVTVKQLKEDYFKKIECFDSVEISGVEDRFNASLGTYHDLLKIIKDKDFLDNEENEDILEDIVLTLTLFEDREMIEERLKTYAHLFDDKVMKQLKRRRYTGWGRLSRKLINGIRDKQSGKTILDFLKSDGFANRNFMQLIHDDSLTFKEDIQKAQVSGQGDSLHEHIANLAGSPAIKKGILQTVKVVDELVKVMGRHKPENIVIEMARENQTTQKGQKNSRERMKRIEEGIKELGSQILKEHPVENTQLQNEKLYLYYLQNGRDMYVDQELDINRLSDYDVDHIVPQSFLKDDSIDNKVLTRSDKARGKSDNVPSEEVVKKMKNYWRQLLNAKLITQRKFDNLTKAERGGLSELDKAGFIKRQLVETRQITKHVAQILDSRMNTKYDENDKLIREVKVITLKSKLVSDFRKDFQFYKVREINNYHHAHDAYLNAVVGTALIKKYPKLESEFVYGDYKVYDVRKMIAKSEQEIGKATAKYFFYSNIMNFFKTEITLANGEIRKRPLIETNGETGEIVWDKGRDFATVRKVLSMPQVNIVKKTEVQTGGFSKESILPKRNSDKLIARKKDWDPKKYGGFDSPTVAYSVLVVAKVEKGKSKKLKSVKELLGITIMERSSFEKNPIDFLEAKGYKEVKKDLIIKLPKYSLFELENGRKRMLASAGELQKGNELALPSKYVNFLYLASHYEKLKGSPEDNEQKQLFVEQHKHYLDEIIEQISEFSKRVILADANLDKVLSAYNKHRDKPIREQAENIIHLFTLTNLGAPAAFKYFDTTIDRKRYTSTKEVLDATLIHQSITGLYETRIDLSQLGGDGGGSSGSSGGVPWLMKKPLQLTVLVPLHEYQERLLQQTALPKEQKELLQKLFLKYDALWQHWENQVGHRRIKPHNIATGTLAPRPQKQYPINPKAKPSIQIVIDDLLKQGVLIQQNSTMNTPVYPVPKPDGKWRMVLDYREVNKTIPLIAAQNQHSAGILSSIYRGKYKTTLDLTNGFWAHPITPESYWLTAFTWQGKQYCWTRLPQGFLNSPALFTADVVDLLKEIPNVQAYVDDIYISHDDPQEHLEQLEKIFSILLNAGYVVSLKKSEIAQREVEFLGFNITKEGRGLTDTFKQKLLNITPPKDLKQLQSILGLLNFARNFIPNYSELVKPLYTIVANANGKFISWTEDNSNQLQHIISVLNQADNLEERNPETRLIIKVNSSPSAGYIRYYNEGSKRPIMYVNYIFSKAEAKFTQTEKLLTTMHKGLIKAMDLAMGQEILVYSPIVSMTKIQRTPLPERKALPVRWITWMTYLEDPRIQFHYDKSLPELQQIPNVTEDVIAKTKHPSEFAMVFYTDGSAIKHPDVNKSHSAGMGIAQVQFIPEYKIVHQWSIPLGDHTAQLAEIAAVEFACKKALKISGPVLIVTDSFYVAESANKELPYWKSNGFLNNKKKPLRHVSKWKSIAECLQLKPDIIIMHEKGHQQPMTTLHTEGNNLADKLATQGSYVVHAGKRTADGSEFEKRTADGSEFESPKKKAKVE

SEQ ID NO: 435 - protein, 2084 aa, synthetic construct
MPAAKRVKLDGGDKKYSIGLDIGTNSVGWAVITDEYKVPSKKFKVLGNTDRHSIKKNLIGALLFDSGETAEATRLKRTARRRYTRRKNRICYLQEIFSNEMAKVDDSFFHRLEESFLVEEDKKHERHPIFGNIVDEVAYHEKYPTIYHLRKKLVDSTDKADLRLIYLALAHMIKFRGHFLIEGDLNPDNSDVDKLFIQLVQTYNQLFEENPINASGVDAKAILSARLSKSRRLENLIAQLPGEKKNGLFGNLIALSLGLTPNFKSNFDLAEDAKLQLSKDTYDDDLDNLLAQIGDQYADLFLAAKNLSDAILLSDILRVNTEITKAPLSASMIKRYDEHHQDLTLLKALVRQQLPEKYKEIFFDQSKNGYAGYIDGGASQEEFYKFIKPILEKMDGTEELLVKLNREDLLRKQRTFDNGSIPHQIHLGELHAILRRQEDFYPFLKDNREKIEKILTFRIPYYVGPLARGNSRFAWMTRKSEETITPWNFEEVVDKGASAQSFIERMTNFDKNLPNEKVLPKHSLLYEYFTVYNELTKVKYVTEGMRKPAFLSGEQKKAIVDLLFKTNRKVTVKQLKEDYFKKIECFDSVEISGVEDRFNASLGTYHDLLKIIKDKDFLDNEENEDILEDIVLTLTLFEDREMIEERLKTYAHLFDDKVMKQLKRRRYTGWGRLSRKLINGIRDKQSGKTILDFLKSDGFANRNFMQLIHDDSLTFKEDIQKAQVSGQGDSLHEHIANLAGSPAIKKGILQTVKVVDELVKVMGRHKPENIVIEMARENQTTQKGQKNSRERMKRIEEGIKELGSQILKEHPVENTQLQNEKLYLYYLQNGRDMYVDQELDINRLSDYDVDHIVPQSFLKDDSIDNKVLTRSDKARGKSDNVPSEEVVKKMKNYWRQLLNAKLITQRKFDNLTKAERGGLSELDKAGFIKRQLVETRQITKHVAQILDSRMNTKYDENDKLIREVKVITLKSKLVSDFRKDFQFYKVREINNYHHAHDAYLNAVVGTALIKKYPKLESEFVYGDYKVYDVRKMIAKSEQEIGKATAKYFFYSNIMNFFKTEITLANGEIRKRPLIETNGETGEIVWDKGRDFATVRKVLSMPQVNIVKKTEVQTGGFSKESILPKRNSDKLIARKKDWDPKKYGGFDSPTVAYSVLVVAKVEKGKSKKLKSVKELLGITIMERSSFEKNPIDFLEAKGYKEVKKDLIIKLPKYSLFELENGRKRMLASAGELQKGNELALPSKYVNFLYLASHYEKLKGSPEDNEQKQLFVEQHKHYLDEIIEQISEFSKRVILADANLDKVLSAYNKHRDKPIREQAENIIHLFTLTNLGAPAAFKYFDTTIDRKRYTSTKEVLDATLIHQSITGLYETRIDLSQLGGDGGGGGEAAAKGGVPWLMKKPLQLTVLVPLHEYQERLLQQTALPKEQKELLQKLFLKYDALWQHWENQVGHRRIKPHNIATGTLAPRPQKQYPINPKAKPSIQIVIDDLLKQGVLIQQNSTMNTPVYPVPKPDGKWRMVLDYREVNKTIPLIAAQNQHSAGILSSIYRGKYKTTLDLTNGFWAHPITPESYWLTAFTWQGKQYCWTRLPQGFLNSPALFTADVVDLLKEIPNVQAYVDDIYISHDDPQEHLEQLEKIFSILLNAGYVVSLKKSEIAQREVEFLGFNITKEGRGLTDTFKQKLLNITPPKDLKQLQSILGLLNFARNFIPNYSELVKPLYTIVANANGKFISWTEDNSNQLQHIISVLNQADNLEERNPETRLIIKVNSSPSAGYIRYYNEGSKRPIMYVNYIFSKAEAKFTQTEKLLTTMHKGLIKAMDLAMGQEILVYSPIVSMTKIQRTPLPERKALPVRWITWMTYLEDPRIQFHYDKSLPELQQIPNVTEDVIAKTKHPSEFAMVFYTDGSAIKHPDVNKSHSAGMGIAQVQFIPEYKIVHQWSIPLGDHTAQLAEIAAVEFACKKALKISGPVLIVTDSFYVAESANKELPYWKSNGFLNNKKKPLRHVSKWKSIAECLQLKPDIIIMHEKGHQQPMTTLHTEGNNLADKLATQGSYVVHAGKRTADGSEFEKRTADGSEFESPKKKAKVE

SEQ ID NO: 436 - protein, 2087 aa, synthetic construct
MPAAKRVKLDGGDKKYSIGLDIGTNSVGWAVITDEYKVPSKKFKVLGNTDRHSIKKNLIGALLFDSGETAEATRLKRTARRRYTRRKNRICYLQEIFSNEMAKVDDSFFHRLEESFLVEEDKKHERHPIFGNIVDEVAYHEKYPTIYHLRKKLVDSTDKADLRLIYLALAHMIKFRGHFLIEGDLNPDNSDVDKLFIQLVQTYNQLFEENPINASGVDAKAILSARLSKSRRLENLIAQLPGEKKNGLFGNLIALSLGLTPNFKSNFDLAEDAKLQLSKDTYDDDLDNLLAQIGDQYADLFLAAKNLSDAILLSDILRVNTEITKAPLSASMIKRYDEHHQDLTLLKALVRQQLPEKYKEIFFDQSKNGYAGYIDGGASQEEFYKFIKPILEKMDGTEELLVKLNREDLLRKQRTFDNGSIPHQIHLGELHAILRRQEDFYPFLKDNREKIEKILTFRIPYYVGPLARGNSRFAWMTRKSEETITPWNFEEVVDKGASAQSFIERMTNFDKNLPNEKVLPKHSLLYEYFTVYNELTKVKYVTEGMRKPAFLSGEQKKAIVDLLFKTNRKVTVKQLKEDYFKKIECFDSVEISGVEDRFNASLGTYHDLLKIIKDKDFLDNEENEDILEDIVLTLTLFEDREMIEERLKTYAHLFDDKVMKQLKRRRYTGWGRLSRKLINGIRDKQSGKTILDFLKSDGFANRNFMQLIHDDSLTFKEDIQKAQVSGQGDSLHEHIANLAGSPAIKKGILQTVKVVDELVKVMGRHKPENIVIEMARENQTTQKGQKNSRERMKRIEEGIKELGSQILKEHPVENTQLQNEKLYLYYLQNGRDMYVDQELDINRLSDYDVDHIVPQSFLKDDSIDNKVLTRSDKARGKSDNVPSEEVVKKMKNYWRQLLNAKLITQRKFDNLTKAERGGLSELDKAGFIKRQLVETRQITKHVAQILDSRMNTKYDENDKLIREVKVITLKSKLVSDFRKDFQFYKVREINNYHHAHDAYLNAVVGTALIKKYPKLESEFVYGDYKVYDVRKMIAKSEQEIGKATAKYFFYSNIMNFFKTEITLANGEIRKRPLIETNGETGEIVWDKGRDFATVRKVLSMPQVNIVKKTEVQTGGFSKESILPKRNSDKLIARKKDWDPKKYGGFDSPTVAYSVLVVAKVEKGKSKKLKSVKELLGITIMERSSFEKNPIDFLEAKGYKEVKKDLIIKLPKYSLFELENGRKRMLASAGELQKGNELALPSKYVNFLYLASHYEKLKGSPEDNEQKQLFVEQHKHYLDEIIEQISEFSKRVILADANLDKVLSAYNKHRDKPIREQAENIIHLFTLTNLGAPAAFKYFDTTIDRKRYTSTKEVLDATLIHQSITGLYETRIDLSQLGGDGGPAPGGGEAAAKGGVPWLMKKPLQLTVLVPLHEYQERLLQQTALPKEQKELLQKLFLKYDALWQHWENQVGHRRIKPHNIATGTLAPRPQKQYPINPKAKPSIQIVIDDLLKQGVLIQQNSTMNTPVYPVPKPDGKWRMVLDYREVNKTIPLIAAQNQHSAGILSSIYRGKYKTTLDLTNGFWAHPITPESYWLTAFTWQGKQYCWTRLPQGFLNSPALFTADVVDLLKEIPNVQAYVDDIYISHDDPQEHLEQLEKIFSILLNAGYVVSLKKSEIAQREVEFLGFNITKEGRGLTDTFKQKLLNITPPKDLKQLQSILGLLNFARNFIPNYSELVKPLYTIVANANGKFISWTEDNSNQLQHIISVLNQADNLEERNPETRLIIKVNSSPSAGYIRYYNEGSKRPIMYVNYIFSKAEAKFTQTEKLLTTMHKGLIKAMDLAMGQEILVYSPIVSMTKIQRTPLPERKALPVRWITWMTYLEDPRIQFHYDKSLPELQQIPNVTEDVIAKTKHPSEFAMVFYTDGSAIKHPDVNKSHSAGMGIAQVQFIPEYKIVHQWSIPLGDHTAQLAEIAAVEFACKKALKISGPVLIVTDSFYVAESANKELPYWKSNGFLNNKKKPLRHVSKWKSIAECLQLKPDIIIMHEKGHQQPMTTLHTEGNNLADKLATQGSYVVHAGKRTADGSEFEKRTADGSEFESPKKKAKVE

SEQ ID NO: 437 - protein, 2094 aa, synthetic construct
MPAAKRVKLDGGDKKYSIGLDIGTNSVGWAVITDEYKVPSKKFKVLGNTDRHSIKKNLIGALLFDSGETAEATRLKRTARRRYTRRKNRICYLQEIFSNEMAKVDDSFFHRLEESFLVEEDKKHERHPIFGNIVDEVAYHEKYPTIYHLRKKLVDSTDKADLRLIYLALAHMIKFRGHFLIEGDLNPDNSDVDKLFIQLVQTYNQLFEENPINASGVDAKAILSARLSKSRRLENLIAQLPGEKKNGLFGNLIALSLGLTPNFKSNFDLAEDAKLQLSKDTYDDDLDNLLAQIGDQYADLFLAAKNLSDAILLSDILRVNTEITKAPLSASMIKRYDEHHQDLTLLKALVRQQLPEKYKEIFFDQSKNGYAGYIDGGASQEEFYKFIKPILEKMDGTEELLVKLNREDLLRKQRTFDNGSIPHQIHLGELHAILRRQEDFYPFLKDNREKIEKILTFRIPYYVGPLARGNSRFAWMTRKSEETITPWNFEEVVDKGASAQSFIERMTNFDKNLPNEKVLPKHSLLYEYFTVYNELTKVKYVTEGMRKPAFLSGEQKKAIVDLLFKTNRKVTVKQLKEDYFKKIECFDSVEISGVEDRFNASLGTYHDLLKIIKDKDFLDNEENEDILEDIVLTLTLFEDREMIEERLKTYAHLFDDKVMKQLKRRRYTGWGRLSRKLINGIRDKQSGKTILDFLKSDGFANRNFMQLIHDDSLTFKEDIQKAQVSGQGDSLHEHIANLAGSPAIKKGILQTVKVVDELVKVMGRHKPENIVIEMARENQTTQKGQKNSRERMKRIEEGIKELGSQILKEHPVENTQLQNEKLYLYYLQNGRDMYVDQELDINRLSDYDVDHIVPQSFLKDDSIDNKVLTRSDKARGKSDNVPSEEVVKKMKNYWRQLLNAKLITQRKFDNLTKAERGGLSELDKAGFIKRQLVETRQITKHVAQILDSRMNTKYDENDKLIREVKVITLKSKLVSDFRKDFQFYKVREINNYHHAHDAYLNAVVGTALIKKYPKLESEFVYGDYKVYDVRKMIAKSEQEIGKATAKYFFYSNIMNFFKTEITLANGEIRKRPLIETNGETGEIVWDKGRDFATVRKVLSMPQVNIVKKTEVQTGGFSKESILPKRNSDKLIARKKDWDPKKYGGFDSPTVAYSVLVVAKVEKGKSKKLKSVKELLGITIMERSSFEKNPIDFLEAKGYKEVKKDLIIKLPKYSLFELENGRKRMLASAGELQKGNELALPSKYVNFLYLASHYEKLKGSPEDNEQKQLFVEQHKHYLDEIIEQISEFSKRVILADANLDKVLSAYNKHRDKPIREQAENIIHLFTLTNLGAPAAFKYFDTTIDRKRYTSTKEVLDATLIHQSITGLYETRIDLSQLGGDGGGSSGSSGSSGSSGSSGSSGGVPWLMKKPLQLTVLVPLHEYQERLLQQTALPKEQKELLQKLFLKYDALWQHWENQVGHRRIKPHNIATGTLAPRPQKQYPINPKAKPSIQIVIDDLLKQGVLIQQNSTMNTPVYPVPKPDGKWRMVLDYREVNKTIPLIAAQNQHSAGILSSIYRGKYKTTLDLTNGFWAHPITPESYWLTAFTWQGKQYCWTRLPQGFLNSPALFNADVVDLLKEIPNVQAYVDDIYISHDDPQEHLEQLEKIFSILLNAGYVVSLKKSEIAQREVEFLGFNITKEGRGLTDTFKQKLLNITPPKDLKQLQSILGLLNFARNFIPNYSELVKPLYTIVAPANGKFISWTEDNSNQLQHIISVLNQADNLEERNPETRLIIKVNSSPSAGYIRYYNEGSKRPIMYVNYIFSKAEAKFTQTEKLLTTMHKGLIKAMDLAMGQEILVYSPIVSMTKIQRTPLPERKALPVRWITWMTYLEDPRIQFHYDKSLPELQQIPNVTEDVIAKTKHPSEFAMVFYTDGSAIKHPDVNKSHSAGMGIAQVQFIPEYKIVHQWSIPLGDHTAQLAEIAAVEFACKKALKISGPVLIVTDSFYVAESANKELPYWKSNGFLNNKKKPLRHVSKWKSIAECLQLKPDIIIMHEKGHQQPMTTLHTEGNNLADKLATQGSYVVHAGKRTADGSEFEKRTADGSEFESPKKKAKVE

SEQ ID NO: 438 - protein, 2087 aa, synthetic construct
MPAAKRVKLDGGDKKYSIGLDIGTNSVGWAVITDEYKVPSKKFKVLGNTDRHSIKKNLIGALLFDSGETAEATRLKRTARRRYTRRKNRICYLQEIFSNEMAKVDDSFFHRLEESFLVEEDKKHERHPIFGNIVDEVAYHEKYPTIYHLRKKLVDSTDKADLRLIYLALAHMIKFRGHFLIEGDLNPDNSDVDKLFIQLVQTYNQLFEENPINASGVDAKAILSARLSKSRRLENLIAQLPGEKKNGLFGNLIALSLGLTPNFKSNFDLAEDAKLQLSKDTYDDDLDNLLAQIGDQYADLFLAAKNLSDAILLSDILRVNTEITKAPLSASMIKRYDEHHQDLTLLKALVRQQLPEKYKEIFFDQSKNGYAGYIDGGASQEEFYKFIKPILEKMDGTEELLVKLNREDLLRKQRTFDNGSIPHQIHLGELHAILRRQEDFYPFLKDNREKIEKILTFRIPYYVGPLARGNSRFAWMTRKSEETITPWNFEEVVDKGASAQSFIERMTNFDKNLPNEKVLPKHSLLYEYFTVYNELTKVKYVTEGMRKPAFLSGEQKKAIVDLLFKTNRKVTVKQLKEDYFKKIECFDSVEISGVEDRFNASLGTYHDLLKIIKDKDFLDNEENEDILEDIVLTLTLFEDREMIEERLKTYAHLFDDKVMKQLKRRRYTGWGRLSRKLINGIRDKQSGKTILDFLKSDGFANRNFMQLIHDDSLTFKEDIQKAQVSGQGDSLHEHIANLAGSPAIKKGILQTVKVVDELVKVMGRHKPENIVIEMARENQTTQKGQKNSRERMKRIEEGIKELGSQILKEHPVENTQLQNEKLYLYYLQNGRDMYVDQELDINRLSDYDVDHIVPQSFLKDDSIDNKVLTRSDKARGKSDNVPSEEVVKKMKNYWRQLLNAKLITQRKFDNLTKAERGGLSELDKAGFIKRQLVETRQITKHVAQILDSRMNTKYDENDKLIREVKVITLKSKLVSDFRKDFQFYKVREINNYHHAHDAYLNAVVGTALIKKYPKLESEFVYGDYKVYDVRKMIAKSEQEIGKATAKYFFYSNIMNFFKTEITLANGEIRKRPLIETNGETGEIVWDKGRDFATVRKVLSMPQVNIVKKTEVQTGGFSKESILPKRNSDKLIARKKDWDPKKYGGFDSPTVAYSVLVVAKVEKGKSKKLKSVKELLGITIMERSSFEKNPIDFLEAKGYKEVKKDLIIKLPKYSLFELENGRKRMLASAGELQKGNELALPSKYVNFLYLASHYEKLKGSPEDNEQKQLFVEQHKHYLDEIIEQISEFSKRVILADANLDKVLSAYNKHRDKPIREQAENIIHLFTLTNLGAPAAFKYFDTTIDRKRYTSTKEVLDATLIHQSITGLYETRIDLSQLGGDGGGSSGGGEAAAKGGVPWLMKKPLQLTVLVPLHEYQERLLQQTALPKEQKELLQKLFLKYDALWQHWENQVGHRRIKPHNIATGTLAPRPQKQYPINPKAKPSIQIVIDDLLKQGVLIQQNSTMNTPVYPVPKPDGKWRMVLDYREVNKTIPLIAAQNQHSAGILSSIYRGKYKTTLDLTNGFWAHPITPESYWLTAFTWQGKQYCWTRLPQGFLNSPALFNADVVDLLKEIPNVQAYVDDIYISHDDPQEHLEQLEKIFSILLNAGYVVSLKKSEIAQREVEFLGFNITKEGRGLTDTFKQKLLNITPPKDLKQLQSILGLLNFARNFIPNYSELVKPLYTIVAPANGKFISWTEDNSNQLQHIISVLNQADNLEERNPETRLIIKVNSSPSAGYIRYYNEGSKRPIMYVNYIFSKAEAKFTQTEKLLTTMHKGLIKAMDLAMGQEILVYSPIVSMTKIQRTPLPERKALPVRWITWMTYLEDPRIQFHYDKSLPELQQIPNVTEDVIAKTKHPSEFAMVFYTDGSAIKHPDVNKSHSAGMGIAQVQFIPEYKIVHQWSIPLGDHTAQLAEIAAVEFACKKALKISGPVLIVTDSFYVAESANKELPYWKSNGFLNNKKKPLRHVSKWKSIAECLQLKPDIIIMHEKGHQQPMTTLHTEGNNLADKLATQGSYVVHAGKRTADGSEFEKRTADGSEFESPKKKAKVE

SEQ ID NO: 439 - protein, 2091 aa, synthetic construct
MPAAKRVKLDGGDKKYSIGLDIGTNSVGWAVITDEYKVPSKKFKVLGNTDRHSIKKNLIGALLFDSGETAEATRLKRTARRRYTRRKNRICYLQEIFSNEMAKVDDSFFHRLEESFLVEEDKKHERHPIFGNIVDEVAYHEKYPTIYHLRKKLVDSTDKADLRLIYLALAHMIKFRGHFLIEGDLNPDNSDVDKLFIQLVQTYNQLFEENPINASGVDAKAILSARLSKSRRLENLIAQLPGEKKNGLFGNLIALSLGLTPNFKSNFDLAEDAKLQLSKDTYDDDLDNLLAQIGDQYADLFLAAKNLSDAILLSDILRVNTEITKAPLSASMIKRYDEHHQDLTLLKALVRQQLPEKYKEIFFDQSKNGYAGYIDGGASQEEFYKFIKPILEKMDGTEELLVKLNREDLLRKQRTFDNGSIPHQIHLGELHAILRRQEDFYPFLKDNREKIEKILTFRIPYYVGPLARGNSRFAWMTRKSEETITPWNFEEVVDKGASAQSFIERMTNFDKNLPNEKVLPKHSLLYEYFTVYNELTKVKYVTEGMRKPAFLSGEQKKAIVDLLFKTNRKVTVKQLKEDYFKKIECFDSVEISGVEDRFNASLGTYHDLLKIIKDKDFLDNEENEDILEDIVLTLTLFEDREMIEERLKTYAHLFDDKVMKQLKRRRYTGWGRLSRKLINGIRDKQSGKTILDFLKSDGFANRNFMQLIHDDSLTFKEDIQKAQVSGQGDSLHEHIANLAGSPAIKKGILQTVKVVDELVKVMGRHKPENIVIEMARENQTTQKGQKNSRERMKRIEEGIKELGSQILKEHPVENTQLQNEKLYLYYLQNGRDMYVDQELDINRLSDYDVDHIVPQSFLKDDSIDNKVLTRSDKARGKSDNVPSEEVVKKMKNYWRQLLNAKLITQRKFDNLTKAERGGLSELDKAGFIKRQLVETRQITKHVAQILDSRMNTKYDENDKLIREVKVITLKSKLVSDFRKDFQFYKVREINNYHHAHDAYLNAVVGTALIKKYPKLESEFVYGDYKVYDVRKMIAKSEQEIGKATAKYFFYSNIMNFFKTEITLANGEIRKRPLIETNGETGEIVWDKGRDFATVRKVLSMPQVNIVKKTEVQTGGFSKESILPKRNSDKLIARKKDWDPKKYGGFDSPTVAYSVLVVAKVEKGKSKKLKSVKELLGITIMERSSFEKNPIDFLEAKGYKEVKKDLIIKLPKYSLFELENGRKRMLASAGELQKGNELALPSKYVNFLYLASHYEKLKGSPEDNEQKQLFVEQHKHYLDEIIEQISEFSKRVILADANLDKVLSAYNKHRDKPIREQAENIIHLFTLTNLGAPAAFKYFDTTIDRKRYTSTKEVLDATLIHQSITGLYETRIDLSQLGGDGGGGGGSEAAAKGGGGSGGVPWLMKKPLQLTVLVPLHEYQERLLQQTALPKEQKELLQKLFLKYDALWQHWENQVGHRRIKPHNIATGTLAPRPQKQYPINPKAKPSIQIVIDDLLKQGVLIQQNSTMNTPVYPVPKPDGKWRMVLDYREVNKTIPLIAAQNQHSAGILSSIYRGKYKTTLDLTNGFWAHPITPESYWLTAFTWQGKQYCWTRLPQGFLNSPALFNADVVDLLKEIPNVQAYVDDIYISHDDPQEHLEQLEKIFSILLNAGYVVSLKKSEIAQREVEFLGFNITKEGRGLTDTFKQKLLNITPPKDLKQLQSILGLLNFARNFIPNYSELVKPLYTIVAPANGKFISWTEDNSNQLQHIISVLNQADNLEERNPETRLIIKVNSSPSAGYIRYYNEGSKRPIMYVNYIFSKAEAKFTQTEKLLTTMHKGLIKAMDLAMGQEILVYSPIVSMTKIQRTPLPERKALPVRWITWMTYLEDPRIQFHYDKSLPELQQIPNVTEDVIAKTKHPSEFAMVFYTDGSAIKHPDVNKSHSAGMGIAQVQFIPEYKIVHQWSIPLGDHTAQLAEIAAVEFACKKALKISGPVLIVTDSFYVAESANKELPYWKSNGFLNNKKKPLRHVSKWKSIAECLQLKPDIIIMHEKGHQQPMTTLHTEGNNLADKLATQGSYVVHAGKRTADGSEFEKRTADGSEFESPKKKAKVE

SEQ ID NO: 440 - protein, 2085 aa, synthetic construct
MPAAKRVKLDGGDKKYSIGLDIGTNSVGWAVITDEYKVPSKKFKVLGNTDRHSIKKNLIGALLFDSGETAEATRLKRTARRRYTRRKNRICYLQEIFSNEMAKVDDSFFHRLEESFLVEEDKKHERHPIFGNIVDEVAYHEKYPTIYHLRKKLVDSTDKADLRLIYLALAHMIKFRGHFLIEGDLNPDNSDVDKLFIQLVQTYNQLFEENPINASGVDAKAILSARLSKSRRLENLIAQLPGEKKNGLFGNLIALSLGLTPNFKSNFDLAEDAKLQLSKDTYDDDLDNLLAQIGDQYADLFLAAKNLSDAILLSDILRVNTEITKAPLSASMIKRYDEHHQDLTLLKALVRQQLPEKYKEIFFDQSKNGYAGYIDGGASQEEFYKFIKPILEKMDGTEELLVKLNREDLLRKQRTFDNGSIPHQIHLGELHAILRRQEDFYPFLKDNREKIEKILTFRIPYYVGPLARGNSRFAWMTRKSEETITPWNFEEVVDKGASAQSFIERMTNFDKNLPNEKVLPKHSLLYEYFTVYNELTKVKYVTEGMRKPAFLSGEQKKAIVDLLFKTNRKVTVKQLKEDYFKKIECFDSVEISGVEDRFNASLGTYHDLLKIIKDKDFLDNEENEDILEDIVLTLTLFEDREMIEERLKTYAHLFDDKVMKQLKRRRYTGWGRLSRKLINGIRDKQSGKTILDFLKSDGFANRNFMQLIHDDSLTFKEDIQKAQVSGQGDSLHEHIANLAGSPAIKKGILQTVKVVDELVKVMGRHKPENIVIEMARENQTTQKGQKNSRERMKRIEEGIKELGSQILKEHPVENTQLQNEKLYLYYLQNGRDMYVDQELDINRLSDYDVDHIVPQSFLKDDSIDNKVLTRSDKARGKSDNVPSEEVVKKMKNYWRQLLNAKLITQRKFDNLTKAERGGLSELDKAGFIKRQLVETRQITKHVAQILDSRMNTKYDENDKLIREVKVITLKSKLVSDFRKDFQFYKVREINNYHHAHDAYLNAVVGTALIKKYPKLESEFVYGDYKVYDVRKMIAKSEQEIGKATAKYFFYSNIMNFFKTEITLANGEIRKRPLIETNGETGEIVWDKGRDFATVRKVLSMPQVNIVKKTEVQTGGFSKESILPKRNSDKLIARKKDWDPKKYGGFDSPTVAYSVLVVAKVEKGKSKKLKSVKELLGITIMERSSFEKNPIDFLEAKGYKEVKKDLIIKLPKYSLFELENGRKRMLASAGELQKGNELALPSKYVNFLYLASHYEKLKGSPEDNEQKQLFVEQHKHYLDEIIEQISEFSKRVILADANLDKVLSAYNKHRDKPIREQAENIIHLFTLTNLGAPAAFKYFDTTIDRKRYTSTKEVLDATLIHQSITGLYETRIDLSQLGGDGGPAPGSSGGSGGVPWLMKKPLQLTVLVPLHEYQERLLQQTALPKEQKELLQKLFLKYDALWQHWENQVGHRRIKPHNIATGTLAPRPQKQYPINPKAKPSIQIVIDDLLKQGVLIQQNSTMNTPVYPVPKPDGKWRMVLDYREVNKTIPLIAAQNQHSAGILSSIYRGKYKTTLDLTNGFWAHPITPESYWLTAFTWQGKQYCWTRLPQGFLNSPALFNADVVDLLKEIPNVQAYVDDIYISHDDPQEHLEQLEKIFSILLNAGYVVSLKKSEIAQREVEFLGFNITKEGRGLTDTFKQKLLNITPPKDLKQLQSILGLLNFARNFIPNYSELVKPLYTIVAPANGKFISWTEDNSNQLQHIISVLNQADNLEERNPETRLIIKVNSSPSAGYIRYYNEGSKRPIMYVNYIFSKAEAKFTQTEKLLTTMHKGLIKAMDLAMGQEILVYSPIVSMTKIQRTPLPERKALPVRWITWMTYLEDPRIQFHYDKSLPELQQIPNVTEDVIAKTKHPSEFAMVFYTDGSAIKHPDVNKSHSAGMGIAQVQFIPEYKIVHQWSIPLGDHTAQLAEIAAVEFACKKALKISGPVLIVTDSFYVAESANKELPYWKSNGFLNNKKKPLRHVSKWKSIAECLQLKPDIIIMHEKGHQQPMTTLHTEGNNLADKLATQGSYVVHAGKRTADGSEFEKRTADGSEFESPKKKAKVE

SEQ ID NO: 441 - protein, 2087 aa, synthetic construct
MPAAKRVKLDGGDKKYSIGLDIGTNSVGWAVITDEYKVPSKKFKVLGNTDRHSIKKNLIGALLFDSGETAEATRLKRTARRRYTRRKNRICYLQEIFSNEMAKVDDSFFHRLEESFLVEEDKKHERHPIFGNIVDEVAYHEKYPTIYHLRKKLVDSTDKADLRLIYLALAHMIKFRGHFLIEGDLNPDNSDVDKLFIQLVQTYNQLFEENPINASGVDAKAILSARLSKSRRLENLIAQLPGEKKNGLFGNLIALSLGLTPNFKSNFDLAEDAKLQLSKDTYDDDLDNLLAQIGDQYADLFLAAKNLSDAILLSDILRVNTEITKAPLSASMIKRYDEHHQDLTLLKALVRQQLPEKYKEIFFDQSKNGYAGYIDGGASQEEFYKFIKPILEKMDGTEELLVKLNREDLLRKQRTFDNGSIPHQIHLGELHAILRRQEDFYPFLKDNREKIEKILTFRIPYYVGPLARGNSRFAWMTRKSEETITPWNFEEVVDKGASAQSFIERMTNFDKNLPNEKVLPKHSLLYEYFTVYNELTKVKYVTEGMRKPAFLSGEQKKAIVDLLFKTNRKVTVKQLKEDYFKKIECFDSVEISGVEDRFNASLGTYHDLLKIIKDKDFLDNEENEDILEDIVLTLTLFEDREMIEERLKTYAHLFDDKVMKQLKRRRYTGWGRLSRKLINGIRDKQSGKTILDFLKSDGFANRNFMQLIHDDSLTFKEDIQKAQVSGQGDSLHEHIANLAGSPAIKKGILQTVKVVDELVKVMGRHKPENIVIEMARENQTTQKGQKNSRERMKRIEEGIKELGSQILKEHPVENTQLQNEKLYLYYLQNGRDMYVDQELDINRLSDYDVDHIVPQSFLKDDSIDNKVLTRSDKARGKSDNVPSEEVVKKMKNYWRQLLNAKLITQRKFDNLTKAERGGLSELDKAGFIKRQLVETRQITKHVAQILDSRMNTKYDENDKLIREVKVITLKSKLVSDFRKDFQFYKVREINNYHHAHDAYLNAVVGTALIKKYPKLESEFVYGDYKVYDVRKMIAKSEQEIGKATAKYFFYSNIMNFFKTEITLANGEIRKRPLIETNGETGEIVWDKGRDFATVRKVLSMPQVNIVKKTEVQTGGFSKESILPKRNSDKLIARKKDWDPKKYGGFDSPTVAYSVLVVAKVEKGKSKKLKSVKELLGITIMERSSFEKNPIDFLEAKGYKEVKKDLIIKLPKYSLFELENGRKRMLASAGELQKGNELALPSKYVNFLYLASHYEKLKGSPEDNEQKQLFVEQHKHYLDEIIEQISEFSKRVILADANLDKVLSAYNKHRDKPIREQAENIIHLFTLTNLGAPAAFKYFDTTIDRKRYTSTKEVLDATLIHQSITGLYETRIDLSQLGGDGGGGGEAAAKPAPGGVPWLMKKPLQLTVLVPLHEYQERLLQQTALPKEQKELLQKLFLKYDALWQHWENQVGHRRIKPHNIATGTLAPRPQKQYPINPKAKPSIQIVIDDLLKQGVLIQQNSTMNTPVYPVPKPDGKWRMVLDYREVNKTIPLIAAQNQHSAGILSSIYRGKYKTTLDLTNGFWAHPITPESYWLTAFTWQGKQYCWTRLPQGFLNSPALFNADVVDLLKEIPNVQAYVDDIYISHDDPQEHLEQLEKIFSILLNAGYVVSLKKSEIAQREVEFLGFNITKEGRGLTDTFKQKLLNITPPKDLKQLQSILGLLNFARNFIPNYSELVKPLYTIVAPANGKFISWTEDNSNQLQHIISVLNQADNLEERNPETRLIIKVNSSPSAGYIRYYNEGSKRPIMYVNYIFSKAEAKFTQTEKLLTTMHKGLIKAMDLAMGQEILVYSPIVSMTKIQRTPLPERKALPVRWITWMTYLEDPRIQFHYDKSLPELQQIPNVTEDVIAKTKHPSEFAMVFYTDGSAIKHPDVNKSHSAGMGIAQVQFIPEYKIVHQWSIPLGDHTAQLAEIAAVEFACKKALKISGPVLIVTDSFYVAESANKELPYWKSNGFLNNKKKPLRHVSKWKSIAECLQLKPDIIIMHEKGHQQPMTTLHTEGNNLADKLATQGSYVVHAGKRTADGSEFEKRTADGSEFESPKKKAKVE

SEQ ID NO: 442 - protein, 2087 aa, synthetic construct
MPAAKRVKLDGGDKKYSIGLDIGTNSVGWAVITDEYKVPSKKFKVLGNTDRHSIKKNLIGALLFDSGETAEATRLKRTARRRYTRRKNRICYLQEIFSNEMAKVDDSFFHRLEESFLVEEDKKHERHPIFGNIVDEVAYHEKYPTIYHLRKKLVDSTDKADLRLIYLALAHMIKFRGHFLIEGDLNPDNSDVDKLFIQLVQTYNQLFEENPINASGVDAKAILSARLSKSRRLENLIAQLPGEKKNGLFGNLIALSLGLTPNFKSNFDLAEDAKLQLSKDTYDDDLDNLLAQIGDQYADLFLAAKNLSDAILLSDILRVNTEITKAPLSASMIKRYDEHHQDLTLLKALVRQQLPEKYKEIFFDQSKNGYAGYIDGGASQEEFYKFIKPILEKMDGTEELLVKLNREDLLRKQRTFDNGSIPHQIHLGELHAILRRQEDFYPFLKDNREKIEKILTFRIPYYVGPLARGNSRFAWMTRKSEETITPWNFEEVVDKGASAQSFIERMTNFDKNLPNEKVLPKHSLLYEYFTVYNELTKVKYVTEGMRKPAFLSGEQKKAIVDLLFKTNRKVTVKQLKEDYFKKIECFDSVEISGVEDRFNASLGTYHDLLKIIKDKDFLDNEENEDILEDIVLTLTLFEDREMIEERLKTYAHLFDDKVMKQLKRRRYTGWGRLSRKLINGIRDKQSGKTILDFLKSDGFANRNFMQLIHDDSLTFKEDIQKAQVSGQGDSLHEHIANLAGSPAIKKGILQTVKVVDELVKVMGRHKPENIVIEMARENQTTQKGQKNSRERMKRIEEGIKELGSQILKEHPVENTQLQNEKLYLYYLQNGRDMYVDQELDINRLSDYDVDHIVPQSFLKDDSIDNKVLTRSDKARGKSDNVPSEEVVKKMKNYWRQLLNAKLITQRKFDNLTKAERGGLSELDKAGFIKRQLVETRQITKHVAQILDSRMNTKYDENDKLIREVKVITLKSKLVSDFRKDFQFYKVREINNYHHAHDAYLNAVVGTALIKKYPKLESEFVYGDYKVYDVRKMIAKSEQEIGKATAKYFFYSNIMNFFKTEITLANGEIRKRPLIETNGETGEIVWDKGRDFATVRKVLSMPQVNIVKKTEVQTGGFSKESILPKRNSDKLIARKKDWDPKKYGGFDSPTVAYSVLVVAKVEKGKSKKLKSVKELLGITIMERSSFEKNPIDFLEAKGYKEVKKDLIIKLPKYSLFELENGRKRMLASAGELQKGNELALPSKYVNFLYLASHYEKLKGSPEDNEQKQLFVEQHKHYLDEIIEQISEFSKRVILADANLDKVLSAYNKHRDKPIREQAENIIHLFTLTNLGAPAAFKYFDTTIDRKRYTSTKEVLDATLIHQSITGLYETRIDLSQLGGDGGGGSPAPEAAAKGGVPWLMKKPLQLTVLVPLHEYQERLLQQTALPKEQKELLQKLFLKYDALWQHWENQVGHRRIKPHNIATGTLAPRPQKQYPINPKAKPSIQIVIDDLLKQGVLIQQNSTMNTPVYPVPKPDGKWRMVLDYREVNKTIPLIAAQNQHSAGILSSIYRGKYKTTLDLTNGFWAHPITPESYWLTAFTWQGKQYCWTRLPQGFLNSPALFNADVVDLLKEIPNVQAYVDDIYISHDDPQEHLEQLEKIFSILLNAGYVVSLKKSEIAQREVEFLGFNITKEGRGLTDTFKQKLLNITPPKDLKQLQSILGLLNFARNFIPNYSELVKPLYTIVAPANGKFISWTEDNSNQLQHIISVLNQADNLEERNPETRLIIKVNSSPSAGYIRYYNEGSKRPIMYVNYIFSKAEAKFTQTEKLLTTMHKGLIKAMDLAMGQEILVYSPIVSMTKIQRTPLPERKALPVRWITWMTYLEDPRIQFHYDKSLPELQQIPNVTEDVIAKTKHPSEFAMVFYTDGSAIKHPDVNKSHSAGMGIAQVQFIPEYKIVHQWSIPLGDHTAQLAEIAAVEFACKKALKISGPVLIVTDSFYVAESANKELPYWKSNGFLNNKKKPLRHVSKWKSIAECLQLKPDIIIMHEKGHQQPMTTLHTEGNNLADKLATQGSYVVHAGKRTADGSEFEKRTADGSEFESPKKKAKVE

SEQ ID NO: 443 - protein, 2084 aa, synthetic construct
MPAAKRVKLDGGDKKYSIGLDIGTNSVGWAVITDEYKVPSKKFKVLGNTDRHSIKKNLIGALLFDSGETAEATRLKRTARRRYTRRKNRICYLQEIFSNEMAKVDDSFFHRLEESFLVEEDKKHERHPIFGNIVDEVAYHEKYPTIYHLRKKLVDSTDKADLRLIYLALAHMIKFRGHFLIEGDLNPDNSDVDKLFIQLVQTYNQLFEENPINASGVDAKAILSARLSKSRRLENLIAQLPGEKKNGLFGNLIALSLGLTPNFKSNFDLAEDAKLQLSKDTYDDDLDNLLAQIGDQYADLFLAAKNLSDAILLSDILRVNTEITKAPLSASMIKRYDEHHQDLTLLKALVRQQLPEKYKEIFFDQSKNGYAGYIDGGASQEEFYKFIKPILEKMDGTEELLVKLNREDLLRKQRTFDNGSIPHQIHLGELHAILRRQEDFYPFLKDNREKIEKILTFRIPYYVGPLARGNSRFAWMTRKSEETITPWNFEEVVDKGASAQSFIERMTNFDKNLPNEKVLPKHSLLYEYFTVYNELTKVKYVTEGMRKPAFLSGEQKKAIVDLLFKTNRKVTVKQLKEDYFKKIECFDSVEISGVEDRFNASLGTYHDLLKIIKDKDFLDNEENEDILEDIVLTLTLFEDREMIEERLKTYAHLFDDKVMKQLKRRRYTGWGRLSRKLINGIRDKQSGKTILDFLKSDGFANRNFMQLIHDDSLTFKEDIQKAQVSGQGDSLHEHIANLAGSPAIKKGILQTVKVVDELVKVMGRHKPENIVIEMARENQTTQKGQKNSRERMKRIEEGIKELGSQILKEHPVENTQLQNEKLYLYYLQNGRDMYVDQELDINRLSDYDVDHIVPQSFLKDDSIDNKVLTRSDKARGKSDNVPSEEVVKKMKNYWRQLLNAKLITQRKFDNLTKAERGGLSELDKAGFIKRQLVETRQITKHVAQILDSRMNTKYDENDKLIREVKVITLKSKLVSDFRKDFQFYKVREINNYHHAHDAYLNAVVGTALIKKYPKLESEFVYGDYKVYDVRKMIAKSEQEIGKATAKYFFYSNIMNFFKTEITLANGEIRKRPLIETNGETGEIVWDKGRDFATVRKVLSMPQVNIVKKTEVQTGGFSKESILPKRNSDKLIARKKDWDPKKYGGFDSPTVAYSVLVVAKVEKGKSKKLKSVKELLGITIMERSSFEKNPIDFLEAKGYKEVKKDLIIKLPKYSLFELENGRKRMLASAGELQKGNELALPSKYVNFLYLASHYEKLKGSPEDNEQKQLFVEQHKHYLDEIIEQISEFSKRVILADANLDKVLSAYNKHRDKPIREQAENIIHLFTLTNLGAPAAFKYFDTTIDRKRYTSTKEVLDATLIHQSITGLYETRIDLSQLGGDGGEAAAKGGGGGVPWLMKKPLQLTVLVPLHEYQERLLQQTALPKEQKELLQKLFLKYDALWQHWENQVGHRRIKPHNIATGTLAPRPQKQYPINPKAKPSIQIVIDDLLKQGVLIQQNSTMNTPVYPVPKPDGKWRMVLDYREVNKTIPLIAAQNQHSAGILSSIYRGKYKTTLDLTNGFWAHPITPESYWLTAFTWQGKQYCWTRLPQGFLNSPALFNADVVDLLKEIPNVQAYVDDIYISHDDPQEHLEQLEKIFSILLNAGYVVSLKKSEIAQREVEFLGFNITKEGRGLTDTFKQKLLNITPPKDLKQLQSILGLLNFARNFIPNYSELVKPLYTIVAPANGKFISWTEDNSNQLQHIISVLNQADNLEERNPETRLIIKVNSSPSAGYIRYYNEGSKRPIMYVNYIFSKAEAKFTQTEKLLTTMHKGLIKAMDLAMGQEILVYSPIVSMTKIQRTPLPERKALPVRWITWMTYLEDPRIQFHYDKSLPELQQIPNVTEDVIAKTKHPSEFAMVFYTDGSAIKHPDVNKSHSAGMGIAQVQFIPEYKIVHQWSIPLGDHTAQLAEIAAVEFACKKALKISGPVLIVTDSFYVAESANKELPYWKSNGFLNNKKKPLRHVSKWKSIAECLQLKPDIIIMHEKGHQQPMTTLHTEGNNLADKLATQGSYVVHAGKRTADGSEFEKRTADGSEFESPKKKAKVE

SEQ ID NO: 444 - protein, 2087 aa, synthetic construct
MPAAKRVKLDGGDKKYSIGLDIGTNSVGWAVITDEYKVPSKKFKVLGNTDRHSIKKNLIGALLFDSGETAEATRLKRTARRRYTRRKNRICYLQEIFSNEMAKVDDSFFHRLEESFLVEEDKKHERHPIFGNIVDEVAYHEKYPTIYHLRKKLVDSTDKADLRLIYLALAHMIKFRGHFLIEGDLNPDNSDVDKLFIQLVQTYNQLFEENPINASGVDAKAILSARLSKSRRLENLIAQLPGEKKNGLFGNLIALSLGLTPNFKSNFDLAEDAKLQLSKDTYDDDLDNLLAQIGDQYADLFLAAKNLSDAILLSDILRVNTEITKAPLSASMIKRYDEHHQDLTLLKALVRQQLPEKYKEIFFDQSKNGYAGYIDGGASQEEFYKFIKPILEKMDGTEELLVKLNREDLLRKQRTFDNGSIPHQIHLGELHAILRRQEDFYPFLKDNREKIEKILTFRIPYYVGPLARGNSRFAWMTRKSEETITPWNFEEVVDKGASAQSFIERMTNFDKNLPNEKVLPKHSLLYEYFTVYNELTKVKYVTEGMRKPAFLSGEQKKAIVDLLFKTNRKVTVKQLKEDYFKKIECFDSVEISGVEDRFNASLGTYHDLLKIIKDKDFLDNEENEDILEDIVLTLTLFEDREMIEERLKTYAHLFDDKVMKQLKRRRYTGWGRLSRKLINGIRDKQSGKTILDFLKSDGFANRNFMQLIHDDSLTFKEDIQKAQVSGQGDSLHEHIANLAGSPAIKKGILQTVKVVDELVKVMGRHKPENIVIEMARENQTTQKGQKNSRERMKRIEEGIKELGSQILKEHPVENTQLQNEKLYLYYLQNGRDMYVDQELDINRLSDYDVDHIVPQSFLKDDSIDNKVLTRSDKARGKSDNVPSEEVVKKMKNYWRQLLNAKLITQRKFDNLTKAERGGLSELDKAGFIKRQLVETRQITKHVAQILDSRMNTKYDENDKLIREVKVITLKSKLVSDFRKDFQFYKVREINNYHHAHDAYLNAVVGTALIKKYPKLESEFVYGDYKVYDVRKMIAKSEQEIGKATAKYFFYSNIMNFFKTEITLANGEIRKRPLIETNGETGEIVWDKGRDFATVRKVLSMPQVNIVKKTEVQTGGFSKESILPKRNSDKLIARKKDWDPKKYGGFDSPTVAYSVLVVAKVEKGKSKKLKSVKELLGITIMERSSFEKNPIDFLEAKGYKEVKKDLIIKLPKYSLFELENGRKRMLASAGELQKGNELALPSKYVNFLYLASHYEKLKGSPEDNEQKQLFVEQHKHYLDEIIEQISEFSKRVILADANLDKVLSAYNKHRDKPIREQAENIIHLFTLTNLGAPAAFKYFDTTIDRKRYTSTKEVLDATLIHQSITGLYETRIDLSQLGGDGGPAPGGSEAAAKGGVPWLMKKPLQLTVLVPLHEYQERLLQQTALPKEQKELLQKLFLKYDALWQHWENQVGHRRIKPHNIATGTLAPRPQKQYPINPKAKPSIQIVIDDLLKQGVLIQQNSTMNTPVYPVPKPDGKWRMVLDYREVNKTIPLIAAQNQHSAGILSSIYRGKYKTTLDLTNGFWAHPITPESYWLTAFTWQGKQYCWTRLPQGFLNSPALFNADVVDLLKEIPNVQAYVDDIYISHDDPQEHLEQLEKIFSILLNAGYVVSLKKSEIAQREVEFLGFNITKEGRGLTDTFKQKLLNITPPKDLKQLQSILGLLNFARNFIPNYSELVKPLYTIVAPANGKFISWTEDNSNQLQHIISVLNQADNLEERNPETRLIIKVNSSPSAGYIRYYNEGSKRPIMYVNYIFSKAEAKFTQTEKLLTTMHKGLIKAMDLAMGQEILVYSPIVSMTKIQRTPLPERKALPVRWITWMTYLEDPRIQFHYDKSLPELQQIPNVTEDVIAKTKHPSEFAMVFYTDGSAIKHPDVNKSHSAGMGIAQVQFIPEYKIVHQWSIPLGDHTAQLAEIAAVEFACKKALKISGPVLIVTDSFYVAESANKELPYWKSNGFLNNKKKPLRHVSKWKSIAECLQLKPDIIIMHEKGHQQPMTTLHTEGNNLADKLATQGSYVVHAGKRTADGSEFEKRTADGSEFESPKKKAKVE

SEQ ID NO: 445 - protein, 2091 aa, synthetic construct
MPAAKRVKLDGGDKKYSIGLDIGTNSVGWAVITDEYKVPSKKFKVLGNTDRHSIKKNLIGALLFDSGETAEATRLKRTARRRYTRRKNRICYLQEIFSNEMAKVDDSFFHRLEESFLVEEDKKHERHPIFGNIVDEVAYHEKYPTIYHLRKKLVDSTDKADLRLIYLALAHMIKFRGHFLIEGDLNPDNSDVDKLFIQLVQTYNQLFEENPINASGVDAKAILSARLSKSRRLENLIAQLPGEKKNGLFGNLIALSLGLTPNFKSNFDLAEDAKLQLSKDTYDDDLDNLLAQIGDQYADLFLAAKNLSDAILLSDILRVNTEITKAPLSASMIKRYDEHHQDLTLLKALVRQQLPEKYKEIFFDQSKNGYAGYIDGGASQEEFYKFIKPILEKMDGTEELLVKLNREDLLRKQRTFDNGSIPHQIHLGELHAILRRQEDFYPFLKDNREKIEKILTFRIPYYVGPLARGNSRFAWMTRKSEETITPWNFEEVVDKGASAQSFIERMTNFDKNLPNEKVLPKHSLLYEYFTVYNELTKVKYVTEGMRKPAFLSGEQKKAIVDLLFKTNRKVTVKQLKEDYFKKIECFDSVEISGVEDRFNASLGTYHDLLKIIKDKDFLDNEENEDILEDIVLTLTLFEDREMIEERLKTYAHLFDDKVMKQLKRRRYTGWGRLSRKLINGIRDKQSGKTILDFLKSDGFANRNFMQLIHDDSLTFKEDIQKAQVSGQGDSLHEHIANLAGSPAIKKGILQTVKVVDELVKVMGRHKPENIVIEMARENQTTQKGQKNSRERMKRIEEGIKELGSQILKEHPVENTQLQNEKLYLYYLQNGRDMYVDQELDINRLSDYDVDHIVPQSFLKDDSIDNKVLTRSDKARGKSDNVPSEEVVKKMKNYWRQLLNAKLITQRKFDNLTKAERGGLSELDKAGFIKRQLVETRQITKHVAQILDSRMNTKYDENDKLIREVKVITLKSKLVSDFRKDFQFYKVREINNYHHAHDAYLNAVVGTALIKKYPKLESEFVYGDYKVYDVRKMIAKSEQEIGKATAKYFFYSNIMNFFKTEITLANGEIRKRPLIETNGETGEIVWDKGRDFATVRKVLSMPQVNIVKKTEVQTGGFSKESILPKRNSDKLIARKKDWDPKKYGGFDSPTVAYSVLVVAKVEKGKSKKLKSVKELLGITIMERSSFEKNPIDFLEAKGYKEVKKDLIIKLPKYSLFELENGRKRMLASAGELQKGNELALPSKYVNFLYLASHYEKLKGSPEDNEQKQLFVEQHKHYLDEIIEQISEFSKRVILADANLDKVLSAYNKHRDKPIREQAENIIHLFTLTNLGAPAAFKYFDTTIDRKRYTSTKEVLDATLIHQSITGLYETRIDLSQLGGDGGGGGGSEAAAKGGGGSGGVPWLMKKPLQLTVLVPLHEYQERLLQQTALPKEQKELLQKLFLKYDALWQHWENQVGHRRIKPHNIATGTLAPRPQKQYPINPKAKPSIQIVIDDLLKQGVLIQQNSTMNTPVYPVPKPDGKWRMVLDYREVNKTIPLIAAQNQHSAGILSSIYRGKYKTTLDLTNGFWAHPITPESYWLTAFTWQGKQYCWTRLPQGFLNSPALFNADVVDLLKEIPNVQAYVDDIYISHDDPQEHLEQLEKIFSILLNAGYVVSLKKSEIAQREVEFLGFNITKEGRGLTDTFKQKLLNITPPKDLKQLQSILGKLNFARNFIPNYSELVKPLYTIVAPANGKFISWTEDNSNQLQHIISVLNQADNLEERNPETRLIIKVNSSPSAGYIRYYNEGSKRPIMYVNYIFSKAEAKFTQTEKLLTTMHKGLIKAMDLAMGQEILVYSPIVSMTKIQRTPLPERKALPVRWITWMTYLEDPRIQFHYDKSLPELQQIPNVTEDVIAKTKHPSEFAMVFYTDGSAIKHPDVNKSHSAGMGIAQVQFIPEYKIVHQWSIPLGDHTAQLAEIAAVEFACKKALKISGPVLIVTDSFYVAESANKELPYWKSNGFLNNKKKPLRHVSKWKSIAECLQLKPDIIIMHEKGHQQPMTTLHTEGNNLADKLATQGSYVVHAGKRTADGSEFEKRTADGSEFESPKKKAKVE

SEQ ID NO: 446 - protein, 2082 aa, synthetic construct
MPAAKRVKLDGGDKKYSIGLDIGTNSVGWAVITDEYKVPSKKFKVLGNTDRHSIKKNLIGALLFDSGETAEATRLKRTARRRYTRRKNRICYLQEIFSNEMAKVDDSFFHRLEESFLVEEDKKHERHPIFGNIVDEVAYHEKYPTIYHLRKKLVDSTDKADLRLIYLALAHMIKFRGHFLIEGDLNPDNSDVDKLFIQLVQTYNQLFEENPINASGVDAKAILSARLSKSRRLENLIAQLPGEKKNGLFGNLIALSLGLTPNFKSNFDLAEDAKLQLSKDTYDDDLDNLLAQIGDQYADLFLAAKNLSDAILLSDILRVNTEITKAPLSASMIKRYDEHHQDLTLLKALVRQQLPEKYKEIFFDQSKNGYAGYIDGGASQEEFYKFIKPILEKMDGTEELLVKLNREDLLRKQRTFDNGSIPHQIHLGELHAILRRQEDFYPFLKDNREKIEKILTFRIPYYVGPLARGNSRFAWMTRKSEETITPWNFEEVVDKGASAQSFIERMTNFDKNLPNEKVLPKHSLLYEYFTVYNELTKVKYVTEGMRKPAFLSGEQKKAIVDLLFKTNRKVTVKQLKEDYFKKIECFDSVEISGVEDRFNASLGTYHDLLKIIKDKDFLDNEENEDILEDIVLTLTLFEDREMIEERLKTYAHLFDDKVMKQLKRRRYTGWGRLSRKLINGIRDKQSGKTILDFLKSDGFANRNFMQLIHDDSLTFKEDIQKAQVSGQGDSLHEHIANLAGSPAIKKGILQTVKVVDELVKVMGRHKPENIVIEMARENQTTQKGQKNSRERMKRIEEGIKELGSQILKEHPVENTQLQNEKLYLYYLQNGRDMYVDQELDINRLSDYDVDHIVPQSFLKDDSIDNKVLTRSDKARGKSDNVPSEEVVKKMKNYWRQLLNAKLITQRKFDNLTKAERGGLSELDKAGFIKRQLVETRQITKHVAQILDSRMNTKYDENDKLIREVKVITLKSKLVSDFRKDFQFYKVREINNYHHAHDAYLNAVVGTALIKKYPKLESEFVYGDYKVYDVRKMIAKSEQEIGKATAKYFFYSNIMNFFKTEITLANGEIRKRPLIETNGETGEIVWDKGRDFATVRKVLSMPQVNIVKKTEVQTGGFSKESILPKRNSDKLIARKKDWDPKKYGGFDSPTVAYSVLVVAKVEKGKSKKLKSVKELLGITIMERSSFEKNPIDFLEAKGYKEVKKDLIIKLPKYSLFELENGRKRMLASAGELQKGNELALPSKYVNFLYLASHYEKLKGSPEDNEQKQLFVEQHKHYLDEIIEQISEFSKRVILADANLDKVLSAYNKHRDKPIREQAENIIHLFTLTNLGAPAAFKYFDTTIDRKRYTSTKEVLDATLIHQSITGLYETRIDLSQLGGDGGGGGGSSGGVPWLMKKPLQLTVLVPLHEYQERLLQQTALPKEQKELLQKLFLKYDALWQHWENQVGHRRIKPHNIATGTLAPRPQKQYPINPKAKPSIQIVIDDLLKQGVLIQQNSTMNTPVYPVPKPDGKWRMVLDYREVNKTIPLIAAQNQHSAGILSSIYRGKYKTTLDLTNGFWAHPITPESYWLTAFTWQGKQYCWTRLPQGFLNSPALFNADVVDLLKEIPNVQAYVDDIYISHDDPQEHLEQLEKIFSILLNAGYVVSLKKSEIAQREVEFLGFNITKEGRGLTDTFKQKLLNITPPKDLKQLQSILGKLNFARNFIPNYSELVKPLYTIVAPANGKFISWTEDNSNQLQHIISVLNQADNLEERNPETRLIIKVNSSPSAGYIRYYNEGSKRPIMYVNYIFSKAEAKFTQTEKLLTTMHKGLIKAMDLAMGQEILVYSPIVSMTKIQRTPLPERKALPVRWITWMTYLEDPRIQFHYDKSLPELQQIPNVTEDVIAKTKHPSEFAMVFYTDGSAIKHPDVNKSHSAGMGIAQVQFIPEYKIVHQWSIPLGDHTAQLAEIAAVEFACKKALKISGPVLIVTDSFYVAESANKELPYWKSNGFLNNKKKPLRHVSKWKSIAECLQLKPDIIIMHEKGHQQPMTTLHTEGNNLADKLATQGSYVVHAGKRTADGSEFEKRTADGSEFESPKKKAKVE

SEQ ID NO: 447 - protein, 2101 aa, synthetic construct
MPAAKRVKLDGGDKKYSIGLDIGTNSVGWAVITDEYKVPSKKFKVLGNTDRHSIKKNLIGALLFDSGETAEATRLKRTARRRYTRRKNRICYLQEIFSNEMAKVDDSFFHRLEESFLVEEDKKHERHPIFGNIVDEVAYHEKYPTIYHLRKKLVDSTDKADLRLIYLALAHMIKFRGHFLIEGDLNPDNSDVDKLFIQLVQTYNQLFEENPINASGVDAKAILSARLSKSRRLENLIAQLPGEKKNGLFGNLIALSLGLTPNFKSNFDLAEDAKLQLSKDTYDDDLDNLLAQIGDQYADLFLAAKNLSDAILLSDILRVNTEITKAPLSASMIKRYDEHHQDLTLLKALVRQQLPEKYKEIFFDQSKNGYAGYIDGGASQEEFYKFIKPILEKMDGTEELLVKLNREDLLRKQRTFDNGSIPHQIHLGELHAILRRQEDFYPFLKDNREKIEKILTFRIPYYVGPLARGNSRFAWMTRKSEETITPWNFEEVVDKGASAQSFIERMTNFDKNLPNEKVLPKHSLLYEYFTVYNELTKVKYVTEGMRKPAFLSGEQKKAIVDLLFKTNRKVTVKQLKEDYFKKIECFDSVEISGVEDRFNASLGTYHDLLKIIKDKDFLDNEENEDILEDIVLTLTLFEDREMIEERLKTYAHLFDDKVMKQLKRRRYTGWGRLSRKLINGIRDKQSGKTILDFLKSDGFANRNFMQLIHDDSLTFKEDIQKAQVSGQGDSLHEHIANLAGSPAIKKGILQTVKVVDELVKVMGRHKPENIVIEMARENQTTQKGQKNSRERMKRIEEGIKELGSQILKEHPVENTQLQNEKLYLYYLQNGRDMYVDQELDINRLSDYDVDHIVPQSFLKDDSIDNKVLTRSDKARGKSDNVPSEEVVKKMKNYWRQLLNAKLITQRKFDNLTKAERGGLSELDKAGFIKRQLVETRQITKHVAQILDSRMNTKYDENDKLIREVKVITLKSKLVSDFRKDFQFYKVREINNYHHAHDAYLNAVVGTALIKKYPKLESEFVYGDYKVYDVRKMIAKSEQEIGKATAKYFFYSNIMNFFKTEITLANGEIRKRPLIETNGETGEIVWDKGRDFATVRKVLSMPQVNIVKKTEVQTGGFSKESILPKRNSDKLIARKKDWDPKKYGGFDSPTVAYSVLVVAKVEKGKSKKLKSVKELLGITIMERSSFEKNPIDFLEAKGYKEVKKDLIIKLPKYSLFELENGRKRMLASAGELQKGNELALPSKYVNFLYLASHYEKLKGSPEDNEQKQLFVEQHKHYLDEIIEQISEFSKRVILADANLDKVLSAYNKHRDKPIREQAENIIHLFTLTNLGAPAAFKYFDTTIDRKRYTSTKEVLDATLIHQSITGLYETRIDLSQLGGDGGEAAAKEAAAKEAAAKEAAAKEAAAKGGVPWLMKKPLQLTVLVPLHEYQERLLQQTALPKEQKELLQKLFLKYDALWQHWENQVGHRRIKPHNIATGTLAPRPQKQYPINPKAKPSIQIVIDDLLKQGVLIQQNSTMNTPVYPVPKPDGKWRMVLDYREVNKTIPLIAAQNQHSAGILSSIYRGKYKTTLDLTNGFWAHPITPESYWLTAFTWQGKQYCWTRLPQGFLNSPALFNADVVDLLKEIPNVQAYVDDIYISHDDPQEHLEQLEKIFSILLNAGYVVSLKKSEIAQREVEFLGFNITKEGRGLTDTFKQKLLNITPPKDLKQLQSILGKLNFARNFIPNYSELVKPLYTIVAPANGKFISWTEDNSNQLQHIISVLNQADNLEERNPETRLIIKVNSSPSAGYIRYYNEGSKRPIMYVNYIFSKAEAKFTQTEKLLTTMHKGLIKAMDLAMGQEILVYSPIVSMTKIQRTPLPERKALPVRWITWMTYLEDPRIQFHYDKSLPELQQIPNVTEDVIAKTKHPSEFAMVFYTDGSAIKHPDVNKSHSAGMGIAQVQFIPEYKIVHQWSIPLGDHTAQLAEIAAVEFACKKALKISGPVLIVTDSFYVAESANKELPYWKSNGFLNNKKKPLRHVSKWKSIAECLQLKPDIIIMHEKGHQQPMTTLHTEGNNLADKLATQGSYVVHAGKRTADGSEFEKRTADGSEFESPKKKAKVE

SEQ ID NO: 448 - protein, 2085 aa, synthetic construct
MPAAKRVKLDGGDKKYSIGLDIGTNSVGWAVITDEYKVPSKKFKVLGNTDRHSIKKNLIGALLFDSGETAEATRLKRTARRRYTRRKNRICYLQEIFSNEMAKVDDSFFHRLEESFLVEEDKKHERHPIFGNIVDEVAYHEKYPTIYHLRKKLVDSTDKADLRLIYLALAHMIKFRGHFLIEGDLNPDNSDVDKLFIQLVQTYNQLFEENPINASGVDAKAILSARLSKSRRLENLIAQLPGEKKNGLFGNLIALSLGLTPNFKSNFDLAEDAKLQLSKDTYDDDLDNLLAQIGDQYADLFLAAKNLSDAILLSDILRVNTEITKAPLSASMIKRYDEHHQDLTLLKALVRQQLPEKYKEIFFDQSKNGYAGYIDGGASQEEFYKFIKPILEKMDGTEELLVKLNREDLLRKQRTFDNGSIPHQIHLGELHAILRRQEDFYPFLKDNREKIEKILTFRIPYYVGPLARGNSRFAWMTRKSEETITPWNFEEVVDKGASAQSFIERMTNFDKNLPNEKVLPKHSLLYEYFTVYNELTKVKYVTEGMRKPAFLSGEQKKAIVDLLFKTNRKVTVKQLKEDYFKKIECFDSVEISGVEDRFNASLGTYHDLLKIIKDKDFLDNEENEDILEDIVLTLTLFEDREMIEERLKTYAHLFDDKVMKQLKRRRYTGWGRLSRKLINGIRDKQSGKTILDFLKSDGFANRNFMQLIHDDSLTFKEDIQKAQVSGQGDSLHEHIANLAGSPAIKKGILQTVKVVDELVKVMGRHKPENIVIEMARENQTTQKGQKNSRERMKRIEEGIKELGSQILKEHPVENTQLQNEKLYLYYLQNGRDMYVDQELDINRLSDYDVDHIVPQSFLKDDSIDNKVLTRSDKARGKSDNVPSEEVVKKMKNYWRQLLNAKLITQRKFDNLTKAERGGLSELDKAGFIKRQLVETRQITKHVAQILDSRMNTKYDENDKLIREVKVITLKSKLVSDFRKDFQFYKVREINNYHHAHDAYLNAVVGTALIKKYPKLESEFVYGDYKVYDVRKMIAKSEQEIGKATAKYFFYSNIMNFFKTEITLANGEIRKRPLIETNGETGEIVWDKGRDFATVRKVLSMPQVNIVKKTEVQTGGFSKESILPKRNSDKLIARKKDWDPKKYGGFDSPTVAYSVLVVAKVEKGKSKKLKSVKELLGITIMERSSFEKNPIDFLEAKGYKEVKKDLIIKLPKYSLFELENGRKRMLASAGELQKGNELALPSKYVNFLYLASHYEKLKGSPEDNEQKQLFVEQHKHYLDEIIEQISEFSKRVILADANLDKVLSAYNKHRDKPIREQAENIIHLFTLTNLGAPAAFKYFDTTIDRKRYTSTKEVLDATLIHQSITGLYETRIDLSQLGGDGGGGGPAPGGSGGVPWLMKKPLQLTVLVPLHEYQERLLQQTALPKEQKELLQKLFLKYDALWQHWENQVGHRRIKPHNIATGTLAPRPQKQYPINPKAKPSIQIVIDDLLKQGVLIQQNSTMNTPVYPVPKPDGKWRMVLDYREVNKTIPLIAAQNQHSAGILSSIYRGKYKTTLDLTNGFWAHPITPESYWLTAFTWQGKQYCWTRLPQGFLNSPALFNADVVDLLKEIPNVQAYVDDIYISHDDPQEHLEQLEKIFSILLNAGYVVSLKKSEIAQREVEFLGFNITKEGRGLTDTFKQKLLNITPPKDLKQLQSILGKLNFARNFIPNYSELVKPLYTIVAPANGKFISWTEDNSNQLQHIISVLNQADNLEERNPETRLIIKVNSSPSAGYIRYYNEGSKRPIMYVNYIFSKAEAKFTQTEKLLTTMHKGLIKAMDLAMGQEILVYSPIVSMTKIQRTPLPERKALPVRWITWMTYLEDPRIQFHYDKSLPELQQIPNVTEDVIAKTKHPSEFAMVFYTDGSAIKHPDVNKSHSAGMGIAQVQFIPEYKIVHQWSIPLGDHTAQLAEIAAVEFACKKALKISGPVLIVTDSFYVAESANKELPYWKSNGFLNNKKKPLRHVSKWKSIAECLQLKPDIIIMHEKGHQQPMTTLHTEGNNLADKLATQGSYVVHAGKRTADGSEFEKRTADGSEFESPKKKAKVE

SEQ ID NO: 449 - protein, 2088 aa, synthetic construct
MPAAKRVKLDGGDKKYSIGLDIGTNSVGWAVITDEYKVPSKKFKVLGNTDRHSIKKNLIGALLFDSGETAEATRLKRTARRRYTRRKNRICYLQEIFSNEMAKVDDSFFHRLEESFLVEEDKKHERHPIFGNIVDEVAYHEKYPTIYHLRKKLVDSTDKADLRLIYLALAHMIKFRGHFLIEGDLNPDNSDVDKLFIQLVQTYNQLFEENPINASGVDAKAILSARLSKSRRLENLIAQLPGEKKNGLFGNLIALSLGLTPNFKSNFDLAEDAKLQLSKDTYDDDLDNLLAQIGDQYADLFLAAKNLSDAILLSDILRVNTEITKAPLSASMIKRYDEHHQDLTLLKALVRQQLPEKYKEIFFDQSKNGYAGYIDGGASQEEFYKFIKPILEKMDGTEELLVKLNREDLLRKQRTFDNGSIPHQIHLGELHAILRRQEDFYPFLKDNREKIEKILTFRIPYYVGPLARGNSRFAWMTRKSEETITPWNFEEVVDKGASAQSFIERMTNFDKNLPNEKVLPKHSLLYEYFTVYNELTKVKYVTEGMRKPAFLSGEQKKAIVDLLFKTNRKVTVKQLKEDYFKKIECFDSVEISGVEDRFNASLGTYHDLLKIIKDKDFLDNEENEDILEDIVLTLTLFEDREMIEERLKTYAHLFDDKVMKQLKRRRYTGWGRLSRKLINGIRDKQSGKTILDFLKSDGFANRNFMQLIHDDSLTFKEDIQKAQVSGQGDSLHEHIANLAGSPAIKKGILQTVKVVDELVKVMGRHKPENIVIEMARENQTTQKGQKNSRERMKRIEEGIKELGSQILKEHPVENTQLQNEKLYLYYLQNGRDMYVDQELDINRLSDYDVDHIVPQSFLKDDSIDNKVLTRSDKARGKSDNVPSEEVVKKMKNYWRQLLNAKLITQRKFDNLTKAERGGLSELDKAGFIKRQLVETRQITKHVAQILDSRMNTKYDENDKLIREVKVITLKSKLVSDFRKDFQFYKVREINNYHHAHDAYLNAVVGTALIKKYPKLESEFVYGDYKVYDVRKMIAKSEQEIGKATAKYFFYSNIMNFFKTEITLANGEIRKRPLIETNGETGEIVWDKGRDFATVRKVLSMPQVNIVKKTEVQTGGFSKESILPKRNSDKLIARKKDWDPKKYGGFDSPTVAYSVLVVAKVEKGKSKKLKSVKELLGITIMERSSFEKNPIDFLEAKGYKEVKKDLIIKLPKYSLFELENGRKRMLASAGELQKGNELALPSKYVNFLYLASHYEKLKGSPEDNEQKQLFVEQHKHYLDEIIEQISEFSKRVILADANLDKVLSAYNKHRDKPIREQAENIIHLFTLTNLGAPAAFKYFDTTIDRKRYTSTKEVLDATLIHQSITGLYETRIDLSQLGGDGGGSSGSSGSSGSSGGVPWLMKKPLQLTVLVPLHEYQERLLQQTALPKEQKELLQKLFLKYDALWQHWENQVGHRRIKPHNIATGTLAPRPQKQYPINPKAKPSIQIVIDDLLKQGVLIQQNSTMNTPVYPVPKPDGKWRMVLDYREVNKTIPLIAAQNQHSAGILSSIYRGKYKTTLDLTNGFWAHPITPESYWLTAFTWQGKQYCWTRLPQGFLNSPALFNADVVDLLKEIPNVQAYVDDIYISHDDPQEHLEQLEKIFSILLNAGYVVSLKKSEIAQREVEFLGFNITKEGRGLTDTFKQKLLNITPPKDLKQLQSILGKLNFARNFIPNYSELVKPLYTIVAPANGKFISWTEDNSNQLQHIISVLNQADNLEERNPETRLIIKVNSSPSAGYIRYYNEGSKRPIMYVNYIFSKAEAKFTQTEKLLTTMHKGLIKAMDLAMGQEILVYSPIVSMTKIQRTPLPERKALPVRWITWMTYLEDPRIQFHYDKSLPELQQIPNVTEDVIAKTKHPSEFAMVFYTDGSAIKHPDVNKSHSAGMGIAQVQFIPEYKIVHQWSIPLGDHTAQLAEIAAVEFACKKALKISGPVLIVTDSFYVAESANKELPYWKSNGFLNNKKKPLRHVSKWKSIAECLQLKPDIIIMHEKGHQQPMTTLHTEGNNLADKLATQGSYVVHAGKRTADGSEFEKRTADGSEFESPKKKAKVE

SEQ ID NO: 450 - protein, 2094 aa, synthetic construct
MPAAKRVKLDGGDKKYSIGLDIGTNSVGWAVITDEYKVPSKKFKVLGNTDRHSIKKNLIGALLFDSGETAEATRLKRTARRRYTRRKNRICYLQEIFSNEMAKVDDSFFHRLEESFLVEEDKKHERHPIFGNIVDEVAYHEKYPTIYHLRKKLVDSTDKADLRLIYLALAHMIKFRGHFLIEGDLNPDNSDVDKLFIQLVQTYNQLFEENPINASGVDAKAILSARLSKSRRLENLIAQLPGEKKNGLFGNLIALSLGLTPNFKSNFDLAEDAKLQLSKDTYDDDLDNLLAQIGDQYADLFLAAKNLSDAILLSDILRVNTEITKAPLSASMIKRYDEHHQDLTLLKALVRQQLPEKYKEIFFDQSKNGYAGYIDGGASQEEFYKFIKPILEKMDGTEELLVKLNREDLLRKQRTFDNGSIPHQIHLGELHAILRRQEDFYPFLKDNREKIEKILTFRIPYYVGPLARGNSRFAWMTRKSEETITPWNFEEVVDKGASAQSFIERMTNFDKNLPNEKVLPKHSLLYEYFTVYNELTKVKYVTEGMRKPAFLSGEQKKAIVDLLFKTNRKVTVKQLKEDYFKKIECFDSVEISGVEDRFNASLGTYHDLLKIIKDKDFLDNEENEDILEDIVLTLTLFEDREMIEERLKTYAHLFDDKVMKQLKRRRYTGWGRLSRKLINGIRDKQSGKTILDFLKSDGFANRNFMQLIHDDSLTFKEDIQKAQVSGQGDSLHEHIANLAGSPAIKKGILQTVKVVDELVKVMGRHKPENIVIEMARENQTTQKGQKNSRERMKRIEEGIKELGSQILKEHPVENTQLQNEKLYLYYLQNGRDMYVDQELDINRLSDYDVDHIVPQSFLKDDSIDNKVLTRSDKARGKSDNVPSEEVVKKMKNYWRQLLNAKLITQRKFDNLTKAERGGLSELDKAGFIKRQLVETRQITKHVAQILDSRMNTKYDENDKLIREVKVITLKSKLVSDFRKDFQFYKVREINNYHHAHDAYLNAVVGTALIKKYPKLESEFVYGDYKVYDVRKMIAKSEQEIGKATAKYFFYSNIMNFFKTEITLANGEIRKRPLIETNGETGEIVWDKGRDFATVRKVLSMPQVNIVKKTEVQTGGFSKESILPKRNSDKLIARKKDWDPKKYGGFDSPTVAYSVLVVAKVEKGKSKKLKSVKELLGITIMERSSFEKNPIDFLEAKGYKEVKKDLIIKLPKYSLFELENGRKRMLASAGELQKGNELALPSKYVNFLYLASHYEKLKGSPEDNEQKQLFVEQHKHYLDEIIEQISEFSKRVILADANLDKVLSAYNKHRDKPIREQAENIIHLFTLTNLGAPAAFKYFDTTIDRKRYTSTKEVLDATLIHQSITGLYETRIDLSQLGGDGGGSSGSSGSSGSSGSSGSSGGVPWLMKKPLQLTVLVPLHEYQERLLQQTALPKEQKELLQKLFLKYDALWQHWENQVGHRRIKPHNIATGTLAPRPQKQYPINPKAKPSIQIVIDDLLKQGVLIQQNSTMNTPVYPVPKPDGKWRMVLDYREVNKTIPLIAAQNQHSAGILSSIYRGKYKTTLDLTNGFWAHPITPESYWLTAFTWQGKQYCWTRLPQGFLNSPALFNADVVDLLKEIPNVQAYVDDIYISHDDPQEHLEQLEKIFSILLNAGYVVSLKKSEIAQREVEFLGFNITKEGRGLTDTFKQKLLNITPPKDLKQLQSILGKLNFARNFIPNYSELVKPLYTIVAPANGKFISWTEDNSNQLQHIISVLNQADNLEERNPETRLIIKVNSSPSAGYIRYYNEGSKRPIMYVNYIFSKAEAKFTQTEKLLTTMHKGLIKAMDLAMGQEILVYSPIVSMTKIQRTPLPERKALPVRWITWMTYLEDPRIQFHYDKSLPELQQIPNVTEDVIAKTKHPSEFAMVFYTDGSAIKHPDVNKSHSAGMGIAQVQFIPEYKIVHQWSIPLGDHTAQLAEIAAVEFACKKALKISGPVLIVTDSFYVAESANKELPYWKSNGFLNNKKKPLRHVSKWKSIAECLQLKPDIIIMHEKGHQQPMTTLHTEGNNLADKLATQGSYVVHAGKRTADGSEFEKRTADGSEFESPKKKAKVE

SEQ ID NO: 451 - protein, 2087 aa, synthetic construct
MPAAKRVKLDGGDKKYSIGLDIGTNSVGWAVITDEYKVPSKKFKVLGNTDRHSIKKNLIGALLFDSGETAEATRLKRTARRRYTRRKNRICYLQEIFSNEMAKVDDSFFHRLEESFLVEEDKKHERHPIFGNIVDEVAYHEKYPTIYHLRKKLVDSTDKADLRLIYLALAHMIKFRGHFLIEGDLNPDNSDVDKLFIQLVQTYNQLFEENPINASGVDAKAILSARLSKSRRLENLIAQLPGEKKNGLFGNLIALSLGLTPNFKSNFDLAEDAKLQLSKDTYDDDLDNLLAQIGDQYADLFLAAKNLSDAILLSDILRVNTEITKAPLSASMIKRYDEHHQDLTLLKALVRQQLPEKYKEIFFDQSKNGYAGYIDGGASQEEFYKFIKPILEKMDGTEELLVKLNREDLLRKQRTFDNGSIPHQIHLGELHAILRRQEDFYPFLKDNREKIEKILTFRIPYYVGPLARGNSRFAWMTRKSEETITPWNFEEVVDKGASAQSFIERMTNFDKNLPNEKVLPKHSLLYEYFTVYNELTKVKYVTEGMRKPAFLSGEQKKAIVDLLFKTNRKVTVKQLKEDYFKKIECFDSVEISGVEDRFNASLGTYHDLLKIIKDKDFLDNEENEDILEDIVLTLTLFEDREMIEERLKTYAHLFDDKVMKQLKRRRYTGWGRLSRKLINGIRDKQSGKTILDFLKSDGFANRNFMQLIHDDSLTFKEDIQKAQVSGQGDSLHEHIANLAGSPAIKKGILQTVKVVDELVKVMGRHKPENIVIEMARENQTTQKGQKNSRERMKRIEEGIKELGSQILKEHPVENTQLQNEKLYLYYLQNGRDMYVDQELDINRLSDYDVDHIVPQSFLKDDSIDNKVLTRSDKARGKSDNVPSEEVVKKMKNYWRQLLNAKLITQRKFDNLTKAERGGLSELDKAGFIKRQLVETRQITKHVAQILDSRMNTKYDENDKLIREVKVITLKSKLVSDFRKDFQFYKVREINNYHHAHDAYLNAVVGTALIKKYPKLESEFVYGDYKVYDVRKMIAKSEQEIGKATAKYFFYSNIMNFFKTEITLANGEIRKRPLIETNGETGEIVWDKGRDFATVRKVLSMPQVNIVKKTEVQTGGFSKESILPKRNSDKLIARKKDWDPKKYGGFDSPTVAYSVLVVAKVEKGKSKKLKSVKELLGITIMERSSFEKNPIDFLEAKGYKEVKKDLIIKLPKYSLFELENGRKRMLASAGELQKGNELALPSKYVNFLYLASHYEKLKGSPEDNEQKQLFVEQHKHYLDEIIEQISEFSKRVILADANLDKVLSAYNKHRDKPIREQAENIIHLFTLTNLGAPAAFKYFDTTIDRKRYTSTKEVLDATLIHQSITGLYETRIDLSQLGGDGGPAPGGGEAAAKGGVPWLMKKPLQLTVLVPLHEYQERLLQQTALPKEQKELLQKLFLKYDALWQHWENQVGHRRIKPHNIATGTLAPRPQKQYPINPKAKPSIQIVIDDLLKQGVLIQQNSTMNTPVYPVPKPDGKWRMVLDYREVNKTIPLIAAQNQHSAGILSSIYRGKYKTTLDLTNGFWAHPITPESYWLTAFTWQGKQYCWTRLPQGFLNSPALFNADVVDLLKEIPNVQAYVDDIYISHDDPQEHLEQLEKIFSILLNAGYVVSLKKSEIAQREVEFLGFNITKEGRGLTDTFKQKLLNITPPKDLKQLQSILGKLNFARNFIPNYSELVKPLYTIVAPANGKFISWTEDNSNQLQHIISVLNQADNLEERNPETRLIIKVNSSPSAGYIRYYNEGSKRPIMYVNYIFSKAEAKFTQTEKLLTTMHKGLIKAMDLAMGQEILVYSPIVSMTKIQRTPLPERKALPVRWITWMTYLEDPRIQFHYDKSLPELQQIPNVTEDVIAKTKHPSEFAMVFYTDGSAIKHPDVNKSHSAGMGIAQVQFIPEYKIVHQWSIPLGDHTAQLAEIAAVEFACKKALKISGPVLIVTDSFYVAESANKELPYWKSNGFLNNKKKPLRHVSKWKSIAECLQLKPDIIIMHEKGHQQPMTTLHTEGNNLADKLATQGSYVVHAGKRTADGSEFEKRTADGSEFESPKKKAKVE

SEQ ID NO: 452 - protein, 2081 aa, synthetic construct
MPAAKRVKLDGGDKKYSIGLDIGTNSVGWAVITDEYKVPSKKFKVLGNTDRHSIKKNLIGALLFDSGETAEATRLKRTARRRYTRRKNRICYLQEIFSNEMAKVDDSFFHRLEESFLVEEDKKHERHPIFGNIVDEVAYHEKYPTIYHLRKKLVDSTDKADLRLIYLALAHMIKFRGHFLIEGDLNPDNSDVDKLFIQLVQTYNQLFEENPINASGVDAKAILSARLSKSRRLENLIAQLPGEKKNGLFGNLIALSLGLTPNFKSNFDLAEDAKLQLSKDTYDDDLDNLLAQIGDQYADLFLAAKNLSDAILLSDILRVNTEITKAPLSASMIKRYDEHHQDLTLLKALVRQQLPEKYKEIFFDQSKNGYAGYIDGGASQEEFYKFIKPILEKMDGTEELLVKLNREDLLRKQRTFDNGSIPHQIHLGELHAILRRQEDFYPFLKDNREKIEKILTFRIPYYVGPLARGNSRFAWMTRKSEETITPWNFEEVVDKGASAQSFIERMTNFDKNLPNEKVLPKHSLLYEYFTVYNELTKVKYVTEGMRKPAFLSGEQKKAIVDLLFKTNRKVTVKQLKEDYFKKIECFDSVEISGVEDRFNASLGTYHDLLKIIKDKDFLDNEENEDILEDIVLTLTLFEDREMIEERLKTYAHLFDDKVMKQLKRRRYTGWGRLSRKLINGIRDKQSGKTILDFLKSDGFANRNFMQLIHDDSLTFKEDIQKAQVSGQGDSLHEHIANLAGSPAIKKGILQTVKVVDELVKVMGRHKPENIVIEMARENQTTQKGQKNSRERMKRIEEGIKELGSQILKEHPVENTQLQNEKLYLYYLQNGRDMYVDQELDINRLSDYDVDHIVPQSFLKDDSIDNKVLTRSDKARGKSDNVPSEEVVKKMKNYWRQLLNAKLITQRKFDNLTKAERGGLSELDKAGFIKRQLVETRQITKHVAQILDSRMNTKYDENDKLIREVKVITLKSKLVSDFRKDFQFYKVREINNYHHAHDAYLNAVVGTALIKKYPKLESEFVYGDYKVYDVRKMIAKSEQEIGKATAKYFFYSNIMNFFKTEITLANGEIRKRPLIETNGETGEIVWDKGRDFATVRKVLSMPQVNIVKKTEVQTGGFSKESILPKRNSDKLIARKKDWDPKKYGGFDSPTVAYSVLVVAKVEKGKSKKLKSVKELLGITIMERSSFEKNPIDFLEAKGYKEVKKDLIIKLPKYSLFELENGRKRMLASAGELQKGNELALPSKYVNFLYLASHYEKLKGSPEDNEQKQLFVEQHKHYLDEIIEQISEFSKRVILADANLDKVLSAYNKHRDKPIREQAENIIHLFTLTNLGAPAAFKYFDTTIDRKRYTSTKEVLDATLIHQSITGLYETRIDLSQLGGDGGGGGGSGGVPWLMKKPLQLTVLVPLHEYQERLLQQTALPKEQKELLQKLFLKYDALWQHWENQVGHRRIKPHNIATGTLAPRPQKQYPINPKAKPSIQIVIDDLLKQGVLIQQNSTMNTPVYPVPKPDGKWRMVLDYREVNKTIPLIAAQNQHSAGILSSIYRGKYKTTLDLTNGFWAHPITPESYWLTAFTWQGKQYCWTRLPQGFLNSPALFNADVVDLLKEIPNVQAYVDDIYISHDDPQEHLEQLEKIFSILLNAGYVVSLKKSEIAQREVEFLGFNITKEGRGLTDTFKQKLLNITPPKDLKQLQSILGKLNFARNFIPNYSELVKPLYTIVAPANGKFISWTEDNSNQLQHIISVLNQADNLEERNPETRLIIKVNSSPSAGYIRYYNEGSKRPIMYVNYIFSKAEAKFTQTEKLLTTMHKGLIKAMDLAMGQEILVYSPIVSMTKIQRTPLPERKALPVRWITWMTYLEDPRIQFHYDKSLPELQQIPNVTEDVIAKTKHPSEFAMVFYTDGSAIKHPDVNKSHSAGMGIAQVQFIPEYKIVHQWSIPLGDHTAQLAEIAAVEFACKKALKISGPVLIVTDSFYVAESANKELPYWKSNGFLNNKKKPLRHVSKWKSIAECLQLKPDIIIMHEKGHQQPMTTLHTEGNNLADKLATQGSYVVHAGKRTADGSEFEKRTADGSEFESPKKKAKVE

SEQ ID NO: 453 - protein, 2084 aa, synthetic construct
MPAAKRVKLDGGDKKYSIGLDIGTNSVGWAVITDEYKVPSKKFKVLGNTDRHSIKKNLIGALLFDSGETAEATRLKRTARRRYTRRKNRICYLQEIFSNEMAKVDDSFFHRLEESFLVEEDKKHERHPIFGNIVDEVAYHEKYPTIYHLRKKLVDSTDKADLRLIYLALAHMIKFRGHFLIEGDLNPDNSDVDKLFIQLVQTYNQLFEENPINASGVDAKAILSARLSKSRRLENLIAQLPGEKKNGLFGNLIALSLGLTPNFKSNFDLAEDAKLQLSKDTYDDDLDNLLAQIGDQYADLFLAAKNLSDAILLSDILRVNTEITKAPLSASMIKRYDEHHQDLTLLKALVRQQLPEKYKEIFFDQSKNGYAGYIDGGASQEEFYKFIKPILEKMDGTEELLVKLNREDLLRKQRTFDNGSIPHQIHLGELHAILRRQEDFYPFLKDNREKIEKILTFRIPYYVGPLARGNSRFAWMTRKSEETITPWNFEEVVDKGASAQSFIERMTNFDKNLPNEKVLPKHSLLYEYFTVYNELTKVKYVTEGMRKPAFLSGEQKKAIVDLLFKTNRKVTVKQLKEDYFKKIECFDSVEISGVEDRFNASLGTYHDLLKIIKDKDFLDNEENEDILEDIVLTLTLFEDREMIEERLKTYAHLFDDKVMKQLKRRRYTGWGRLSRKLINGIRDKQSGKTILDFLKSDGFANRNFMQLIHDDSLTFKEDIQKAQVSGQGDSLHEHIANLAGSPAIKKGILQTVKVVDELVKVMGRHKPENIVIEMARENQTTQKGQKNSRERMKRIEEGIKELGSQILKEHPVENTQLQNEKLYLYYLQNGRDMYVDQELDINRLSDYDVDHIVPQSFLKDDSIDNKVLTRSDKARGKSDNVPSEEVVKKMKNYWRQLLNAKLITQRKFDNLTKAERGGLSELDKAGFIKRQLVETRQITKHVAQILDSRMNTKYDENDKLIREVKVITLKSKLVSDFRKDFQFYKVREINNYHHAHDAYLNAVVGTALIKKYPKLESEFVYGDYKVYDVRKMIAKSEQEIGKATAKYFFYSNIMNFFKTEITLANGEIRKRPLIETNGETGEIVWDKGRDFATVRKVLSMPQVNIVKKTEVQTGGFSKESILPKRNSDKLIARKKDWDPKKYGGFDSPTVAYSVLVVAKVEKGKSKKLKSVKELLGITIMERSSFEKNPIDFLEAKGYKEVKKDLIIKLPKYSLFELENGRKRMLASAGELQKGNELALPSKYVNFLYLASHYEKLKGSPEDNEQKQLFVEQHKHYLDEIIEQISEFSKRVILADANLDKVLSAYNKHRDKPIREQAENIIHLFTLTNLGAPAAFKYFDTTIDRKRYTSTKEVLDATLIHQSITGLYETRIDLSQLGGDGGEAAAKPAPGGVPWLMKKPLQLTVLVPLHEYQERLLQQTALPKEQKELLQKLFLKYDALWQHWENQVGHRRIKPHNIATGTLAPRPQKQYPINPKAKPSIQIVIDDLLKQGVLIQQNSTMNTPVYPVPKPDGKWRMVLDYREVNKTIPLIAAQNQHSAGILSSIYRGKYKTTLDLTNGFWAHPITPESYWLTAFTWQGKQYCWTRLPQGFLNSPALFNADVVDLLKEIPNVQAYVDDIYISHDDPQEHLEQLEKIFSILLNAGYVVSLKKSEIAQREVEFLGFNITKEGRGLTDTFKQKLLNITPPKDLKQLQSILGKLNFARNFIPNYSELVKPLYTIVAPANGKFISWTEDNSNQLQHIISVLNQADNLEERNPETRLIIKVNSSPSAGYIRYYNEGSKRPIMYVNYIFSKAEAKFTQTEKLLTTMHKGLIKAMDLAMGQEILVYSPIVSMTKIQRTPLPERKALPVRWITWMTYLEDPRIQFHYDKSLPELQQIPNVTEDVIAKTKHPSEFAMVFYTDGSAIKHPDVNKSHSAGMGIAQVQFIPEYKIVHQWSIPLGDHTAQLAEIAAVEFACKKALKISGPVLIVTDSFYVAESANKELPYWKSNGFLNNKKKPLRHVSKWKSIAECLQLKPDIIIMHEKGHQQPMTTLHTEGNNLADKLATQGSYVVHAGKRTADGSEFEKRTADGSEFESPKKKAKVE

SEQ ID NO: 454 - protein, 2085 aa, synthetic construct
MPAAKRVKLDGGDKKYSIGLDIGTNSVGWAVITDEYKVPSKKFKVLGNTDRHSIKKNLIGALLFDSGETAEATRLKRTARRRYTRRKNRICYLQEIFSNEMAKVDDSFFHRLEESFLVEEDKKHERHPIFGNIVDEVAYHEKYPTIYHLRKKLVDSTDKADLRLIYLALAHMIKFRGHFLIEGDLNPDNSDVDKLFIQLVQTYNQLFEENPINASGVDAKAILSARLSKSRRLENLIAQLPGEKKNGLFGNLIALSLGLTPNFKSNFDLAEDAKLQLSKDTYDDDLDNLLAQIGDQYADLFLAAKNLSDAILLSDILRVNTEITKAPLSASMIKRYDEHHQDLTLLKALVRQQLPEKYKEIFFDQSKNGYAGYIDGGASQEEFYKFIKPILEKMDGTEELLVKLNREDLLRKQRTFDNGSIPHQIHLGELHAILRRQEDFYPFLKDNREKIEKILTFRIPYYVGPLARGNSRFAWMTRKSEETITPWNFEEVVDKGASAQSFIERMTNFDKNLPNEKVLPKHSLLYEYFTVYNELTKVKYVTEGMRKPAFLSGEQKKAIVDLLFKTNRKVTVKQLKEDYFKKIECFDSVEISGVEDRFNASLGTYHDLLKIIKDKDFLDNEENEDILEDIVLTLTLFEDREMIEERLKTYAHLFDDKVMKQLKRRRYTGWGRLSRKLINGIRDKQSGKTILDFLKSDGFANRNFMQLIHDDSLTFKEDIQKAQVSGQGDSLHEHIANLAGSPAIKKGILQTVKVVDELVKVMGRHKPENIVIEMARENQTTQKGQKNSRERMKRIEEGIKELGSQILKEHPVENTQLQNEKLYLYYLQNGRDMYVDQELDINRLSDYDVDHIVPQSFLKDDSIDNKVLTRSDKARGKSDNVPSEEVVKKMKNYWRQLLNAKLITQRKFDNLTKAERGGLSELDKAGFIKRQLVETRQITKHVAQILDSRMNTKYDENDKLIREVKVITLKSKLVSDFRKDFQFYKVREINNYHHAHDAYLNAVVGTALIKKYPKLESEFVYGDYKVYDVRKMIAKSEQEIGKATAKYFFYSNIMNFFKTEITLANGEIRKRPLIETNGETGEIVWDKGRDFATVRKVLSMPQVNIVKKTEVQTGGFSKESILPKRNSDKLIARKKDWDPKKYGGFDSPTVAYSVLVVAKVEKGKSKKLKSVKELLGITIMERSSFEKNPIDFLEAKGYKEVKKDLIIKLPKYSLFELENGRKRMLASAGELQKGNELALPSKYVNFLYLASHYEKLKGSPEDNEQKQLFVEQHKHYLDEIIEQISEFSKRVILADANLDKVLSAYNKHRDKPIREQAENIIHLFTLTNLGAPAAFKYFDTTIDRKRYTSTKEVLDATLIHQSITGLYETRIDLSQLGGDGGGGGGSSGGSGGVPWLMKKPLQLTVLVPLHEYQERLLQQTALPKEQKELLQKLFLKYDALWQHWENQVGHRRIKPHNIATGTLAPRPQKQYPINPKAKPSIQIVIDDLLKQGVLIQQNSTMNTPVYPVPKPDGKWRMVLDYREVNKTIPLIAAQNQHSAGILSSIYRGKYKTTLDLTNGFWAHPITPESYWLTAFTWQGKQYCWTRLPQGFLNSPALFNADVVDLLKEIPNVQAYVDDIYISHDDPQEHLEQLEKIFSILLNAGYVVSLKKSEIAQREVEFLGFNITKEGRGLTDTFKQKLLNITPPKDLKQLQSILGKLNFARNFIPNYSELVKPLYTIVAPANGKFISWTEDNSNQLQHIISVLNQADNLEERNPETRLIIKVNSSPSAGYIRYYNEGSKRPIMYVNYIFSKAEAKFTQTEKLLTTMHKGLIKAMDLAMGQEILVYSPIVSMTKIQRTPLPERKALPVRWITWMTYLEDPRIQFHYDKSLPELQQIPNVTEDVIAKTKHPSEFAMVFYTDGSAIKHPDVNKSHSAGMGIAQVQFIPEYKIVHQWSIPLGDHTAQLAEIAAVEFACKKALKISGPVLIVTDSFYVAESANKELPYWKSNGFLNNKKKPLRHVSKWKSIAECLQLKPDIIIMHEKGHQQPMTTLHTEGNNLADKLATQGSYVVHAGKRTADGSEFEKRTADGSEFESPKKKAKVE

SEQ ID NO: 455 - protein, 2085 aa, synthetic construct
MPAAKRVKLDGGDKKYSIGLDIGTNSVGWAVITDEYKVPSKKFKVLGNTDRHSIKKNLIGALLFDSGETAEATRLKRTARRRYTRRKNRICYLQEIFSNEMAKVDDSFFHRLEESFLVEEDKKHERHPIFGNIVDEVAYHEKYPTIYHLRKKLVDSTDKADLRLIYLALAHMIKFRGHFLIEGDLNPDNSDVDKLFIQLVQTYNQLFEENPINASGVDAKAILSARLSKSRRLENLIAQLPGEKKNGLFGNLIALSLGLTPNFKSNFDLAEDAKLQLSKDTYDDDLDNLLAQIGDQYADLFLAAKNLSDAILLSDILRVNTEITKAPLSASMIKRYDEHHQDLTLLKALVRQQLPEKYKEIFFDQSKNGYAGYIDGGASQEEFYKFIKPILEKMDGTEELLVKLNREDLLRKQRTFDNGSIPHQIHLGELHAILRRQEDFYPFLKDNREKIEKILTFRIPYYVGPLARGNSRFAWMTRKSEETITPWNFEEVVDKGASAQSFIERMTNFDKNLPNEKVLPKHSLLYEYFTVYNELTKVKYVTEGMRKPAFLSGEQKKAIVDLLFKTNRKVTVKQLKEDYFKKIECFDSVEISGVEDRFNASLGTYHDLLKIIKDKDFLDNEENEDILEDIVLTLTLFEDREMIEERLKTYAHLFDDKVMKQLKRRRYTGWGRLSRKLINGIRDKQSGKTILDFLKSDGFANRNFMQLIHDDSLTFKEDIQKAQVSGQGDSLHEHIANLAGSPAIKKGILQTVKVVDELVKVMGRHKPENIVIEMARENQTTQKGQKNSRERMKRIEEGIKELGSQILKEHPVENTQLQNEKLYLYYLQNGRDMYVDQELDINRLSDYDVDHIVPQSFLKDDSIDNKVLTRSDKARGKSDNVPSEEVVKKMKNYWRQLLNAKLITQRKFDNLTKAERGGLSELDKAGFIKRQLVETRQITKHVAQILDSRMNTKYDENDKLIREVKVITLKSKLVSDFRKDFQFYKVREINNYHHAHDAYLNAVVGTALIKKYPKLESEFVYGDYKVYDVRKMIAKSEQEIGKATAKYFFYSNIMNFFKTEITLANGEIRKRPLIETNGETGEIVWDKGRDFATVRKVLSMPQVNIVKKTEVQTGGFSKESILPKRNSDKLIARKKDWDPKKYGGFDSPTVAYSVLVVAKVEKGKSKKLKSVKELLGITIMERSSFEKNPIDFLEAKGYKEVKKDLIIKLPKYSLFELENGRKRMLASAGELQKGNELALPSKYVNFLYLASHYEKLKGSPEDNEQKQLFVEQHKHYLDEIIEQISEFSKRVILADANLDKVLSAYNKHRDKPIREQAENIIHLFTLTNLGAPAAFKYFDTTIDRKRYTSTKEVLDATLIHQSITGLYETRIDLSQLGGDGGGSSPAPGGSGGVPWLMKKPLQLTVLVPLHEYQERLLQQTALPKEQKELLQKLFLKYDALWQHWENQVGHRRIKPHNIATGTLAPRPQKQYPINPKAKPSIQIVIDDLLKQGVLIQQNSTMNTPVYPVPKPDGKWRMVLDYREVNKTIPLIAAQNQHSAGILSSIYRGKYKTTLDLTNGFWAHPITPESYWLTAFTWQGKQYCWTRLPQGFLNSPALFNADVVDLLKEIPNVQAYVDDIYISHDDPQEHLEQLEKIFSILLNAGYVVSLKKSEIAQREVEFLGFNITKEGRGLTDTFKQKLLNITPPKDLKQLQSILGKLNFARNFIPNYSELVKPLYTIVAPANGKFISWTEDNSNQLQHIISVLNQADNLEERNPETRLIIKVNSSPSAGYIRYYNEGSKRPIMYVNYIFSKAEAKFTQTEKLLTTMHKGLIKAMDLAMGQEILVYSPIVSMTKIQRTPLPERKALPVRWITWMTYLEDPRIQFHYDKSLPELQQIPNVTEDVIAKTKHPSEFAMVFYTDGSAIKHPDVNKSHSAGMGIAQVQFIPEYKIVHQWSIPLGDHTAQLAEIAAVEFACKKALKISGPVLIVTDSFYVAESANKELPYWKSNGFLNNKKKPLRHVSKWKSIAECLQLKPDIIIMHEKGHQQPMTTLHTEGNNLADKLATQGSYVVHAGKRTADGSEFEKRTADGSEFESPKKKAKVE

SEQ ID NO: 456 - protein, 2085 aa, synthetic construct
MPAAKRVKLDGGDKKYSIGLDIGTNSVGWAVITDEYKVPSKKFKVLGNTDRHSIKKNLIGALLFDSGETAEATRLKRTARRRYTRRKNRICYLQEIFSNEMAKVDDSFFHRLEESFLVEEDKKHERHPIFGNIVDEVAYHEKYPTIYHLRKKLVDSTDKADLRLIYLALAHMIKFRGHFLIEGDLNPDNSDVDKLFIQLVQTYNQLFEENPINASGVDAKAILSARLSKSRRLENLIAQLPGEKKNGLFGNLIALSLGLTPNFKSNFDLAEDAKLQLSKDTYDDDLDNLLAQIGDQYADLFLAAKNLSDAILLSDILRVNTEITKAPLSASMIKRYDEHHQDLTLLKALVRQQLPEKYKEIFFDQSKNGYAGYIDGGASQEEFYKFIKPILEKMDGTEELLVKLNREDLLRKQRTFDNGSIPHQIHLGELHAILRRQEDFYPFLKDNREKIEKILTFRIPYYVGPLARGNSRFAWMTRKSEETITPWNFEEVVDKGASAQSFIERMTNFDKNLPNEKVLPKHSLLYEYFTVYNELTKVKYVTEGMRKPAFLSGEQKKAIVDLLFKTNRKVTVKQLKEDYFKKIECFDSVEISGVEDRFNASLGTYHDLLKIIKDKDFLDNEENEDILEDIVLTLTLFEDREMIEERLKTYAHLFDDKVMKQLKRRRYTGWGRLSRKLINGIRDKQSGKTILDFLKSDGFANRNFMQLIHDDSLTFKEDIQKAQVSGQGDSLHEHIANLAGSPAIKKGILQTVKVVDELVKVMGRHKPENIVIEMARENQTTQKGQKNSRERMKRIEEGIKELGSQILKEHPVENTQLQNEKLYLYYLQNGRDMYVDQELDINRLSDYDVDHIVPQSFLKDDSIDNKVLTRSDKARGKSDNVPSEEVVKKMKNYWRQLLNAKLITQRKFDNLTKAERGGLSELDKAGFIKRQLVETRQITKHVAQILDSRMNTKYDENDKLIREVKVITLKSKLVSDFRKDFQFYKVREINNYHHAHDAYLNAVVGTALIKKYPKLESEFVYGDYKVYDVRKMIAKSEQEIGKATAKYFFYSNIMNFFKTEITLANGEIRKRPLIETNGETGEIVWDKGRDFATVRKVLSMPQVNIVKKTEVQTGGFSKESILPKRNSDKLIARKKDWDPKKYGGFDSPTVAYSVLVVAKVEKGKSKKLKSVKELLGITIMERSSFEKNPIDFLEAKGYKEVKKDLIIKLPKYSLFELENGRKRMLASAGELQKGNELALPSKYVNFLYLASHYEKLKGSPEDNEQKQLFVEQHKHYLDEIIEQISEFSKRVILADANLDKVLSAYNKHRDKPIREQAENIIHLFTLTNLGAPAAFKYFDTTIDRKRYTSTKEVLDATLIHQSITGLYETRIDLSQLGGDGGPAPGSSGGGGGVPWLMKKPLQLTVLVPLHEYQERLLQQTALPKEQKELLQKLFLKYDALWQHWENQVGHRRIKPHNIATGTLAPRPQKQYPINPKAKPSIQIVIDDLLKQGVLIQQNSTMNTPVYPVPKPDGKWRMVLDYREVNKTIPLIAAQNQHSAGILSSIYRGKYKTTLDLTNGFWAHPITPESYWLTAFTWQGKQYCWTRLPQGFLNSPALFNADVVDLLKEIPNVQAYVDDIYISHDDPQEHLEQLEKIFSILLNAGYVVSLKKSEIAQREVEFLGFNITKEGRGLTDTFKQKLLNITPPKDLKQLQSILGKLNFARNFIPNYSELVKPLYTIVAPANGKFISWTEDNSNQLQHIISVLNQADNLEERNPETRLIIKVNSSPSAGYIRYYNEGSKRPIMYVNYIFSKAEAKFTQTEKLLTTMHKGLIKAMDLAMGQEILVYSPIVSMTKIQRTPLPERKALPVRWITWMTYLEDPRIQFHYDKSLPELQQIPNVTEDVIAKTKHPSEFAMVFYTDGSAIKHPDVNKSHSAGMGIAQVQFIPEYKIVHQWSIPLGDHTAQLAEIAAVEFACKKALKISGPVLIVTDSFYVAESANKELPYWKSNGFLNNKKKPLRHVSKWKSIAECLQLKPDIIIMHEKGHQQPMTTLHTEGNNLADKLATQGSYVVHAGKRTADGSEFEKRTADGSEFESPKKKAKVE

SEQ ID NO: 457 - protein, 2082 aa, synthetic construct
MPAAKRVKLDGGDKKYSIGLDIGTNSVGWAVITDEYKVPSKKFKVLGNTDRHSIKKNLIGALLFDSGETAEATRLKRTARRRYTRRKNRICYLQEIFSNEMAKVDDSFFHRLEESFLVEEDKKHERHPIFGNIVDEVAYHEKYPTIYHLRKKLVDSTDKADLRLIYLALAHMIKFRGHFLIEGDLNPDNSDVDKLFIQLVQTYNQLFEENPINASGVDAKAILSARLSKSRRLENLIAQLPGEKKNGLFGNLIALSLGLTPNFKSNFDLAEDAKLQLSKDTYDDDLDNLLAQIGDQYADLFLAAKNLSDAILLSDILRVNTEITKAPLSASMIKRYDEHHQDLTLLKALVRQQLPEKYKEIFFDQSKNGYAGYIDGGASQEEFYKFIKPILEKMDGTEELLVKLNREDLLRKQRTFDNGSIPHQIHLGELHAILRRQEDFYPFLKDNREKIEKILTFRIPYYVGPLARGNSRFAWMTRKSEETITPWNFEEVVDKGASAQSFIERMTNFDKNLPNEKVLPKHSLLYEYFTVYNELTKVKYVTEGMRKPAFLSGEQKKAIVDLLFKTNRKVTVKQLKEDYFKKIECFDSVEISGVEDRFNASLGTYHDLLKIIKDKDFLDNEENEDILEDIVLTLTLFEDREMIEERLKTYAHLFDDKVMKQLKRRRYTGWGRLSRKLINGIRDKQSGKTILDFLKSDGFANRNFMQLIHDDSLTFKEDIQKAQVSGQGDSLHEHIANLAGSPAIKKGILQTVKVVDELVKVMGRHKPENIVIEMARENQTTQKGQKNSRERMKRIEEGIKELGSQILKEHPVENTQLQNEKLYLYYLQNGRDMYVDQELDINRLSDYDVDHIVPQSFLKDDSIDNKVLTRSDKARGKSDNVPSEEVVKKMKNYWRQLLNAKLITQRKFDNLTKAERGGLSELDKAGFIKRQLVETRQITKHVAQILDSRMNTKYDENDKLIREVKVITLKSKLVSDFRKDFQFYKVREINNYHHAHDAYLNAVVGTALIKKYPKLESEFVYGDYKVYDVRKMIAKSEQEIGKATAKYFFYSNIMNFFKTEITLANGEIRKRPLIETNGETGEIVWDKGRDFATVRKVLSMPQVNIVKKTEVQTGGFSKESILPKRNSDKLIARKKDWDPKKYGGFDSPTVAYSVLVVAKVEKGKSKKLKSVKELLGITIMERSSFEKNPIDFLEAKGYKEVKKDLIIKLPKYSLFELENGRKRMLASAGELQKGNELALPSKYVNFLYLASHYEKLKGSPEDNEQKQLFVEQHKHYLDEIIEQISEFSKRVILADANLDKVLSAYNKHRDKPIREQAENIIHLFTLTNLGAPAAFKYFDTTIDRKRYTSTKEVLDATLIHQSITGLYETRIDLSQLGGDGGGGSGGSGGVPWLMKKPLQLTVLVPLHEYQERLLQQTALPKEQKELLQKLFLKYDALWQHWENQVGHRRIKPHNIATGTLAPRPQKQYPINPKAKPSIQIVIDDLLKQGVLIQQNSTMNTPVYPVPKPDGKWRMVLDYREVNKTIPLIAAQNQHSAGILSSIYRGKYKTTLDLTNGFWAHPITPESYWLTAFTWQGKQYCWTRLPQGFLNSPALFNADVVDLLKEIPNVQAYVDDIYISHDDPQEHLEQLEKIFSILLNAGYVVSLKKSEIAQREVEFLGFNITKEGRGLTDTFKQKLLNITPPKDLKQLQSILGKLNFARNFIPNYSELVKPLYTIVAPANGKFISWTEDNSNQLQHIISVLNQADNLEERNPETRLIIKVNSSPSAGYIRYYNEGSKRPIMYVNYIFSKAEAKFTQTEKLLTTMHKGLIKAMDLAMGQEILVYSPIVSMTKIQRTPLPERKALPVRWITWMTYLEDPRIQFHYDKSLPELQQIPNVTEDVIAKTKHPSEFAMVFYTDGSAIKHPDVNKSHSAGMGIAQVQFIPEYKIVHQWSIPLGDHTAQLAEIAAVEFACKKALKISGPVLIVTDSFYVAESANKELPYWKSNGFLNNKKKPLRHVSKWKSIAECLQLKPDIIIMHEKGHQQPMTTLHTEGNNLADKLATQGSYVVHAGKRTADGSEFEKRTADGSEFESPKKKAKVE

SEQ ID NO: 458 - protein, 2087 aa, synthetic construct
MPAAKRVKLDGGDKKYSIGLDIGTNSVGWAVITDEYKVPSKKFKVLGNTDRHSIKKNLIGALLFDSGETAEATRLKRTARRRYTRRKNRICYLQEIFSNEMAKVDDSFFHRLEESFLVEEDKKHERHPIFGNIVDEVAYHEKYPTIYHLRKKLVDSTDKADLRLIYLALAHMIKFRGHFLIEGDLNPDNSDVDKLFIQLVQTYNQLFEENPINASGVDAKAILSARLSKSRRLENLIAQLPGEKKNGLFGNLIALSLGLTPNFKSNFDLAEDAKLQLSKDTYDDDLDNLLAQIGDQYADLFLAAKNLSDAILLSDILRVNTEITKAPLSASMIKRYDEHHQDLTLLKALVRQQLPEKYKEIFFDQSKNGYAGYIDGGASQEEFYKFIKPILEKMDGTEELLVKLNREDLLRKQRTFDNGSIPHQIHLGELHAILRRQEDFYPFLKDNREKIEKILTFRIPYYVGPLARGNSRFAWMTRKSEETITPWNFEEVVDKGASAQSFIERMTNFDKNLPNEKVLPKHSLLYEYFTVYNELTKVKYVTEGMRKPAFLSGEQKKAIVDLLFKTNRKVTVKQLKEDYFKKIECFDSVEISGVEDRFNASLGTYHDLLKIIKDKDFLDNEENEDILEDIVLTLTLFEDREMIEERLKTYAHLFDDKVMKQLKRRRYTGWGRLSRKLINGIRDKQSGKTILDFLKSDGFANRNFMQLIHDDSLTFKEDIQKAQVSGQGDSLHEHIANLAGSPAIKKGILQTVKVVDELVKVMGRHKPENIVIEMARENQTTQKGQKNSRERMKRIEEGIKELGSQILKEHPVENTQLQNEKLYLYYLQNGRDMYVDQELDINRLSDYDVDHIVPQSFLKDDSIDNKVLTRSDKARGKSDNVPSEEVVKKMKNYWRQLLNAKLITQRKFDNLTKAERGGLSELDKAGFIKRQLVETRQITKHVAQILDSRMNTKYDENDKLIREVKVITLKSKLVSDFRKDFQFYKVREINNYHHAHDAYLNAVVGTALIKKYPKLESEFVYGDYKVYDVRKMIAKSEQEIGKATAKYFFYSNIMNFFKTEITLANGEIRKRPLIETNGETGEIVWDKGRDFATVRKVLSMPQVNIVKKTEVQTGGFSKESILPKRNSDKLIARKKDWDPKKYGGFDSPTVAYSVLVVAKVEKGKSKKLKSVKELLGITIMERSSFEKNPIDFLEAKGYKEVKKDLIIKLPKYSLFELENGRKRMLASAGELQKGNELALPSKYVNFLYLASHYEKLKGSPEDNEQKQLFVEQHKHYLDEIIEQISEFSKRVILADANLDKVLSAYNKHRDKPIREQAENIIHLFTLTNLGAPAAFKYFDTTIDRKRYTSTKEVLDATLIHQSITGLYETRIDLSQLGGDGGGGGEAAAKGSSGGVPWLMKKPLQLTVLVPLHEYQERLLQQTALPKEQKELLQKLFLKYDALWQHWENQVGHRRIKPHNIATGTLAPRPQKQYPINPKAKPSIQIVIDDLLKQGVLIQQNSTMNTPVYPVPKPDGKWRMVLDYREVNKTIPLIAAQNQHSAGILSSIYRGKYKTTLDLTNGFWAHPITPESYWLTAFTWQGKQYCWTRLPQGFLNSPALFNADVVDLLKEIPNVQAYVDDIYISHDDPQEHLEQLEKIFSILLNAGYVVSLKKSEIAQREVEFLGFNITKEGRGLTDTFKQKLLNITPPKDLKQLQSILGKLNFARNFIPNYSELVKPLYTIVAPANGKFISWTEDNSNQLQHIISVLNQADNLEERNPETRLIIKVNSSPSAGYIRYYNEGSKRPIMYVNYIFSKAEAKFTQTEKLLTTMHKGLIKAMDLAMGQEILVYSPIVSMTKIQRTPLPERKALPVRWITWMTYLEDPRIQFHYDKSLPELQQIPNVTEDVIAKTKHPSEFAMVFYTDGSAIKHPDVNKSHSAGMGIAQVQFIPEYKIVHQWSIPLGDHTAQLAEIAAVEFACKKALKISGPVLIVTDSFYVAESANKELPYWKSNGFLNNKKKPLRHVSKWKSIAECLQLKPDIIIMHEKGHQQPMTTLHTEGNNLADKLATQGSYVVHAGKRTADGSEFEKRTADGSEFESPKKKAKVE

SEQ ID NO: 459 - protein, 2087 aa, synthetic construct
MPAAKRVKLDGGDKKYSIGLDIGTNSVGWAVITDEYKVPSKKFKVLGNTDRHSIKKNLIGALLFDSGETAEATRLKRTARRRYTRRKNRICYLQEIFSNEMAKVDDSFFHRLEESFLVEEDKKHERHPIFGNIVDEVAYHEKYPTIYHLRKKLVDSTDKADLRLIYLALAHMIKFRGHFLIEGDLNPDNSDVDKLFIQLVQTYNQLFEENPINASGVDAKAILSARLSKSRRLENLIAQLPGEKKNGLFGNLIALSLGLTPNFKSNFDLAEDAKLQLSKDTYDDDLDNLLAQIGDQYADLFLAAKNLSDAILLSDILRVNTEITKAPLSASMIKRYDEHHQDLTLLKALVRQQLPEKYKEIFFDQSKNGYAGYIDGGASQEEFYKFIKPILEKMDGTEELLVKLNREDLLRKQRTFDNGSIPHQIHLGELHAILRRQEDFYPFLKDNREKIEKILTFRIPYYVGPLARGNSRFAWMTRKSEETITPWNFEEVVDKGASAQSFIERMTNFDKNLPNEKVLPKHSLLYEYFTVYNELTKVKYVTEGMRKPAFLSGEQKKAIVDLLFKTNRKVTVKQLKEDYFKKIECFDSVEISGVEDRFNASLGTYHDLLKIIKDKDFLDNEENEDILEDIVLTLTLFEDREMIEERLKTYAHLFDDKVMKQLKRRRYTGWGRLSRKLINGIRDKQSGKTILDFLKSDGFANRNFMQLIHDDSLTFKEDIQKAQVSGQGDSLHEHIANLAGSPAIKKGILQTVKVVDELVKVMGRHKPENIVIEMARENQTTQKGQKNSRERMKRIEEGIKELGSQILKEHPVENTQLQNEKLYLYYLQNGRDMYVDQELDINRLSDYDVDHIVPQSFLKDDSIDNKVLTRSDKARGKSDNVPSEEVVKKMKNYWRQLLNAKLITQRKFDNLTKAERGGLSELDKAGFIKRQLVETRQITKHVAQILDSRMNTKYDENDKLIREVKVITLKSKLVSDFRKDFQFYKVREINNYHHAHDAYLNAVVGTALIKKYPKLESEFVYGDYKVYDVRKMIAKSEQEIGKATAKYFFYSNIMNFFKTEITLANGEIRKRPLIETNGETGEIVWDKGRDFATVRKVLSMPQVNIVKKTEVQTGGFSKESILPKRNSDKLIARKKDWDPKKYGGFDSPTVAYSVLVVAKVEKGKSKKLKSVKELLGITIMERSSFEKNPIDFLEAKGYKEVKKDLIIKLPKYSLFELENGRKRMLASAGELQKGNELALPSKYVNFLYLASHYEKLKGSPEDNEQKQLFVEQHKHYLDEIIEQISEFSKRVILADANLDKVLSAYNKHRDKPIREQAENIIHLFTLTNLGAPAAFKYFDTTIDRKRYTSTKEVLDATLIHQSITGLYETRIDLSQLGGDGGGGSGGGEAAAKGGVPWLMKKPLQLTVLVPLHEYQERLLQQTALPKEQKELLQKLFLKYDALWQHWENQVGHRRIKPHNIATGTLAPRPQKQYPINPKAKPSIQIVIDDLLKQGVLIQQNSTMNTPVYPVPKPDGKWRMVLDYREVNKTIPLIAAQNQHSAGILSSIYRGKYKTTLDLTNGFWAHPITPESYWLTAFTWQGKQYCWTRLPQGFLNSPALFNADVVDLLKEIPNVQAYVDDIYISHDDPQEHLEQLEKIFSILLNAGYVVSLKKSEIAQREVEFLGFNITKEGRGLTDTFKQKLLNITPPKDLKQLQSILGKLNFARNFIPNYSELVKPLYTIVAPANGKFISWTEDNSNQLQHIISVLNQADNLEERNPETRLIIKVNSSPSAGYIRYYNEGSKRPIMYVNYIFSKAEAKFTQTEKLLTTMHKGLIKAMDLAMGQEILVYSPIVSMTKIQRTPLPERKALPVRWITWMTYLEDPRIQFHYDKSLPELQQIPNVTEDVIAKTKHPSEFAMVFYTDGSAIKHPDVNKSHSAGMGIAQVQFIPEYKIVHQWSIPLGDHTAQLAEIAAVEFACKKALKISGPVLIVTDSFYVAESANKELPYWKSNGFLNNKKKPLRHVSKWKSIAECLQLKPDIIIMHEKGHQQPMTTLHTEGNNLADKLATQGSYVVHAGKRTADGSEFEKRTADGSEFESPKKKAKVE

SEQ ID NO: 460 - protein, 2185 aa, synthetic construct
MPAAKRVKLDGGDKKYSIGLDIGTNSVGWAVITDEYKVPSKKFKVLGNTDRHSIKKNLIGALLFDSGETAEATRLKRTARRRYTRRKNRICYLQEIFSNEMAKVDDSFFHRLEESFLVEEDKKHERHPIFGNIVDEVAYHEKYPTIYHLRKKLVDSTDKADLRLIYLALAHMIKFRGHFLIEGDLNPDNSDVDKLFIQLVQTYNQLFEENPINASGVDAKAILSARLSKSRRLENLIAQLPGEKKNGLFGNLIALSLGLTPNFKSNFDLAEDAKLQLSKDTYDDDLDNLLAQIGDQYADLFLAAKNLSDAILLSDILRVNTEITKAPLSASMIKRYDEHHQDLTLLKALVRQQLPEKYKEIFFDQSKNGYAGYIDGGASQEEFYKFIKPILEKMDGTEELLVKLNREDLLRKQRTFDNGSIPHQIHLGELHAILRRQEDFYPFLKDNREKIEKILTFRIPYYVGPLARGNSRFAWMTRKSEETITPWNFEEVVDKGASAQSFIERMTNFDKNLPNEKVLPKHSLLYEYFTVYNELTKVKYVTEGMRKPAFLSGEQKKAIVDLLFKTNRKVTVKQLKEDYFKKIECFDSVEISGVEDRFNASLGTYHDLLKIIKDKDFLDNEENEDILEDIVLTLTLFEDREMIEERLKTYAHLFDDKVMKQLKRRRYTGWGRLSRKLINGIRDKQSGKTILDFLKSDGFANRNFMQLIHDDSLTFKEDIQKAQVSGQGDSLHEHIANLAGSPAIKKGILQTVKVVDELVKVMGRHKPENIVIEMARENQTTQKGQKNSRERMKRIEEGIKELGSQILKEHPVENTQLQNEKLYLYYLQNGRDMYVDQELDINRLSDYDVDHIVPQSFLKDDSIDNKVLTRSDKARGKSDNVPSEEVVKKMKNYWRQLLNAKLITQRKFDNLTKAERGGLSELDKAGFIKRQLVETRQITKHVAQILDSRMNTKYDENDKLIREVKVITLKSKLVSDFRKDFQFYKVREINNYHHAHDAYLNAVVGTALIKKYPKLESEFVYGDYKVYDVRKMIAKSEQEIGKATAKYFFYSNIMNFFKTEITLANGEIRKRPLIETNGETGEIVWDKGRDFATVRKVLSMPQVNIVKKTEVQTGGFSKESILPKRNSDKLIARKKDWDPKKYGGFDSPTVAYSVLVVAKVEKGKSKKLKSVKELLGITIMERSSFEKNPIDFLEAKGYKEVKKDLIIKLPKYSLFELENGRKRMLASAGELQKGNELALPSKYVNFLYLASHYEKLKGSPEDNEQKQLFVEQHKHYLDEIIEQISEFSKRVILADANLDKVLSAYNKHRDKPIREQAENIIHLFTLTNLGAPAAFKYFDTTIDRKRYTSTKEVLDATLIHQSITGLYETRIDLSQLGGDGGGGGGSGGGGSGGGGSGGGGSGGMDPLQLLQPLEAEIKGTKLKAHWNSGATITCVPEAFLEDERPIQTMLIKTIHGEKQQDVYYLTFKVQGRKVEAEVLASPYDYILLNPSDVPWLMKKPLQLTVLVPLHEYQERLLQQTALPKEQKELLQKLFLKYDALWQHWENQVGHRRIKPHNIATGTLAPRPQKQYPINPKAKPSIQIVIDDLLKQGVLIQQNSTMNTPVYPVPKPDGKWRMVLDYREVNKTIPLIAAQNQHSAGILSSIYRGKYKTTLDLTNGFWAHPITPESYWLTAFTWQGKQYCWTRLPQGFLNSPALFNADVVDLLKEIPNVQAYVDDIYISHDDPQEHLEQLEKIFSILLNAGYVVSLKKSEIAQREVEFLGFNITKEGRGLTDTFKQKLLNITPPKDLKQLQSILGLLNFARNFIPNYSELVKPLYTIVAPANGKFISWTEDNSNQLQHIISVLNQADNLEERNPETRLIIKVNSSPSAGYIRYYNEGSKRPIMYVNYIFSKAEAKFTQTEKLLTTMHKGLIKAMDLAMGQEILVYSPIVSMTKIQRTPLPERKALPVRWITWMTYLEDPRIQFHYDKSLPELQQIPNVTEDVIAKTKHPSEFAMVFYTDGSAIKHPDVNKSHSAGMGIAQVQFIPEYKIVHQWSIPLGDHTAQLAEIAAVEFACKKALKISGPVLIVTDSFYVAESANKELPYWKSNGFLNNKKKPLRHVSKWKSIAECLQLKPDIIIMHEKGHQQPMTTLHTEGNNLADKLATQGSYVVHAGKRTADGSEFEKRTADGSEFESPKKKAKVE

SEQ ID NO: 461 - protein, 2180 aa, synthetic construct
MPAAKRVKLDGGDKKYSIGLDIGTNSVGWAVITDEYKVPSKKFKVLGNTDRHSIKKNLIGALLFDSGETAEATRLKRTARRRYTRRKNRICYLQEIFSNEMAKVDDSFFHRLEESFLVEEDKKHERHPIFGNIVDEVAYHEKYPTIYHLRKKLVDSTDKADLRLIYLALAHMIKFRGHFLIEGDLNPDNSDVDKLFIQLVQTYNQLFEENPINASGVDAKAILSARLSKSRRLENLIAQLPGEKKNGLFGNLIALSLGLTPNFKSNFDLAEDAKLQLSKDTYDDDLDNLLAQIGDQYADLFLAAKNLSDAILLSDILRVNTEITKAPLSASMIKRYDEHHQDLTLLKALVRQQLPEKYKEIFFDQSKNGYAGYIDGGASQEEFYKFIKPILEKMDGTEELLVKLNREDLLRKQRTFDNGSIPHQIHLGELHAILRRQEDFYPFLKDNREKIEKILTFRIPYYVGPLARGNSRFAWMTRKSEETITPWNFEEVVDKGASAQSFIERMTNFDKNLPNEKVLPKHSLLYEYFTVYNELTKVKYVTEGMRKPAFLSGEQKKAIVDLLFKTNRKVTVKQLKEDYFKKIECFDSVEISGVEDRFNASLGTYHDLLKIIKDKDFLDNEENEDILEDIVLTLTLFEDREMIEERLKTYAHLFDDKVMKQLKRRRYTGWGRLSRKLINGIRDKQSGKTILDFLKSDGFANRNFMQLIHDDSLTFKEDIQKAQVSGQGDSLHEHIANLAGSPAIKKGILQTVKVVDELVKVMGRHKPENIVIEMARENQTTQKGQKNSRERMKRIEEGIKELGSQILKEHPVENTQLQNEKLYLYYLQNGRDMYVDQELDINRLSDYDVDHIVPQSFLKDDSIDNKVLTRSDKARGKSDNVPSEEVVKKMKNYWRQLLNAKLITQRKFDNLTKAERGGLSELDKAGFIKRQLVETRQITKHVAQILDSRMNTKYDENDKLIREVKVITLKSKLVSDFRKDFQFYKVREINNYHHAHDAYLNAVVGTALIKKYPKLESEFVYGDYKVYDVRKMIAKSEQEIGKATAKYFFYSNIMNFFKTEITLANGEIRKRPLIETNGETGEIVWDKGRDFATVRKVLSMPQVNIVKKTEVQTGGFSKESILPKRNSDKLIARKKDWDPKKYGGFDSPTVAYSVLVVAKVEKGKSKKLKSVKELLGITIMERSSFEKNPIDFLEAKGYKEVKKDLIIKLPKYSLFELENGRKRMLASAGELQKGNELALPSKYVNFLYLASHYEKLKGSPEDNEQKQLFVEQHKHYLDEIIEQISEFSKRVILADANLDKVLSAYNKHRDKPIREQAENIIHLFTLTNLGAPAAFKYFDTTIDRKRYTSTKEVLDATLIHQSITGLYETRIDLSQLGGDGGGSSGSSGSSGSSGSSGGMDPLQLLQPLEAEIKGTKLKAHWNSGATITCVPEAFLEDERPIQTMLIKTIHGEKQQDVYYLTFKVQGRKVEAEVLASPYDYILLNPSDVPWLMKKPLQLTVLVPLHEYQERLLQQTALPKEQKELLQKLFLKYDALWQHWENQVGHRRIKPHNIATGTLAPRPQKQYPINPKAKPSIQIVIDDLLKQGVLIQQNSTMNTPVYPVPKPDGKWRMVLDYREVNKTIPLIAAQNQHSAGILSSIYRGKYKTTLDLTNGFWAHPITPESYWLTAFTWQGKQYCWTRLPQGFLNSPALFNADVVDLLKEIPNVQAYVDDIYISHDDPQEHLEQLEKIFSILLNAGYVVSLKKSEIAQREVEFLGFNITKEGRGLTDTFKQKLLNITPPKDLKQLQSILGLLNFARNFIPNYSELVKPLYTIVAPANGKFISWTEDNSNQLQHIISVLNQADNLEERNPETRLIIKVNSSPSAGYIRYYNEGSKRPIMYVNYIFSKAEAKFTQTEKLLTTMHKGLIKAMDLAMGQEILVYSPIVSMTKIQRTPLPERKALPVRWITWMTYLEDPRIQFHYDKSLPELQQIPNVTEDVIAKTKHPSEFAMVFYTDGSAIKHPDVNKSHSAGMGIAQVQFIPEYKIVHQWSIPLGDHTAQLAEIAAVEFACKKALKISGPVLIVTDSFYVAESANKELPYWKSNGFLNNKKKPLRHVSKWKSIAECLQLKPDIIIMHEKGHQQPMTTLHTEGNNLADKLATQGSYVVHAGKRTADGSEFEKRTADGSEFESPKKKAKVE

SEQ ID NO: 462 - protein, 2176 aa, synthetic construct
MPAAKRVKLDGGDKKYSIGLDIGTNSVGWAVITDEYKVPSKKFKVLGNTDRHSIKKNLIGALLFDSGETAEATRLKRTARRRYTRRKNRICYLQEIFSNEMAKVDDSFFHRLEESFLVEEDKKHERHPIFGNIVDEVAYHEKYPTIYHLRKKLVDSTDKADLRLIYLALAHMIKFRGHFLIEGDLNPDNSDVDKLFIQLVQTYNQLFEENPINASGVDAKAILSARLSKSRRLENLIAQLPGEKKNGLFGNLIALSLGLTPNFKSNFDLAEDAKLQLSKDTYDDDLDNLLAQIGDQYADLFLAAKNLSDAILLSDILRVNTEITKAPLSASMIKRYDEHHQDLTLLKALVRQQLPEKYKEIFFDQSKNGYAGYIDGGASQEEFYKFIKPILEKMDGTEELLVKLNREDLLRKQRTFDNGSIPHQIHLGELHAILRRQEDFYPFLKDNREKIEKILTFRIPYYVGPLARGNSRFAWMTRKSEETITPWNFEEVVDKGASAQSFIERMTNFDKNLPNEKVLPKHSLLYEYFTVYNELTKVKYVTEGMRKPAFLSGEQKKAIVDLLFKTNRKVTVKQLKEDYFKKIECFDSVEISGVEDRFNASLGTYHDLLKIIKDKDFLDNEENEDILEDIVLTLTLFEDREMIEERLKTYAHLFDDKVMKQLKRRRYTGWGRLSRKLINGIRDKQSGKTILDFLKSDGFANRNFMQLIHDDSLTFKEDIQKAQVSGQGDSLHEHIANLAGSPAIKKGILQTVKVVDELVKVMGRHKPENIVIEMARENQTTQKGQKNSRERMKRIEEGIKELGSQILKEHPVENTQLQNEKLYLYYLQNGRDMYVDQELDINRLSDYDVDHIVPQSFLKDDSIDNKVLTRSDKARGKSDNVPSEEVVKKMKNYWRQLLNAKLITQRKFDNLTKAERGGLSELDKAGFIKRQLVETRQITKHVAQILDSRMNTKYDENDKLIREVKVITLKSKLVSDFRKDFQFYKVREINNYHHAHDAYLNAVVGTALIKKYPKLESEFVYGDYKVYDVRKMIAKSEQEIGKATAKYFFYSNIMNFFKTEITLANGEIRKRPLIETNGETGEIVWDKGRDFATVRKVLSMPQVNIVKKTEVQTGGFSKESILPKRNSDKLIARKKDWDPKKYGGFDSPTVAYSVLVVAKVEKGKSKKLKSVKELLGITIMERSSFEKNPIDFLEAKGYKEVKKDLIIKLPKYSLFELENGRKRMLASAGELQKGNELALPSKYVNFLYLASHYEKLKGSPEDNEQKQLFVEQHKHYLDEIIEQISEFSKRVILADANLDKVLSAYNKHRDKPIREQAENIIHLFTLTNLGAPAAFKYFDTTIDRKRYTSTKEVLDATLIHQSITGLYETRIDLSQLGGDGGGGGEAAAKGSSGGMDPLQLLQPLEAEIKGTKLKAHWNSGATITCVPEAFLEDERPIQTMLIKTIHGEKQQDVYYLTFKVQGRKVEAEVLASPYDYILLNPSDVPWLMKKPLQLTVLVPLHEYQERLLQQTALPKEQKELLQKLFLKYDALWQHWENQVGHRRIKPHNIATGTLAPRPQKQYPINPKAKPSIQIVIDDLLKQGVLIQQNSTMNTPVYPVPKPDGKWRMVLDYREVNKTIPLIAAQNQHSAGILSSIYRGKYKTTLDLTNGFWAHPITPESYWLTAFTWQGKQYCWTRLPQGFLNSPALFNADVVDLLKEIPNVQAYVDDIYISHDDPQEHLEQLEKIFSILLNAGYVVSLKKSEIAQREVEFLGFNITKEGRGLTDTFKQKLLNITPPKDLKQLQSILGLLNFARNFIPNYSELVKPLYTIVAPANGKFISWTEDNSNQLQHIISVLNQADNLEERNPETRLIIKVNSSPSAGYIRYYNEGSKRPIMYVNYIFSKAEAKFTQTEKLLTTMHKGLIKAMDLAMGQEILVYSPIVSMTKIQRTPLPERKALPVRWITWMTYLEDPRIQFHYDKSLPELQQIPNVTEDVIAKTKHPSEFAMVFYTDGSAIKHPDVNKSHSAGMGIAQVQFIPEYKIVHQWSIPLGDHTAQLAEIAAVEFACKKALKISGPVLIVTDSFYVAESANKELPYWKSNGFLNNKKKPLRHVSKWKSIAECLQLKPDIIIMHEKGHQQPMTTLHTEGNNLADKLATQGSYVVHAGKRTADGSEFEKRTADGSEFESPKKKAKVE

SEQ ID NO: 463 - protein, 2176 aa, synthetic construct
MPAAKRVKLDGGDKKYSIGLDIGTNSVGWAVITDEYKVPSKKFKVLGNTDRHSIKKNLIGALLFDSGETAEATRLKRTARRRYTRRKNRICYLQEIFSNEMAKVDDSFFHRLEESFLVEEDKKHERHPIFGNIVDEVAYHEKYPTIYHLRKKLVDSTDKADLRLIYLALAHMIKFRGHFLIEGDLNPDNSDVDKLFIQLVQTYNQLFEENPINASGVDAKAILSARLSKSRRLENLIAQLPGEKKNGLFGNLIALSLGLTPNFKSNFDLAEDAKLQLSKDTYDDDLDNLLAQIGDQYADLFLAAKNLSDAILLSDILRVNTEITKAPLSASMIKRYDEHHQDLTLLKALVRQQLPEKYKEIFFDQSKNGYAGYIDGGASQEEFYKFIKPILEKMDGTEELLVKLNREDLLRKQRTFDNGSIPHQIHLGELHAILRRQEDFYPFLKDNREKIEKILTFRIPYYVGPLARGNSRFAWMTRKSEETITPWNFEEVVDKGASAQSFIERMTNFDKNLPNEKVLPKHSLLYEYFTVYNELTKVKYVTEGMRKPAFLSGEQKKAIVDLLFKTNRKVTVKQLKEDYFKKIECFDSVEISGVEDRFNASLGTYHDLLKIIKDKDFLDNEENEDILEDIVLTLTLFEDREMIEERLKTYAHLFDDKVMKQLKRRRYTGWGRLSRKLINGIRDKQSGKTILDFLKSDGFANRNFMQLIHDDSLTFKEDIQKAQVSGQGDSLHEHIANLAGSPAIKKGILQTVKVVDELVKVMGRHKPENIVIEMARENQTTQKGQKNSRERMKRIEEGIKELGSQILKEHPVENTQLQNEKLYLYYLQNGRDMYVDQELDINRLSDYDVDHIVPQSFLKDDSIDNKVLTRSDKARGKSDNVPSEEVVKKMKNYWRQLLNAKLITQRKFDNLTKAERGGLSELDKAGFIKRQLVETRQITKHVAQILDSRMNTKYDENDKLIREVKVITLKSKLVSDFRKDFQFYKVREINNYHHAHDAYLNAVVGTALIKKYPKLESEFVYGDYKVYDVRKMIAKSEQEIGKATAKYFFYSNIMNFFKTEITLANGEIRKRPLIETNGETGEIVWDKGRDFATVRKVLSMPQVNIVKKTEVQTGGFSKESILPKRNSDKLIARKKDWDPKKYGGFDSPTVAYSVLVVAKVEKGKSKKLKSVKELLGITIMERSSFEKNPIDFLEAKGYKEVKKDLIIKLPKYSLFELENGRKRMLASAGELQKGNELALPSKYVNFLYLASHYEKLKGSPEDNEQKQLFVEQHKHYLDEIIEQISEFSKRVILADANLDKVLSAYNKHRDKPIREQAENIIHLFTLTNLGAPAAFKYFDTTIDRKRYTSTKEVLDATLIHQSITGLYETRIDLSQLGGDGGGGGEAAAKPAPGGMDPLQLLQPLEAEIKGTKLKAHWNSGATITCVPEAFLEDERPIQTMLIKTIHGEKQQDVYYLTFKVQGRKVEAEVLASPYDYILLNPSDVPWLMKKPLQLTVLVPLHEYQERLLQQTALPKEQKELLQKLFLKYDALWQHWENQVGHRRIKPHNIATGTLAPRPQKQYPINPKAKPSIQIVIDDLLKQGVLIQQNSTMNTPVYPVPKPDGKWRMVLDYREVNKTIPLIAAQNQHSAGILSSIYRGKYKTTLDLTNGFWAHPITPESYWLTAFTWQGKQYCWTRLPQGFLNSPALFNADVVDLLKEIPNVQAYVDDIYISHDDPQEHLEQLEKIFSILLNAGYVVSLKKSEIAQREVEFLGFNITKEGRGLTDTFKQKLLNITPPKDLKQLQSILGLLNFARNFIPNYSELVKPLYTIVAPANGKFISWTEDNSNQLQHIISVLNQADNLEERNPETRLIIKVNSSPSAGYIRYYNEGSKRPIMYVNYIFSKAEAKFTQTEKLLTTMHKGLIKAMDLAMGQEILVYSPIVSMTKIQRTPLPERKALPVRWITWMTYLEDPRIQFHYDKSLPELQQIPNVTEDVIAKTKHPSEFAMVFYTDGSAIKHPDVNKSHSAGMGIAQVQFIPEYKIVHQWSIPLGDHTAQLAEIAAVEFACKKALKISGPVLIVTDSFYVAESANKELPYWKSNGFLNNKKKPLRHVSKWKSIAECLQLKPDIIIMHEKGHQQPMTTLHTEGNNLADKLATQGSYVVHAGKRTADGSEFEKRTADGSEFESPKKKAKVE

SEQ ID NO: 464 - protein, 2176 aa, synthetic construct
MPAAKRVKLDGGDKKYSIGLDIGTNSVGWAVITDEYKVPSKKFKVLGNTDRHSIKKNLIGALLFDSGETAEATRLKRTARRRYTRRKNRICYLQEIFSNEMAKVDDSFFHRLEESFLVEEDKKHERHPIFGNIVDEVAYHEKYPTIYHLRKKLVDSTDKADLRLIYLALAHMIKFRGHFLIEGDLNPDNSDVDKLFIQLVQTYNQLFEENPINASGVDAKAILSARLSKSRRLENLIAQLPGEKKNGLFGNLIALSLGLTPNFKSNFDLAEDAKLQLSKDTYDDDLDNLLAQIGDQYADLFLAAKNLSDAILLSDILRVNTEITKAPLSASMIKRYDEHHQDLTLLKALVRQQLPEKYKEIFFDQSKNGYAGYIDGGASQEEFYKFIKPILEKMDGTEELLVKLNREDLLRKQRTFDNGSIPHQIHLGELHAILRRQEDFYPFLKDNREKIEKILTFRIPYYVGPLARGNSRFAWMTRKSEETITPWNFEEVVDKGASAQSFIERMTNFDKNLPNEKVLPKHSLLYEYFTVYNELTKVKYVTEGMRKPAFLSGEQKKAIVDLLFKTNRKVTVKQLKEDYFKKIECFDSVEISGVEDRFNASLGTYHDLLKIIKDKDFLDNEENEDILEDIVLTLTLFEDREMIEERLKTYAHLFDDKVMKQLKRRRYTGWGRLSRKLINGIRDKQSGKTILDFLKSDGFANRNFMQLIHDDSLTFKEDIQKAQVSGQGDSLHEHIANLAGSPAIKKGILQTVKVVDELVKVMGRHKPENIVIEMARENQTTQKGQKNSRERMKRIEEGIKELGSQILKEHPVENTQLQNEKLYLYYLQNGRDMYVDQELDINRLSDYDVDHIVPQSFLKDDSIDNKVLTRSDKARGKSDNVPSEEVVKKMKNYWRQLLNAKLITQRKFDNLTKAERGGLSELDKAGFIKRQLVETRQITKHVAQILDSRMNTKYDENDKLIREVKVITLKSKLVSDFRKDFQFYKVREINNYHHAHDAYLNAVVGTALIKKYPKLESEFVYGDYKVYDVRKMIAKSEQEIGKATAKYFFYSNIMNFFKTEITLANGEIRKRPLIETNGETGEIVWDKGRDFATVRKVLSMPQVNIVKKTEVQTGGFSKESILPKRNSDKLIARKKDWDPKKYGGFDSPTVAYSVLVVAKVEKGKSKKLKSVKELLGITIMERSSFEKNPIDFLEAKGYKEVKKDLIIKLPKYSLFELENGRKRMLASAGELQKGNELALPSKYVNFLYLASHYEKLKGSPEDNEQKQLFVEQHKHYLDEIIEQISEFSKRVILADANLDKVLSAYNKHRDKPIREQAENIIHLFTLTNLGAPAAFKYFDTTIDRKRYTSTKEVLDATLIHQSITGLYETRIDLSQLGGDGGGGSEAAAKPAPGGMDPLQLLQPLEAEIKGTKLKAHWNSGATITCVPEAFLEDERPIQTMLIKTIHGEKQQDVYYLTFKVQGRKVEAEVLASPYDYILLNPSDVPWLMKKPLQLTVLVPLHEYQERLLQQTALPKEQKELLQKLFLKYDALWQHWENQVGHRRIKPHNIATGTLAPRPQKQYPINPKAKPSIQIVIDDLLKQGVLIQQNSTMNTPVYPVPKPDGKWRMVLDYREVNKTIPLIAAQNQHSAGILSSIYRGKYKTTLDLTNGFWAHPITPESYWLTAFTWQGKQYCWTRLPQGFLNSPALFNADVVDLLKEIPNVQAYVDDIYISHDDPQEHLEQLEKIFSILLNAGYVVSLKKSEIAQREVEFLGFNITKEGRGLTDTFKQKLLNITPPKDLKQLQSILGLLNFARNFIPNYSELVKPLYTIVAPANGKFISWTEDNSNQLQHIISVLNQADNLEERNPETRLIIKVNSSPSAGYIRYYNEGSKRPIMYVNYIFSKAEAKFTQTEKLLTTMHKGLIKAMDLAMGQEILVYSPIVSMTKIQRTPLPERKALPVRWITWMTYLEDPRIQFHYDKSLPELQQIPNVTEDVIAKTKHPSEFAMVFYTDGSAIKHPDVNKSHSAGMGIAQVQFIPEYKIVHQWSIPLGDHTAQLAEIAAVEFACKKALKISGPVLIVTDSFYVAESANKELPYWKSNGFLNNKKKPLRHVSKWKSIAECLQLKPDIIIMHEKGHQQPMTTLHTEGNNLADKLATQGSYVVHAGKRTADGSEFEKRTADGSEFESPKKKAKVE

SEQ ID NO: 465 - protein, 2170 aa, synthetic construct
MPAAKRVKLDGGDKKYSIGLDIGTNSVGWAVITDEYKVPSKKFKVLGNTDRHSIKKNLIGALLFDSGETAEATRLKRTARRRYTRRKNRICYLQEIFSNEMAKVDDSFFHRLEESFLVEEDKKHERHPIFGNIVDEVAYHEKYPTIYHLRKKLVDSTDKADLRLIYLALAHMIKFRGHFLIEGDLNPDNSDVDKLFIQLVQTYNQLFEENPINASGVDAKAILSARLSKSRRLENLIAQLPGEKKNGLFGNLIALSLGLTPNFKSNFDLAEDAKLQLSKDTYDDDLDNLLAQIGDQYADLFLAAKNLSDAILLSDILRVNTEITKAPLSASMIKRYDEHHQDLTLLKALVRQQLPEKYKEIFFDQSKNGYAGYIDGGASQEEFYKFIKPILEKMDGTEELLVKLNREDLLRKQRTFDNGSIPHQIHLGELHAILRRQEDFYPFLKDNREKIEKILTFRIPYYVGPLARGNSRFAWMTRKSEETITPWNFEEVVDKGASAQSFIERMTNFDKNLPNEKVLPKHSLLYEYFTVYNELTKVKYVTEGMRKPAFLSGEQKKAIVDLLFKTNRKVTVKQLKEDYFKKIECFDSVEISGVEDRFNASLGTYHDLLKIIKDKDFLDNEENEDILEDIVLTLTLFEDREMIEERLKTYAHLFDDKVMKQLKRRRYTGWGRLSRKLINGIRDKQSGKTILDFLKSDGFANRNFMQLIHDDSLTFKEDIQKAQVSGQGDSLHEHIANLAGSPAIKKGILQTVKVVDELVKVMGRHKPENIVIEMARENQTTQKGQKNSRERMKRIEEGIKELGSQILKEHPVENTQLQNEKLYLYYLQNGRDMYVDQELDINRLSDYDVDHIVPQSFLKDDSIDNKVLTRSDKARGKSDNVPSEEVVKKMKNYWRQLLNAKLITQRKFDNLTKAERGGLSELDKAGFIKRQLVETRQITKHVAQILDSRMNTKYDENDKLIREVKVITLKSKLVSDFRKDFQFYKVREINNYHHAHDAYLNAVVGTALIKKYPKLESEFVYGDYKVYDVRKMIAKSEQEIGKATAKYFFYSNIMNFFKTEITLANGEIRKRPLIETNGETGEIVWDKGRDFATVRKVLSMPQVNIVKKTEVQTGGFSKESILPKRNSDKLIARKKDWDPKKYGGFDSPTVAYSVLVVAKVEKGKSKKLKSVKELLGITIMERSSFEKNPIDFLEAKGYKEVKKDLIIKLPKYSLFELENGRKRMLASAGELQKGNELALPSKYVNFLYLASHYEKLKGSPEDNEQKQLFVEQHKHYLDEIIEQISEFSKRVILADANLDKVLSAYNKHRDKPIREQAENIIHLFTLTNLGAPAAFKYFDTTIDRKRYTSTKEVLDATLIHQSITGLYETRIDLSQLGGDGGEAAAKGGMDPLQLLQPLEAEIKGTKLKAHWNSGATITCVPEAFLEDERPIQTMLIKTIHGEKQQDVYYLTFKVQGRKVEAEVLASPYDYILLNPSDVPWLMKKPLQLTVLVPLHEYQERLLQQTALPKEQKELLQKLFLKYDALWQHWENQVGHRRIKPHNIATGTLAPRPQKQYPINPKAKPSIQIVIDDLLKQGVLIQQNSTMNTPVYPVPKPDGKWRMVLDYREVNKTIPLIAAQNQHSAGILSSIYRGKYKTTLDLTNGFWAHPITPESYWLTAFTWQGKQYCWTRLPQGFLNSPALFNADVVDLLKEIPNVQAYVDDIYISHDDPQEHLEQLEKIFSILLNAGYVVSLKKSEIAQREVEFLGFNITKEGRGLTDTFKQKLLNITPPKDLKQLQSILGLLNFARNFIPNYSELVKPLYTIVAPANGKFISWTEDNSNQLQHIISVLNQADNLEERNPETRLIIKVNSSPSAGYIRYYNEGSKRPIMYVNYIFSKAEAKFTQTEKLLTTMHKGLIKAMDLAMGQEILVYSPIVSMTKIQRTPLPERKALPVRWITWMTYLEDPRIQFHYDKSLPELQQIPNVTEDVIAKTKHPSEFAMVFYTDGSAIKHPDVNKSHSAGMGIAQVQFIPEYKIVHQWSIPLGDHTAQLAEIAAVEFACKKALKISGPVLIVTDSFYVAESANKELPYWKSNGFLNNKKKPLRHVSKWKSIAECLQLKPDIIIMHEKGHQQPMTTLHTEGNNLADKLATQGSYVVHAGKRTADGSEFEKRTADGSEFESPKKKAKVE

SEQ ID NO: 466 - protein, 2176 aa, synthetic construct
MPAAKRVKLDGGDKKYSIGLDIGTNSVGWAVITDEYKVPSKKFKVLGNTDRHSIKKNLIGALLFDSGETAEATRLKRTARRRYTRRKNRICYLQEIFSNEMAKVDDSFFHRLEESFLVEEDKKHERHPIFGNIVDEVAYHEKYPTIYHLRKKLVDSTDKADLRLIYLALAHMIKFRGHFLIEGDLNPDNSDVDKLFIQLVQTYNQLFEENPINASGVDAKAILSARLSKSRRLENLIAQLPGEKKNGLFGNLIALSLGLTPNFKSNFDLAEDAKLQLSKDTYDDDLDNLLAQIGDQYADLFLAAKNLSDAILLSDILRVNTEITKAPLSASMIKRYDEHHQDLTLLKALVRQQLPEKYKEIFFDQSKNGYAGYIDGGASQEEFYKFIKPILEKMDGTEELLVKLNREDLLRKQRTFDNGSIPHQIHLGELHAILRRQEDFYPFLKDNREKIEKILTFRIPYYVGPLARGNSRFAWMTRKSEETITPWNFEEVVDKGASAQSFIERMTNFDKNLPNEKVLPKHSLLYEYFTVYNELTKVKYVTEGMRKPAFLSGEQKKAIVDLLFKTNRKVTVKQLKEDYFKKIECFDSVEISGVEDRFNASLGTYHDLLKIIKDKDFLDNEENEDILEDIVLTLTLFEDREMIEERLKTYAHLFDDKVMKQLKRRRYTGWGRLSRKLINGIRDKQSGKTILDFLKSDGFANRNFMQLIHDDSLTFKEDIQKAQVSGQGDSLHEHIANLAGSPAIKKGILQTVKVVDELVKVMGRHKPENIVIEMARENQTTQKGQKNSRERMKRIEEGIKELGSQILKEHPVENTQLQNEKLYLYYLQNGRDMYVDQELDINRLSDYDVDHIVPQSFLKDDSIDNKVLTRSDKARGKSDNVPSEEVVKKMKNYWRQLLNAKLITQRKFDNLTKAERGGLSELDKAGFIKRQLVETRQITKHVAQILDSRMNTKYDENDKLIREVKVITLKSKLVSDFRKDFQFYKVREINNYHHAHDAYLNAVVGTALIKKYPKLESEFVYGDYKVYDVRKMIAKSEQEIGKATAKYFFYSNIMNFFKTEITLANGEIRKRPLIETNGETGEIVWDKGRDFATVRKVLSMPQVNIVKKTEVQTGGFSKESILPKRNSDKLIARKKDWDPKKYGGFDSPTVAYSVLVVAKVEKGKSKKLKSVKELLGITIMERSSFEKNPIDFLEAKGYKEVKKDLIIKLPKYSLFELENGRKRMLASAGELQKGNELALPSKYVNFLYLASHYEKLKGSPEDNEQKQLFVEQHKHYLDEIIEQISEFSKRVILADANLDKVLSAYNKHRDKPIREQAENIIHLFTLTNLGAPAAFKYFDTTIDRKRYTSTKEVLDATLIHQSITGLYETRIDLSQLGGDGGGGSGSSEAAAKGGMDPLQLLQPLEAEIKGTKLKAHWNSGATITCVPEAFLEDERPIQTMLIKTIHGEKQQDVYYLTFKVQGRKVEAEVLASPYDYILLNPSDVPWLMKKPLQLTVLVPLHEYQERLLQQTALPKEQKELLQKLFLKYDALWQHWENQVGHRRIKPHNIATGTLAPRPQKQYPINPKAKPSIQIVIDDLLKQGVLIQQNSTMNTPVYPVPKPDGKWRMVLDYREVNKTIPLIAAQNQHSAGILSSIYRGKYKTTLDLTNGFWAHPITPESYWLTAFTWQGKQYCWTRLPQGFLNSPALFNADVVDLLKEIPNVQAYVDDIYISHDDPQEHLEQLEKIFSILLNAGYVVSLKKSEIAQREVEFLGFNITKEGRGLTDTFKQKLLNITPPKDLKQLQSILGLLNFARNFIPNYSELVKPLYTIVAPANGKFISWTEDNSNQLQHIISVLNQADNLEERNPETRLIIKVNSSPSAGYIRYYNEGSKRPIMYVNYIFSKAEAKFTQTEKLLTTMHKGLIKAMDLAMGQEILVYSPIVSMTKIQRTPLPERKALPVRWITWMTYLEDPRIQFHYDKSLPELQQIPNVTEDVIAKTKHPSEFAMVFYTDGSAIKHPDVNKSHSAGMGIAQVQFIPEYKIVHQWSIPLGDHTAQLAEIAAVEFACKKALKISGPVLIVTDSFYVAESANKELPYWKSNGFLNNKKKPLRHVSKWKSIAECLQLKPDIIIMHEKGHQQPMTTLHTEGNNLADKLATQGSYVVHAGKRTADGSEFEKRTADGSEFESPKKKAKVE

SEQ ID NO: 467 - protein, 2177 aa, synthetic construct
MPAAKRVKLDGGDKKYSIGLDIGTNSVGWAVITDEYKVPSKKFKVLGNTDRHSIKKNLIGALLFDSGETAEATRLKRTARRRYTRRKNRICYLQEIFSNEMAKVDDSFFHRLEESFLVEEDKKHERHPIFGNIVDEVAYHEKYPTIYHLRKKLVDSTDKADLRLIYLALAHMIKFRGHFLIEGDLNPDNSDVDKLFIQLVQTYNQLFEENPINASGVDAKAILSARLSKSRRLENLIAQLPGEKKNGLFGNLIALSLGLTPNFKSNFDLAEDAKLQLSKDTYDDDLDNLLAQIGDQYADLFLAAKNLSDAILLSDILRVNTEITKAPLSASMIKRYDEHHQDLTLLKALVRQQLPEKYKEIFFDQSKNGYAGYIDGGASQEEFYKFIKPILEKMDGTEELLVKLNREDLLRKQRTFDNGSIPHQIHLGELHAILRRQEDFYPFLKDNREKIEKILTFRIPYYVGPLARGNSRFAWMTRKSEETITPWNFEEVVDKGASAQSFIERMTNFDKNLPNEKVLPKHSLLYEYFTVYNELTKVKYVTEGMRKPAFLSGEQKKAIVDLLFKTNRKVTVKQLKEDYFKKIECFDSVEISGVEDRFNASLGTYHDLLKIIKDKDFLDNEENEDILEDIVLTLTLFEDREMIEERLKTYAHLFDDKVMKQLKRRRYTGWGRLSRKLINGIRDKQSGKTILDFLKSDGFANRNFMQLIHDDSLTFKEDIQKAQVSGQGDSLHEHIANLAGSPAIKKGILQTVKVVDELVKVMGRHKPENIVIEMARENQTTQKGQKNSRERMKRIEEGIKELGSQILKEHPVENTQLQNEKLYLYYLQNGRDMYVDQELDINRLSDYDVDHIVPQSFLKDDSIDNKVLTRSDKARGKSDNVPSEEVVKKMKNYWRQLLNAKLITQRKFDNLTKAERGGLSELDKAGFIKRQLVETRQITKHVAQILDSRMNTKYDENDKLIREVKVITLKSKLVSDFRKDFQFYKVREINNYHHAHDAYLNAVVGTALIKKYPKLESEFVYGDYKVYDVRKMIAKSEQEIGKATAKYFFYSNIMNFFKTEITLANGEIRKRPLIETNGETGEIVWDKGRDFATVRKVLSMPQVNIVKKTEVQTGGFSKESILPKRNSDKLIARKKDWDPKKYGGFDSPTVAYSVLVVAKVEKGKSKKLKSVKELLGITIMERSSFEKNPIDFLEAKGYKEVKKDLIIKLPKYSLFELENGRKRMLASAGELQKGNELALPSKYVNFLYLASHYEKLKGSPEDNEQKQLFVEQHKHYLDEIIEQISEFSKRVILADANLDKVLSAYNKHRDKPIREQAENIIHLFTLTNLGAPAAFKYFDTTIDRKRYTSTKEVLDATLIHQSITGLYETRIDLSQLGGDGGGSSGSSGSSGSSGGMDPLQLLQPLEAEIKGTKLKAHWNSGATITCVPEAFLEDERPIQTMLIKTIHGEKQQDVYYLTFKVQGRKVEAEVLASPYDYILLNPSDVPWLMKKPLQLTVLVPLHEYQERLLQQTALPKEQKELLQKLFLKYDALWQHWENQVGHRRIKPHNIATGTLAPRPQKQYPINPKAKPSIQIVIDDLLKQGVLIQQNSTMNTPVYPVPKPDGKWRMVLDYREVNKTIPLIAAQNQHSAGILSSIYRGKYKTTLDLTNGFWAHPITPESYWLTAFTWQGKQYCWTRLPQGFLNSPALFNADVVDLLKEIPNVQAYVDDIYISHDDPQEHLEQLEKIFSILLNAGYVVSLKKSEIAQREVEFLGFNITKEGRGLTDTFKQKLLNITPPKDLKQLQSILGLLNFARNFIPNYSELVKPLYTIVAPANGKFISWTEDNSNQLQHIISVLNQADNLEERNPETRLIIKVNSSPSAGYIRYYNEGSKRPIMYVNYIFSKAEAKFTQTEKLLTTMHKGLIKAMDLAMGQEILVYSPIVSMTKIQRTPLPERKALPVRWITWMTYLEDPRIQFHYDKSLPELQQIPNVTEDVIAKTKHPSEFAMVFYTDGSAIKHPDVNKSHSAGMGIAQVQFIPEYKIVHQWSIPLGDHTAQLAEIAAVEFACKKALKISGPVLIVTDSFYVAESANKELPYWKSNGFLNNKKKPLRHVSKWKSIAECLQLKPDIIIMHEKGHQQPMTTLHTEGNNLADKLATQGSYVVHAGKRTADGSEFEKRTADGSEFESPKKKAKVE

SEQ ID NO: 468 - protein, 2177 aa, synthetic construct
MPAAKRVKLDGGDKKYSIGLDIGTNSVGWAVITDEYKVPSKKFKVLGNTDRHSIKKNLIGALLFDSGETAEATRLKRTARRRYTRRKNRICYLQEIFSNEMAKVDDSFFHRLEESFLVEEDKKHERHPIFGNIVDEVAYHEKYPTIYHLRKKLVDSTDKADLRLIYLALAHMIKFRGHFLIEGDLNPDNSDVDKLFIQLVQTYNQLFEENPINASGVDAKAILSARLSKSRRLENLIAQLPGEKKNGLFGNLIALSLGLTPNFKSNFDLAEDAKLQLSKDTYDDDLDNLLAQIGDQYADLFLAAKNLSDAILLSDILRVNTEITKAPLSASMIKRYDEHHQDLTLLKALVRQQLPEKYKEIFFDQSKNGYAGYIDGGASQEEFYKFIKPILEKMDGTEELLVKLNREDLLRKQRTFDNGSIPHQIHLGELHAILRRQEDFYPFLKDNREKIEKILTFRIPYYVGPLARGNSRFAWMTRKSEETITPWNFEEVVDKGASAQSFIERMTNFDKNLPNEKVLPKHSLLYEYFTVYNELTKVKYVTEGMRKPAFLSGEQKKAIVDLLFKTNRKVTVKQLKEDYFKKIECFDSVEISGVEDRFNASLGTYHDLLKIIKDKDFLDNEENEDILEDIVLTLTLFEDREMIEERLKTYAHLFDDKVMKQLKRRRYTGWGRLSRKLINGIRDKQSGKTILDFLKSDGFANRNFMQLIHDDSLTFKEDIQKAQVSGQGDSLHEHIANLAGSPAIKKGILQTVKVVDELVKVMGRHKPENIVIEMARENQTTQKGQKNSRERMKRIEEGIKELGSQILKEHPVENTQLQNEKLYLYYLQNGRDMYVDQELDINRLSDYDVDHIVPQSFLKDDSIDNKVLTRSDKARGKSDNVPSEEVVKKMKNYWRQLLNAKLITQRKFDNLTKAERGGLSELDKAGFIKRQLVETRQITKHVAQILDSRMNTKYDENDKLIREVKVITLKSKLVSDFRKDFQFYKVREINNYHHAHDAYLNAVVGTALIKKYPKLESEFVYGDYKVYDVRKMIAKSEQEIGKATAKYFFYSNIMNFFKTEITLANGEIRKRPLIETNGETGEIVWDKGRDFATVRKVLSMPQVNIVKKTEVQTGGFSKESILPKRNSDKLIARKKDWDPKKYGGFDSPTVAYSVLVVAKVEKGKSKKLKSVKELLGITIMERSSFEKNPIDFLEAKGYKEVKKDLIIKLPKYSLFELENGRKRMLASAGELQKGNELALPSKYVNFLYLASHYEKLKGSPEDNEQKQLFVEQHKHYLDEIIEQISEFSKRVILADANLDKVLSAYNKHRDKPIREQAENIIHLFTLTNLGAPAAFKYFDTTIDRKRYTSTKEVLDATLIHQSITGLYETRIDLSQLGGDGGGSAGSAAGSGEFGGMDPLQLLQPLEAEIKGTKLKAHWNSGATITCVPEAFLEDERPIQTMLIKTIHGEKQQDVYYLTFKVQGRKVEAEVLASPYDYILLNPSDVPWLMKKPLQLTVLVPLHEYQERLLQQTALPKEQKELLQKLFLKYDALWQHWENQVGHRRIKPHNIATGTLAPRPQKQYPINPKAKPSIQIVIDDLLKQGVLIQQNSTMNTPVYPVPKPDGKWRMVLDYREVNKTIPLIAAQNQHSAGILSSIYRGKYKTTLDLTNGFWAHPITPESYWLTAFTWQGKQYCWTRLPQGFLNSPALFNADVVDLLKEIPNVQAYVDDIYISHDDPQEHLEQLEKIFSILLNAGYVVSLKKSEIAQREVEFLGFNITKEGRGLTDTFKQKLLNITPPKDLKQLQSILGLLNFARNFIPNYSELVKPLYTIVAPANGKFISWTEDNSNQLQHIISVLNQADNLEERNPETRLIIKVNSSPSAGYIRYYNEGSKRPIMYVNYIFSKAEAKFTQTEKLLTTMHKGLIKAMDLAMGQEILVYSPIVSMTKIQRTPLPERKALPVRWITWMTYLEDPRIQFHYDKSLPELQQIPNVTEDVIAKTKHPSEFAMVFYTDGSAIKHPDVNKSHSAGMGIAQVQFIPEYKIVHQWSIPLGDHTAQLAEIAAVEFACKKALKISGPVLIVTDSFYVAESANKELPYWKSNGFLNNKKKPLRHVSKWKSIAECLQLKPDIIIMHEKGHQQPMTTLHTEGNNLADKLATQGSYVVHAGKRTADGSEFEKRTADGSEFESPKKKAKVE

SEQ ID NO: 469 - protein, 2171 aa, synthetic construct
MPAAKRVKLDGGDKKYSIGLDIGTNSVGWAVITDEYKVPSKKFKVLGNTDRHSIKKNLIGALLFDSGETAEATRLKRTARRRYTRRKNRICYLQEIFSNEMAKVDDSFFHRLEESFLVEEDKKHERHPIFGNIVDEVAYHEKYPTIYHLRKKLVDSTDKADLRLIYLALAHMIKFRGHFLIEGDLNPDNSDVDKLFIQLVQTYNQLFEENPINASGVDAKAILSARLSKSRRLENLIAQLPGEKKNGLFGNLIALSLGLTPNFKSNFDLAEDAKLQLSKDTYDDDLDNLLAQIGDQYADLFLAAKNLSDAILLSDILRVNTEITKAPLSASMIKRYDEHHQDLTLLKALVRQQLPEKYKEIFFDQSKNGYAGYIDGGASQEEFYKFIKPILEKMDGTEELLVKLNREDLLRKQRTFDNGSIPHQIHLGELHAILRRQEDFYPFLKDNREKIEKILTFRIPYYVGPLARGNSRFAWMTRKSEETITPWNFEEVVDKGASAQSFIERMTNFDKNLPNEKVLPKHSLLYEYFTVYNELTKVKYVTEGMRKPAFLSGEQKKAIVDLLFKTNRKVTVKQLKEDYFKKIECFDSVEISGVEDRFNASLGTYHDLLKIIKDKDFLDNEENEDILEDIVLTLTLFEDREMIEERLKTYAHLFDDKVMKQLKRRRYTGWGRLSRKLINGIRDKQSGKTILDFLKSDGFANRNFMQLIHDDSLTFKEDIQKAQVSGQGDSLHEHIANLAGSPAIKKGILQTVKVVDELVKVMGRHKPENIVIEMARENQTTQKGQKNSRERMKRIEEGIKELGSQILKEHPVENTQLQNEKLYLYYLQNGRDMYVDQELDINRLSDYDVDHIVPQSFLKDDSIDNKVLTRSDKARGKSDNVPSEEVVKKMKNYWRQLLNAKLITQRKFDNLTKAERGGLSELDKAGFIKRQLVETRQITKHVAQILDSRMNTKYDENDKLIREVKVITLKSKLVSDFRKDFQFYKVREINNYHHAHDAYLNAVVGTALIKKYPKLESEFVYGDYKVYDVRKMIAKSEQEIGKATAKYFFYSNIMNFFKTEITLANGEIRKRPLIETNGETGEIVWDKGRDFATVRKVLSMPQVNIVKKTEVQTGGFSKESILPKRNSDKLIARKKDWDPKKYGGFDSPTVAYSVLVVAKVEKGKSKKLKSVKELLGITIMERSSFEKNPIDFLEAKGYKEVKKDLIIKLPKYSLFELENGRKRMLASAGELQKGNELALPSKYVNFLYLASHYEKLKGSPEDNEQKQLFVEQHKHYLDEIIEQISEFSKRVILADANLDKVLSAYNKHRDKPIREQAENIIHLFTLTNLGAPAAFKYFDTTIDRKRYTSTKEVLDATLIHQSITGLYETRIDLSQLGGDGGGGSGGSGGMDPLQLLQPLEAEIKGTKLKAHWNSGATITCVPEAFLEDERPIQTMLIKTIHGEKQQDVYYLTFKVQGRKVEAEVLASPYDYILLNPSDVPWLMKKPLQLTVLVPLHEYQERLLQQTALPKEQKELLQKLFLKYDALWQHWENQVGHRRIKPHNIATGTLAPRPQKQYPINPKAKPSIQIVIDDLLKQGVLIQQNSTMNTPVYPVPKPDGKWRMVLDYREVNKTIPLIAAQNQHSAGILSSIYRGKYKTTLDLTNGFWAHPITPESYWLTAFTWQGKQYCWTRLPQGFLNSPALFNADVVDLLKEIPNVQAYVDDIYISHDDPQEHLEQLEKIFSILLNAGYVVSLKKSEIAQREVEFLGFNITKEGRGLTDTFKQKLLNITPPKDLKQLQSILGLLNFARNFIPNYSELVKPLYTIVAPANGKFISWTEDNSNQLQHIISVLNQADNLEERNPETRLIIKVNSSPSAGYIRYYNEGSKRPIMYVNYIFSKAEAKFTQTEKLLTTMHKGLIKAMDLAMGQEILVYSPIVSMTKIQRTPLPERKALPVRWITWMTYLEDPRIQFHYDKSLPELQQIPNVTEDVIAKTKHPSEFAMVFYTDGSAIKHPDVNKSHSAGMGIAQVQFIPEYKIVHQWSIPLGDHTAQLAEIAAVEFACKKALKISGPVLIVTDSFYVAESANKELPYWKSNGFLNNKKKPLRHVSKWKSIAECLQLKPDIIIMHEKGHQQPMTTLHTEGNNLADKLATQGSYVVHAGKRTADGSEFEKRTADGSEFESPKKKAKVE

SEQ ID NO: 470 - protein, 2176 aa, synthetic construct
MPAAKRVKLDGGDKKYSIGLDIGTNSVGWAVITDEYKVPSKKFKVLGNTDRHSIKKNLIGALLFDSGETAEATRLKRTARRRYTRRKNRICYLQEIFSNEMAKVDDSFFHRLEESFLVEEDKKHERHPIFGNIVDEVAYHEKYPTIYHLRKKLVDSTDKADLRLIYLALAHMIKFRGHFLIEGDLNPDNSDVDKLFIQLVQTYNQLFEENPINASGVDAKAILSARLSKSRRLENLIAQLPGEKKNGLFGNLIALSLGLTPNFKSNFDLAEDAKLQLSKDTYDDDLDNLLAQIGDQYADLFLAAKNLSDAILLSDILRVNTEITKAPLSASMIKRYDEHHQDLTLLKALVRQQLPEKYKEIFFDQSKNGYAGYIDGGASQEEFYKFIKPILEKMDGTEELLVKLNREDLLRKQRTFDNGSIPHQIHLGELHAILRRQEDFYPFLKDNREKIEKILTFRIPYYVGPLARGNSRFAWMTRKSEETITPWNFEEVVDKGASAQSFIERMTNFDKNLPNEKVLPKHSLLYEYFTVYNELTKVKYVTEGMRKPAFLSGEQKKAIVDLLFKTNRKVTVKQLKEDYFKKIECFDSVEISGVEDRFNASLGTYHDLLKIIKDKDFLDNEENEDILEDIVLTLTLFEDREMIEERLKTYAHLFDDKVMKQLKRRRYTGWGRLSRKLINGIRDKQSGKTILDFLKSDGFANRNFMQLIHDDSLTFKEDIQKAQVSGQGDSLHEHIANLAGSPAIKKGILQTVKVVDELVKVMGRHKPENIVIEMARENQTTQKGQKNSRERMKRIEEGIKELGSQILKEHPVENTQLQNEKLYLYYLQNGRDMYVDQELDINRLSDYDVDHIVPQSFLKDDSIDNKVLTRSDKARGKSDNVPSEEVVKKMKNYWRQLLNAKLITQRKFDNLTKAERGGLSELDKAGFIKRQLVETRQITKHVAQILDSRMNTKYDENDKLIREVKVITLKSKLVSDFRKDFQFYKVREINNYHHAHDAYLNAVVGTALIKKYPKLESEFVYGDYKVYDVRKMIAKSEQEIGKATAKYFFYSNIMNFFKTEITLANGEIRKRPLIETNGETGEIVWDKGRDFATVRKVLSMPQVNIVKKTEVQTGGFSKESILPKRNSDKLIARKKDWDPKKYGGFDSPTVAYSVLVVAKVEKGKSKKLKSVKELLGITIMERSSFEKNPIDFLEAKGYKEVKKDLIIKLPKYSLFELENGRKRMLASAGELQKGNELALPSKYVNFLYLASHYEKLKGSPEDNEQKQLFVEQHKHYLDEIIEQISEFSKRVILADANLDKVLSAYNKHRDKPIREQAENIIHLFTLTNLGAPAAFKYFDTTIDRKRYTSTKEVLDATLIHQSITGLYETRIDLSQLGGDGGGGGEAAAKGGSGGMDPLQLLQPLEAEIKGTKLKAHWNSGATITCVPEAFLEDERPIQTMLIKTIHGEKQQDVYYLTFKVQGRKVEAEVLASPYDYILLNPSDVPWLMKKPLQLTVLVPLHEYQERLLQQTALPKEQKELLQKLFLKYDALWQHWENQVGHRRIKPHNIATGTLAPRPQKQYPINPKAKPSIQIVIDDLLKQGVLIQQNSTMNTPVYPVPKPDGKWRMVLDYREVNKTIPLIAAQNQHSAGILSSIYRGKYKTTLDLTNGFWAHPITPESYWLTAFTWQGKQYCWTRLPQGFLNSPALFNADVVDLLKEIPNVQAYVDDIYISHDDPQEHLEQLEKIFSILLNAGYVVSLKKSEIAQREVEFLGFNITKEGRGLTDTFKQKLLNITPPKDLKQLQSILGLLNFARNFIPNYSELVKPLYTIVAPANGKFISWTEDNSNQLQHIISVLNQADNLEERNPETRLIIKVNSSPSAGYIRYYNEGSKRPIMYVNYIFSKAEAKFTQTEKLLTTMHKGLIKAMDLAMGQEILVYSPIVSMTKIQRTPLPERKALPVRWITWMTYLEDPRIQFHYDKSLPELQQIPNVTEDVIAKTKHPSEFAMVFYTDGSAIKHPDVNKSHSAGMGIAQVQFIPEYKIVHQWSIPLGDHTAQLAEIAAVEFACKKALKISGPVLIVTDSFYVAESANKELPYWKSNGFLNNKKKPLRHVSKWKSIAECLQLKPDIIIMHEKGHQQPMTTLHTEGNNLADKLATQGSYVVHAGKRTADGSEFEKRTADGSEFESPKKKAKVE

SEQ ID NO: 471 - protein, 2174 aa, synthetic construct
MPAAKRVKLDGGDKKYSIGLDIGTNSVGWAVITDEYKVPSKKFKVLGNTDRHSIKKNLIGALLFDSGETAEATRLKRTARRRYTRRKNRICYLQEIFSNEMAKVDDSFFHRLEESFLVEEDKKHERHPIFGNIVDEVAYHEKYPTIYHLRKKLVDSTDKADLRLIYLALAHMIKFRGHFLIEGDLNPDNSDVDKLFIQLVQTYNQLFEENPINASGVDAKAILSARLSKSRRLENLIAQLPGEKKNGLFGNLIALSLGLTPNFKSNFDLAEDAKLQLSKDTYDDDLDNLLAQIGDQYADLFLAAKNLSDAILLSDILRVNTEITKAPLSASMIKRYDEHHQDLTLLKALVRQQLPEKYKEIFFDQSKNGYAGYIDGGASQEEFYKFIKPILEKMDGTEELLVKLNREDLLRKQRTFDNGSIPHQIHLGELHAILRRQEDFYPFLKDNREKIEKILTFRIPYYVGPLARGNSRFAWMTRKSEETITPWNFEEVVDKGASAQSFIERMTNFDKNLPNEKVLPKHSLLYEYFTVYNELTKVKYVTEGMRKPAFLSGEQKKAIVDLLFKTNRKVTVKQLKEDYFKKIECFDSVEISGVEDRFNASLGTYHDLLKIIKDKDFLDNEENEDILEDIVLTLTLFEDREMIEERLKTYAHLFDDKVMKQLKRRRYTGWGRLSRKLINGIRDKQSGKTILDFLKSDGFANRNFMQLIHDDSLTFKEDIQKAQVSGQGDSLHEHIANLAGSPAIKKGILQTVKVVDELVKVMGRHKPENIVIEMARENQTTQKGQKNSRERMKRIEEGIKELGSQILKEHPVENTQLQNEKLYLYYLQNGRDMYVDQELDINRLSDYDVDHIVPQSFLKDDSIDNKVLTRSDKARGKSDNVPSEEVVKKMKNYWRQLLNAKLITQRKFDNLTKAERGGLSELDKAGFIKRQLVETRQITKHVAQILDSRMNTKYDENDKLIREVKVITLKSKLVSDFRKDFQFYKVREINNYHHAHDAYLNAVVGTALIKKYPKLESEFVYGDYKVYDVRKMIAKSEQEIGKATAKYFFYSNIMNFFKTEITLANGEIRKRPLIETNGETGEIVWDKGRDFATVRKVLSMPQVNIVKKTEVQTGGFSKESILPKRNSDKLIARKKDWDPKKYGGFDSPTVAYSVLVVAKVEKGKSKKLKSVKELLGITIMERSSFEKNPIDFLEAKGYKEVKKDLIIKLPKYSLFELENGRKRMLASAGELQKGNELALPSKYVNFLYLASHYEKLKGSPEDNEQKQLFVEQHKHYLDEIIEQISEFSKRVILADANLDKVLSAYNKHRDKPIREQAENIIHLFTLTNLGAPAAFKYFDTTIDRKRYTSTKEVLDATLIHQSITGLYETRIDLSQLGGDGGPAPAPAPAPGGMDPLQLLQPLEAEIKGTKLKAHWNSGATITCVPEAFLEDERPIQTMLIKTIHGEKQQDVYYLTFKVQGRKVEAEVLASPYDYILLNPSDVPWLMKKPLQLTVLVPLHEYQERLLQQTALPKEQKELLQKLFLKYDALWQHWENQVGHRRIKPHNIATGTLAPRPQKQYPINPKAKPSIQIVIDDLLKQGVLIQQNSTMNTPVYPVPKPDGKWRMVLDYREVNKTIPLIAAQNQHSAGILSSIYRGKYKTTLDLTNGFWAHPITPESYWLTAFTWQGKQYCWTRLPQGFLNSPALFNADVVDLLKEIPNVQAYVDDIYISHDDPQEHLEQLEKIFSILLNAGYVVSLKKSEIAQREVEFLGFNITKEGRGLTDTFKQKLLNITPPKDLKQLQSILGLLNFARNFIPNYSELVKPLYTIVAPANGKFISWTEDNSNQLQHIISVLNQADNLEERNPETRLIIKVNSSPSAGYIRYYNEGSKRPIMYVNYIFSKAEAKFTQTEKLLTTMHKGLIKAMDLAMGQEILVYSPIVSMTKIQRTPLPERKALPVRWITWMTYLEDPRIQFHYDKSLPELQQIPNVTEDVIAKTKHPSEFAMVFYTDGSAIKHPDVNKSHSAGMGIAQVQFIPEYKIVHQWSIPLGDHTAQLAEIAAVEFACKKALKISGPVLIVTDSFYVAESANKELPYWKSNGFLNNKKKPLRHVSKWKSIAECLQLKPDIIIMHEKGHQQPMTTLHTEGNNLADKLATQGSYVVHAGKRTADGSEFEKRTADGSEFESPKKKAKVE

SEQ ID NO: 472 - protein, 2174 aa, synthetic construct
MPAAKRVKLDGGDKKYSIGLDIGTNSVGWAVITDEYKVPSKKFKVLGNTDRHSIKKNLIGALLFDSGETAEATRLKRTARRRYTRRKNRICYLQEIFSNEMAKVDDSFFHRLEESFLVEEDKKHERHPIFGNIVDEVAYHEKYPTIYHLRKKLVDSTDKADLRLIYLALAHMIKFRGHFLIEGDLNPDNSDVDKLFIQLVQTYNQLFEENPINASGVDAKAILSARLSKSRRLENLIAQLPGEKKNGLFGNLIALSLGLTPNFKSNFDLAEDAKLQLSKDTYDDDLDNLLAQIGDQYADLFLAAKNLSDAILLSDILRVNTEITKAPLSASMIKRYDEHHQDLTLLKALVRQQLPEKYKEIFFDQSKNGYAGYIDGGASQEEFYKFIKPILEKMDGTEELLVKLNREDLLRKQRTFDNGSIPHQIHLGELHAILRRQEDFYPFLKDNREKIEKILTFRIPYYVGPLARGNSRFAWMTRKSEETITPWNFEEVVDKGASAQSFIERMTNFDKNLPNEKVLPKHSLLYEYFTVYNELTKVKYVTEGMRKPAFLSGEQKKAIVDLLFKTNRKVTVKQLKEDYFKKIECFDSVEISGVEDRFNASLGTYHDLLKIIKDKDFLDNEENEDILEDIVLTLTLFEDREMIEERLKTYAHLFDDKVMKQLKRRRYTGWGRLSRKLINGIRDKQSGKTILDFLKSDGFANRNFMQLIHDDSLTFKEDIQKAQVSGQGDSLHEHIANLAGSPAIKKGILQTVKVVDELVKVMGRHKPENIVIEMARENQTTQKGQKNSRERMKRIEEGIKELGSQILKEHPVENTQLQNEKLYLYYLQNGRDMYVDQELDINRLSDYDVDHIVPQSFLKDDSIDNKVLTRSDKARGKSDNVPSEEVVKKMKNYWRQLLNAKLITQRKFDNLTKAERGGLSELDKAGFIKRQLVETRQITKHVAQILDSRMNTKYDENDKLIREVKVITLKSKLVSDFRKDFQFYKVREINNYHHAHDAYLNAVVGTALIKKYPKLESEFVYGDYKVYDVRKMIAKSEQEIGKATAKYFFYSNIMNFFKTEITLANGEIRKRPLIETNGETGEIVWDKGRDFATVRKVLSMPQVNIVKKTEVQTGGFSKESILPKRNSDKLIARKKDWDPKKYGGFDSPTVAYSVLVVAKVEKGKSKKLKSVKELLGITIMERSSFEKNPIDFLEAKGYKEVKKDLIIKLPKYSLFELENGRKRMLASAGELQKGNELALPSKYVNFLYLASHYEKLKGSPEDNEQKQLFVEQHKHYLDEIIEQISEFSKRVILADANLDKVLSAYNKHRDKPIREQAENIIHLFTLTNLGAPAAFKYFDTTIDRKRYTSTKEVLDATLIHQSITGLYETRIDLSQLGGDGGGSSGGSGGGGGMDPLQLLQPLEAEIKGTKLKAHWNSGATITCVPEAFLEDERPIQTMLIKTIHGEKQQDVYYLTFKVQGRKVEAEVLASPYDYILLNPSDVPWLMKKPLQLTVLVPLHEYQERLLQQTALPKEQKELLQKLFLKYDALWQHWENQVGHRRIKPHNIATGTLAPRPQKQYPINPKAKPSIQIVIDDLLKQGVLIQQNSTMNTPVYPVPKPDGKWRMVLDYREVNKTIPLIAAQNQHSAGILSSIYRGKYKTTLDLTNGFWAHPITPESYWLTAFTWQGKQYCWTRLPQGFLNSPALFNADVVDLLKEIPNVQAYVDDIYISHDDPQEHLEQLEKIFSILLNAGYVVSLKKSEIAQREVEFLGFNITKEGRGLTDTFKQKLLNITPPKDLKQLQSILGLLNFARNFIPNYSELVKPLYTIVAPANGKFISWTEDNSNQLQHIISVLNQADNLEERNPETRLIIKVNSSPSAGYIRYYNEGSKRPIMYVNYIFSKAEAKFTQTEKLLTTMHKGLIKAMDLAMGQEILVYSPIVSMTKIQRTPLPERKALPVRWITWMTYLEDPRIQFHYDKSLPELQQIPNVTEDVIAKTKHPSEFAMVFYTDGSAIKHPDVNKSHSAGMGIAQVQFIPEYKIVHQWSIPLGDHTAQLAEIAAVEFACKKALKISGPVLIVTDSFYVAESANKELPYWKSNGFLNNKKKPLRHVSKWKSIAECLQLKPDIIIMHEKGHQQPMTTLHTEGNNLADKLATQGSYVVHAGKRTADGSEFEKRTADGSEFESPKKKAKVE

SEQ ID NO: 473 - protein, 2174 aa, synthetic construct
MPAAKRVKLDGGDKKYSIGLDIGTNSVGWAVITDEYKVPSKKFKVLGNTDRHSIKKNLIGALLFDSGETAEATRLKRTARRRYTRRKNRICYLQEIFSNEMAKVDDSFFHRLEESFLVEEDKKHERHPIFGNIVDEVAYHEKYPTIYHLRKKLVDSTDKADLRLIYLALAHMIKFRGHFLIEGDLNPDNSDVDKLFIQLVQTYNQLFEENPINASGVDAKAILSARLSKSRRLENLIAQLPGEKKNGLFGNLIALSLGLTPNFKSNFDLAEDAKLQLSKDTYDDDLDNLLAQIGDQYADLFLAAKNLSDAILLSDILRVNTEITKAPLSASMIKRYDEHHQDLTLLKALVRQQLPEKYKEIFFDQSKNGYAGYIDGGASQEEFYKFIKPILEKMDGTEELLVKLNREDLLRKQRTFDNGSIPHQIHLGELHAILRRQEDFYPFLKDNREKIEKILTFRIPYYVGPLARGNSRFAWMTRKSEETITPWNFEEVVDKGASAQSFIERMTNFDKNLPNEKVLPKHSLLYEYFTVYNELTKVKYVTEGMRKPAFLSGEQKKAIVDLLFKTNRKVTVKQLKEDYFKKIECFDSVEISGVEDRFNASLGTYHDLLKIIKDKDFLDNEENEDILEDIVLTLTLFEDREMIEERLKTYAHLFDDKVMKQLKRRRYTGWGRLSRKLINGIRDKQSGKTILDFLKSDGFANRNFMQLIHDDSLTFKEDIQKAQVSGQGDSLHEHIANLAGSPAIKKGILQTVKVVDELVKVMGRHKPENIVIEMARENQTTQKGQKNSRERMKRIEEGIKELGSQILKEHPVENTQLQNEKLYLYYLQNGRDMYVDQELDINRLSDYDVDHIVPQSFLKDDSIDNKVLTRSDKARGKSDNVPSEEVVKKMKNYWRQLLNAKLITQRKFDNLTKAERGGLSELDKAGFIKRQLVETRQITKHVAQILDSRMNTKYDENDKLIREVKVITLKSKLVSDFRKDFQFYKVREINNYHHAHDAYLNAVVGTALIKKYPKLESEFVYGDYKVYDVRKMIAKSEQEIGKATAKYFFYSNIMNFFKTEITLANGEIRKRPLIETNGETGEIVWDKGRDFATVRKVLSMPQVNIVKKTEVQTGGFSKESILPKRNSDKLIARKKDWDPKKYGGFDSPTVAYSVLVVAKVEKGKSKKLKSVKELLGITIMERSSFEKNPIDFLEAKGYKEVKKDLIIKLPKYSLFELENGRKRMLASAGELQKGNELALPSKYVNFLYLASHYEKLKGSPEDNEQKQLFVEQHKHYLDEIIEQISEFSKRVILADANLDKVLSAYNKHRDKPIREQAENIIHLFTLTNLGAPAAFKYFDTTIDRKRYTSTKEVLDATLIHQSITGLYETRIDLSQLGGDGGPAPGSSGGSGGMDPLQLLQPLEAEIKGTKLKAHWNSGATITCVPEAFLEDERPIQTMLIKTIHGEKQQDVYYLTFKVQGRKVEAEVLASPYDYILLNPSDVPWLMKKPLQLTVLVPLHEYQERLLQQTALPKEQKELLQKLFLKYDALWQHWENQVGHRRIKPHNIATGTLAPRPQKQYPINPKAKPSIQIVIDDLLKQGVLIQQNSTMNTPVYPVPKPDGKWRMVLDYREVNKTIPLIAAQNQHSAGILSSIYRGKYKTTLDLTNGFWAHPITPESYWLTAFTWQGKQYCWTRLPQGFLNSPALFNADVVDLLKEIPNVQAYVDDIYISHDDPQEHLEQLEKIFSILLNAGYVVSLKKSEIAQREVEFLGFNITKEGRGLTDTFKQKLLNITPPKDLKQLQSILGLLNFARNFIPNYSELVKPLYTIVAPANGKFISWTEDNSNQLQHIISVLNQADNLEERNPETRLIIKVNSSPSAGYIRYYNEGSKRPIMYVNYIFSKAEAKFTQTEKLLTTMHKGLIKAMDLAMGQEILVYSPIVSMTKIQRTPLPERKALPVRWITWMTYLEDPRIQFHYDKSLPELQQIPNVTEDVIAKTKHPSEFAMVFYTDGSAIKHPDVNKSHSAGMGIAQVQFIPEYKIVHQWSIPLGDHTAQLAEIAAVEFACKKALKISGPVLIVTDSFYVAESANKELPYWKSNGFLNNKKKPLRHVSKWKSIAECLQLKPDIIIMHEKGHQQPMTTLHTEGNNLADKLATQGSYVVHAGKRTADGSEFEKRTADGSEFESPKKKAKVE

SEQ ID NO: 474 - protein, 2176 aa, synthetic construct
MPAAKRVKLDGGDKKYSIGLDIGTNSVGWAVITDEYKVPSKKFKVLGNTDRHSIKKNLIGALLFDSGETAEATRLKRTARRRYTRRKNRICYLQEIFSNEMAKVDDSFFHRLEESFLVEEDKKHERHPIFGNIVDEVAYHEKYPTIYHLRKKLVDSTDKADLRLIYLALAHMIKFRGHFLIEGDLNPDNSDVDKLFIQLVQTYNQLFEENPINASGVDAKAILSARLSKSRRLENLIAQLPGEKKNGLFGNLIALSLGLTPNFKSNFDLAEDAKLQLSKDTYDDDLDNLLAQIGDQYADLFLAAKNLSDAILLSDILRVNTEITKAPLSASMIKRYDEHHQDLTLLKALVRQQLPEKYKEIFFDQSKNGYAGYIDGGASQEEFYKFIKPILEKMDGTEELLVKLNREDLLRKQRTFDNGSIPHQIHLGELHAILRRQEDFYPFLKDNREKIEKILTFRIPYYVGPLARGNSRFAWMTRKSEETITPWNFEEVVDKGASAQSFIERMTNFDKNLPNEKVLPKHSLLYEYFTVYNELTKVKYVTEGMRKPAFLSGEQKKAIVDLLFKTNRKVTVKQLKEDYFKKIECFDSVEISGVEDRFNASLGTYHDLLKIIKDKDFLDNEENEDILEDIVLTLTLFEDREMIEERLKTYAHLFDDKVMKQLKRRRYTGWGRLSRKLINGIRDKQSGKTILDFLKSDGFANRNFMQLIHDDSLTFKEDIQKAQVSGQGDSLHEHIANLAGSPAIKKGILQTVKVVDELVKVMGRHKPENIVIEMARENQTTQKGQKNSRERMKRIEEGIKELGSQILKEHPVENTQLQNEKLYLYYLQNGRDMYVDQELDINRLSDYDVDHIVPQSFLKDDSIDNKVLTRSDKARGKSDNVPSEEVVKKMKNYWRQLLNAKLITQRKFDNLTKAERGGLSELDKAGFIKRQLVETRQITKHVAQILDSRMNTKYDENDKLIREVKVITLKSKLVSDFRKDFQFYKVREINNYHHAHDAYLNAVVGTALIKKYPKLESEFVYGDYKVYDVRKMIAKSEQEIGKATAKYFFYSNIMNFFKTEITLANGEIRKRPLIETNGETGEIVWDKGRDFATVRKVLSMPQVNIVKKTEVQTGGFSKESILPKRNSDKLIARKKDWDPKKYGGFDSPTVAYSVLVVAKVEKGKSKKLKSVKELLGITIMERSSFEKNPIDFLEAKGYKEVKKDLIIKLPKYSLFELENGRKRMLASAGELQKGNELALPSKYVNFLYLASHYEKLKGSPEDNEQKQLFVEQHKHYLDEIIEQISEFSKRVILADANLDKVLSAYNKHRDKPIREQAENIIHLFTLTNLGAPAAFKYFDTTIDRKRYTSTKEVLDATLIHQSITGLYETRIDLSQLGGDGGPAPGGSEAAAKGGMDPLQLLQPLEAEIKGTKLKAHWNSGATITCVPEAFLEDERPIQTMLIKTIHGEKQQDVYYLTFKVQGRKVEAEVLASPYDYILLNPSDVPWLMKKPLQLTVLVPLHEYQERLLQQTALPKEQKELLQKLFLKYDALWQHWENQVGHRRIKPHNIATGTLAPRPQKQYPINPKAKPSIQIVIDDLLKQGVLIQQNSTMNTPVYPVPKPDGKWRMVLDYREVNKTIPLIAAQNQHSAGILSSIYRGKYKTTLDLTNGFWAHPITPESYWLTAFTWQGKQYCWTRLPQGFLNSPALFNADVVDLLKEIPNVQAYVDDIYISHDDPQEHLEQLEKIFSILLNAGYVVSLKKSEIAQREVEFLGFNITKEGRGLTDTFKQKLLNITPPKDLKQLQSILGLLNFARNFIPNYSELVKPLYTIVAPANGKFISWTEDNSNQLQHIISVLNQADNLEERNPETRLIIKVNSSPSAGYIRYYNEGSKRPIMYVNYIFSKAEAKFTQTEKLLTTMHKGLIKAMDLAMGQEILVYSPIVSMTKIQRTPLPERKALPVRWITWMTYLEDPRIQFHYDKSLPELQQIPNVTEDVIAKTKHPSEFAMVFYTDGSAIKHPDVNKSHSAGMGIAQVQFIPEYKIVHQWSIPLGDHTAQLAEIAAVEFACKKALKISGPVLIVTDSFYVAESANKELPYWKSNGFLNNKKKPLRHVSKWKSIAECLQLKPDIIIMHEKGHQQPMTTLHTEGNNLADKLATQGSYVVHAGKRTADGSEFEKRTADGSEFESPKKKAKVE

SEQ ID NO: 475 - protein, 2176 aa, synthetic construct
MPAAKRVKLDGGDKKYSIGLDIGTNSVGWAVITDEYKVPSKKFKVLGNTDRHSIKKNLIGALLFDSGETAEATRLKRTARRRYTRRKNRICYLQEIFSNEMAKVDDSFFHRLEESFLVEEDKKHERHPIFGNIVDEVAYHEKYPTIYHLRKKLVDSTDKADLRLIYLALAHMIKFRGHFLIEGDLNPDNSDVDKLFIQLVQTYNQLFEENPINASGVDAKAILSARLSKSRRLENLIAQLPGEKKNGLFGNLIALSLGLTPNFKSNFDLAEDAKLQLSKDTYDDDLDNLLAQIGDQYADLFLAAKNLSDAILLSDILRVNTEITKAPLSASMIKRYDEHHQDLTLLKALVRQQLPEKYKEIFFDQSKNGYAGYIDGGASQEEFYKFIKPILEKMDGTEELLVKLNREDLLRKQRTFDNGSIPHQIHLGELHAILRRQEDFYPFLKDNREKIEKILTFRIPYYVGPLARGNSRFAWMTRKSEETITPWNFEEVVDKGASAQSFIERMTNFDKNLPNEKVLPKHSLLYEYFTVYNELTKVKYVTEGMRKPAFLSGEQKKAIVDLLFKTNRKVTVKQLKEDYFKKIECFDSVEISGVEDRFNASLGTYHDLLKIIKDKDFLDNEENEDILEDIVLTLTLFEDREMIEERLKTYAHLFDDKVMKQLKRRRYTGWGRLSRKLINGIRDKQSGKTILDFLKSDGFANRNFMQLIHDDSLTFKEDIQKAQVSGQGDSLHEHIANLAGSPAIKKGILQTVKVVDELVKVMGRHKPENIVIEMARENQTTQKGQKNSRERMKRIEEGIKELGSQILKEHPVENTQLQNEKLYLYYLQNGRDMYVDQELDINRLSDYDVDHIVPQSFLKDDSIDNKVLTRSDKARGKSDNVPSEEVVKKMKNYWRQLLNAKLITQRKFDNLTKAERGGLSELDKAGFIKRQLVETRQITKHVAQILDSRMNTKYDENDKLIREVKVITLKSKLVSDFRKDFQFYKVREINNYHHAHDAYLNAVVGTALIKKYPKLESEFVYGDYKVYDVRKMIAKSEQEIGKATAKYFFYSNIMNFFKTEITLANGEIRKRPLIETNGETGEIVWDKGRDFATVRKVLSMPQVNIVKKTEVQTGGFSKESILPKRNSDKLIARKKDWDPKKYGGFDSPTVAYSVLVVAKVEKGKSKKLKSVKELLGITIMERSSFEKNPIDFLEAKGYKEVKKDLIIKLPKYSLFELENGRKRMLASAGELQKGNELALPSKYVNFLYLASHYEKLKGSPEDNEQKQLFVEQHKHYLDEIIEQISEFSKRVILADANLDKVLSAYNKHRDKPIREQAENIIHLFTLTNLGAPAAFKYFDTTIDRKRYTSTKEVLDATLIHQSITGLYETRIDLSQLGGDGGEAAAKGGGGSSGGMDPLQLLQPLEAEIKGTKLKAHWNSGATITCVPEAFLEDERPIQTMLIKTIHGEKQQDVYYLTFKVQGRKVEAEVLASPYDYILLNPSDVPWLMKKPLQLTVLVPLHEYQERLLQQTALPKEQKELLQKLFLKYDALWQHWENQVGHRRIKPHNIATGTLAPRPQKQYPINPKAKPSIQIVIDDLLKQGVLIQQNSTMNTPVYPVPKPDGKWRMVLDYREVNKTIPLIAAQNQHSAGILSSIYRGKYKTTLDLTNGFWAHPITPESYWLTAFTWQGKQYCWTRLPQGFLNSPALFNADVVDLLKEIPNVQAYVDDIYISHDDPQEHLEQLEKIFSILLNAGYVVSLKKSEIAQREVEFLGFNITKEGRGLTDTFKQKLLNITPPKDLKQLQSILGLLNFARNFIPNYSELVKPLYTIVAPANGKFISWTEDNSNQLQHIISVLNQADNLEERNPETRLIIKVNSSPSAGYIRYYNEGSKRPIMYVNYIFSKAEAKFTQTEKLLTTMHKGLIKAMDLAMGQEILVYSPIVSMTKIQRTPLPERKALPVRWITWMTYLEDPRIQFHYDKSLPELQQIPNVTEDVIAKTKHPSEFAMVFYTDGSAIKHPDVNKSHSAGMGIAQVQFIPEYKIVHQWSIPLGDHTAQLAEIAAVEFACKKALKISGPVLIVTDSFYVAESANKELPYWKSNGFLNNKKKPLRHVSKWKSIAECLQLKPDIIIMHEKGHQQPMTTLHTEGNNLADKLATQGSYVVHAGKRTADGSEFEKRTADGSEFESPKKKAKVE

SEQ ID NO: 476 - protein, 2174 aa, synthetic construct
MPAAKRVKLDGGDKKYSIGLDIGTNSVGWAVITDEYKVPSKKFKVLGNTDRHSIKKNLIGALLFDSGETAEATRLKRTARRRYTRRKNRICYLQEIFSNEMAKVDDSFFHRLEESFLVEEDKKHERHPIFGNIVDEVAYHEKYPTIYHLRKKLVDSTDKADLRLIYLALAHMIKFRGHFLIEGDLNPDNSDVDKLFIQLVQTYNQLFEENPINASGVDAKAILSARLSKSRRLENLIAQLPGEKKNGLFGNLIALSLGLTPNFKSNFDLAEDAKLQLSKDTYDDDLDNLLAQIGDQYADLFLAAKNLSDAILLSDILRVNTEITKAPLSASMIKRYDEHHQDLTLLKALVRQQLPEKYKEIFFDQSKNGYAGYIDGGASQEEFYKFIKPILEKMDGTEELLVKLNREDLLRKQRTFDNGSIPHQIHLGELHAILRRQEDFYPFLKDNREKIEKILTFRIPYYVGPLARGNSRFAWMTRKSEETITPWNFEEVVDKGASAQSFIERMTNFDKNLPNEKVLPKHSLLYEYFTVYNELTKVKYVTEGMRKPAFLSGEQKKAIVDLLFKTNRKVTVKQLKEDYFKKIECFDSVEISGVEDRFNASLGTYHDLLKIIKDKDFLDNEENEDILEDIVLTLTLFEDREMIEERLKTYAHLFDDKVMKQLKRRRYTGWGRLSRKLINGIRDKQSGKTILDFLKSDGFANRNFMQLIHDDSLTFKEDIQKAQVSGQGDSLHEHIANLAGSPAIKKGILQTVKVVDELVKVMGRHKPENIVIEMARENQTTQKGQKNSRERMKRIEEGIKELGSQILKEHPVENTQLQNEKLYLYYLQNGRDMYVDQELDINRLSDYDVDHIVPQSFLKDDSIDNKVLTRSDKARGKSDNVPSEEVVKKMKNYWRQLLNAKLITQRKFDNLTKAERGGLSELDKAGFIKRQLVETRQITKHVAQILDSRMNTKYDENDKLIREVKVITLKSKLVSDFRKDFQFYKVREINNYHHAHDAYLNAVVGTALIKKYPKLESEFVYGDYKVYDVRKMIAKSEQEIGKATAKYFFYSNIMNFFKTEITLANGEIRKRPLIETNGETGEIVWDKGRDFATVRKVLSMPQVNIVKKTEVQTGGFSKESILPKRNSDKLIARKKDWDPKKYGGFDSPTVAYSVLVVAKVEKGKSKKLKSVKELLGITIMERSSFEKNPIDFLEAKGYKEVKKDLIIKLPKYSLFELENGRKRMLASAGELQKGNELALPSKYVNFLYLASHYEKLKGSPEDNEQKQLFVEQHKHYLDEIIEQISEFSKRVILADANLDKVLSAYNKHRDKPIREQAENIIHLFTLTNLGAPAAFKYFDTTIDRKRYTSTKEVLDATLIHQSITGLYETRIDLSQLGGDGGGSSGGGGGSGGMDPLQLLQPLEAEIKGTKLKAHWNSGATITCVPEAFLEDERPIQTMLIKTIHGEKQQDVYYLTFKVQGRKVEAEVLASPYDYILLNPSDVPWLMKKPLQLTVLVPLHEYQERLLQQTALPKEQKELLQKLFLKYDALWQHWENQVGHRRIKPHNIATGTLAPRPQKQYPINPKAKPSIQIVIDDLLKQGVLIQQNSTMNTPVYPVPKPDGKWRMVLDYREVNKTIPLIAAQNQHSAGILSSIYRGKYKTTLDLTNGFWAHPITPESYWLTAFTWQGKQYCWTRLPQGFLNSPALFNADVVDLLKEIPNVQAYVDDIYISHDDPQEHLEQLEKIFSILLNAGYVVSLKKSEIAQREVEFLGFNITKEGRGLTDTFKQKLLNITPPKDLKQLQSILGLLNFARNFIPNYSELVKPLYTIVAPANGKFISWTEDNSNQLQHIISVLNQADNLEERNPETRLIIKVNSSPSAGYIRYYNEGSKRPIMYVNYIFSKAEAKFTQTEKLLTTMHKGLIKAMDLAMGQEILVYSPIVSMTKIQRTPLPERKALPVRWITWMTYLEDPRIQFHYDKSLPELQQIPNVTEDVIAKTKHPSEFAMVFYTDGSAIKHPDVNKSHSAGMGIAQVQFIPEYKIVHQWSIPLGDHTAQLAEIAAVEFACKKALKISGPVLIVTDSFYVAESANKELPYWKSNGFLNNKKKPLRHVSKWKSIAECLQLKPDIIIMHEKGHQQPMTTLHTEGNNLADKLATQGSYVVHAGKRTADGSEFEKRTADGSEFESPKKKAKVE

SEQ ID NO: 477 - protein, 2171 aa, synthetic construct
MPAAKRVKLDGGDKKYSIGLDIGTNSVGWAVITDEYKVPSKKFKVLGNTDRHSIKKNLIGALLFDSGETAEATRLKRTARRRYTRRKNRICYLQEIFSNEMAKVDDSFFHRLEESFLVEEDKKHERHPIFGNIVDEVAYHEKYPTIYHLRKKLVDSTDKADLRLIYLALAHMIKFRGHFLIEGDLNPDNSDVDKLFIQLVQTYNQLFEENPINASGVDAKAILSARLSKSRRLENLIAQLPGEKKNGLFGNLIALSLGLTPNFKSNFDLAEDAKLQLSKDTYDDDLDNLLAQIGDQYADLFLAAKNLSDAILLSDILRVNTEITKAPLSASMIKRYDEHHQDLTLLKALVRQQLPEKYKEIFFDQSKNGYAGYIDGGASQEEFYKFIKPILEKMDGTEELLVKLNREDLLRKQRTFDNGSIPHQIHLGELHAILRRQEDFYPFLKDNREKIEKILTFRIPYYVGPLARGNSRFAWMTRKSEETITPWNFEEVVDKGASAQSFIERMTNFDKNLPNEKVLPKHSLLYEYFTVYNELTKVKYVTEGMRKPAFLSGEQKKAIVDLLFKTNRKVTVKQLKEDYFKKIECFDSVEISGVEDRFNASLGTYHDLLKIIKDKDFLDNEENEDILEDIVLTLTLFEDREMIEERLKTYAHLFDDKVMKQLKRRRYTGWGRLSRKLINGIRDKQSGKTILDFLKSDGFANRNFMQLIHDDSLTFKEDIQKAQVSGQGDSLHEHIANLAGSPAIKKGILQTVKVVDELVKVMGRHKPENIVIEMARENQTTQKGQKNSRERMKRIEEGIKELGSQILKEHPVENTQLQNEKLYLYYLQNGRDMYVDQELDINRLSDYDVDHIVPQSFLKDDSIDNKVLTRSDKARGKSDNVPSEEVVKKMKNYWRQLLNAKLITQRKFDNLTKAERGGLSELDKAGFIKRQLVETRQITKHVAQILDSRMNTKYDENDKLIREVKVITLKSKLVSDFRKDFQFYKVREINNYHHAHDAYLNAVVGTALIKKYPKLESEFVYGDYKVYDVRKMIAKSEQEIGKATAKYFFYSNIMNFFKTEITLANGEIRKRPLIETNGETGEIVWDKGRDFATVRKVLSMPQVNIVKKTEVQTGGFSKESILPKRNSDKLIARKKDWDPKKYGGFDSPTVAYSVLVVAKVEKGKSKKLKSVKELLGITIMERSSFEKNPIDFLEAKGYKEVKKDLIIKLPKYSLFELENGRKRMLASAGELQKGNELALPSKYVNFLYLASHYEKLKGSPEDNEQKQLFVEQHKHYLDEIIEQISEFSKRVILADANLDKVLSAYNKHRDKPIREQAENIIHLFTLTNLGAPAAFKYFDTTIDRKRYTSTKEVLDATLIHQSITGLYETRIDLSQLGGDGGGSSPAPGGMDPLQLLQPLEAEIKGTKLKAHWNSGATITCVPEAFLEDERPIQTMLIKTIHGEKQQDVYYLTFKVQGRKVEAEVLASPYDYILLNPSDVPWLMKKPLQLTVLVPLHEYQERLLQQTALPKEQKELLQKLFLKYDALWQHWENQVGHRRIKPHNIATGTLAPRPQKQYPINPKAKPSIQIVIDDLLKQGVLIQQNSTMNTPVYPVPKPDGKWRMVLDYREVNKTIPLIAAQNQHSAGILSSIYRGKYKTTLDLTNGFWAHPITPESYWLTAFTWQGKQYCWTRLPQGFLNSPALFNADVVDLLKEIPNVQAYVDDIYISHDDPQEHLEQLEKIFSILLNAGYVVSLKKSEIAQREVEFLGFNITKEGRGLTDTFKQKLLNITPPKDLKQLQSILGLLNFARNFIPNYSELVKPLYTIVAPANGKFISWTEDNSNQLQHIISVLNQADNLEERNPETRLIIKVNSSPSAGYIRYYNEGSKRPIMYVNYIFSKAEAKFTQTEKLLTTMHKGLIKAMDLAMGQEILVYSPIVSMTKIQRTPLPERKALPVRWITWMTYLEDPRIQFHYDKSLPELQQIPNVTEDVIAKTKHPSEFAMVFYTDGSAIKHPDVNKSHSAGMGIAQVQFIPEYKIVHQWSIPLGDHTAQLAEIAAVEFACKKALKISGPVLIVTDSFYVAESANKELPYWKSNGFLNNKKKPLRHVSKWKSIAECLQLKPDIIIMHEKGHQQPMTTLHTEGNNLADKLATQGSYVVHAGKRTADGSEFEKRTADGSEFESPKKKAKVE

SEQ ID NO: 478 - protein, 2178 aa, synthetic construct
MPAAKRVKLDGGDKKYSIGLDIGTNSVGWAVITDEYKVPSKKFKVLGNTDRHSIKKNLIGALLFDSGETAEATRLKRTARRRYTRRKNRICYLQEIFSNEMAKVDDSFFHRLEESFLVEEDKKHERHPIFGNIVDEVAYHEKYPTIYHLRKKLVDSTDKADLRLIYLALAHMIKFRGHFLIEGDLNPDNSDVDKLFIQLVQTYNQLFEENPINASGVDAKAILSARLSKSRRLENLIAQLPGEKKNGLFGNLIALSLGLTPNFKSNFDLAEDAKLQLSKDTYDDDLDNLLAQIGDQYADLFLAAKNLSDAILLSDILRVNTEITKAPLSASMIKRYDEHHQDLTLLKALVRQQLPEKYKEIFFDQSKNGYAGYIDGGASQEEFYKFIKPILEKMDGTEELLVKLNREDLLRKQRTFDNGSIPHQIHLGELHAILRRQEDFYPFLKDNREKIEKILTFRIPYYVGPLARGNSRFAWMTRKSEETITPWNFEEVVDKGASAQSFIERMTNFDKNLPNEKVLPKHSLLYEYFTVYNELTKVKYVTEGMRKPAFLSGEQKKAIVDLLFKTNRKVTVKQLKEDYFKKIECFDSVEISGVEDRFNASLGTYHDLLKIIKDKDFLDNEENEDILEDIVLTLTLFEDREMIEERLKTYAHLFDDKVMKQLKRRRYTGWGRLSRKLINGIRDKQSGKTILDFLKSDGFANRNFMQLIHDDSLTFKEDIQKAQVSGQGDSLHEHIANLAGSPAIKKGILQTVKVVDELVKVMGRHKPENIVIEMARENQTTQKGQKNSRERMKRIEEGIKELGSQILKEHPVENTQLQNEKLYLYYLQNGRDMYVDQELDINRLSDYDVDHIVPQSFLKDDSIDNKVLTRSDKARGKSDNVPSEEVVKKMKNYWRQLLNAKLITQRKFDNLTKAERGGLSELDKAGFIKRQLVETRQITKHVAQILDSRMNTKYDENDKLIREVKVITLKSKLVSDFRKDFQFYKVREINNYHHAHDAYLNAVVGTALIKKYPKLESEFVYGDYKVYDVRKMIAKSEQEIGKATAKYFFYSNIMNFFKTEITLANGEIRKRPLIETNGETGEIVWDKGRDFATVRKVLSMPQVNIVKKTEVQTGGFSKESILPKRNSDKLIARKKDWDPKKYGGFDSPTVAYSVLVVAKVEKGKSKKLKSVKELLGITIMERSSFEKNPIDFLEAKGYKEVKKDLIIKLPKYSLFELENGRKRMLASAGELQKGNELALPSKYVNFLYLASHYEKLKGSPEDNEQKQLFVEQHKHYLDEIIEQISEFSKRVILADANLDKVLSAYNKHRDKPIREQAENIIHLFTLTNLGAPAAFKYFDTTIDRKRYTSTKEVLDATLIHQSITGLYETRIDLSQLGGDGGPAPAPAPAPAPAPGGMDPLQLLQPLEAEIKGTKLKAHWNSGATITCVPEAFLEDERPIQTMLIKTIHGEKQQDVYYLTFKVQGRKVEAEVLASPYDYILLNPSDVPWLMKKPLQLTVLVPLHEYQERLLQQTALPKEQKELLQKLFLKYDALWQHWENQVGHRRIKPHNIATGTLAPRPQKQYPINPKAKPSIQIVIDDLLKQGVLIQQNSTMNTPVYPVPKPDGKWRMVLDYREVNKTIPLIAAQNQHSAGILSSIYRGKYKTTLDLTNGFWAHPITPESYWLTAFTWQGKQYCWTRLPQGFLNSPALFNADVVDLLKEIPNVQAYVDDIYISHDDPQEHLEQLEKIFSILLNAGYVVSLKKSEIAQREVEFLGFNITKEGRGLTDTFKQKLLNITPPKDLKQLQSILGLLNFARNFIPNYSELVKPLYTIVAPANGKFISWTEDNSNQLQHIISVLNQADNLEERNPETRLIIKVNSSPSAGYIRYYNEGSKRPIMYVNYIFSKAEAKFTQTEKLLTTMHKGLIKAMDLAMGQEILVYSPIVSMTKIQRTPLPERKALPVRWITWMTYLEDPRIQFHYDKSLPELQQIPNVTEDVIAKTKHPSEFAMVFYTDGSAIKHPDVNKSHSAGMGIAQVQFIPEYKIVHQWSIPLGDHTAQLAEIAAVEFACKKALKISGPVLIVTDSFYVAESANKELPYWKSNGFLNNKKKPLRHVSKWKSIAECLQLKPDIIIMHEKGHQQPMTTLHTEGNNLADKLATQGSYVVHAGKRTADGSEFEKRTADGSEFESPKKKAKVE

SEQ ID NO: 479 - protein, 2170 aa, synthetic construct
MPAAKRVKLDGGDKKYSIGLDIGTNSVGWAVITDEYKVPSKKFKVLGNTDRHSIKKNLIGALLFDSGETAEATRLKRTARRRYTRRKNRICYLQEIFSNEMAKVDDSFFHRLEESFLVEEDKKHERHPIFGNIVDEVAYHEKYPTIYHLRKKLVDSTDKADLRLIYLALAHMIKFRGHFLIEGDLNPDNSDVDKLFIQLVQTYNQLFEENPINASGVDAKAILSARLSKSRRLENLIAQLPGEKKNGLFGNLIALSLGLTPNFKSNFDLAEDAKLQLSKDTYDDDLDNLLAQIGDQYADLFLAAKNLSDAILLSDILRVNTEITKAPLSASMIKRYDEHHQDLTLLKALVRQQLPEKYKEIFFDQSKNGYAGYIDGGASQEEFYKFIKPILEKMDGTEELLVKLNREDLLRKQRTFDNGSIPHQIHLGELHAILRRQEDFYPFLKDNREKIEKILTFRIPYYVGPLARGNSRFAWMTRKSEETITPWNFEEVVDKGASAQSFIERMTNFDKNLPNEKVLPKHSLLYEYFTVYNELTKVKYVTEGMRKPAFLSGEQKKAIVDLLFKTNRKVTVKQLKEDYFKKIECFDSVEISGVEDRFNASLGTYHDLLKIIKDKDFLDNEENEDILEDIVLTLTLFEDREMIEERLKTYAHLFDDKVMKQLKRRRYTGWGRLSRKLINGIRDKQSGKTILDFLKSDGFANRNFMQLIHDDSLTFKEDIQKAQVSGQGDSLHEHIANLAGSPAIKKGILQTVKVVDELVKVMGRHKPENIVIEMARENQTTQKGQKNSRERMKRIEEGIKELGSQILKEHPVENTQLQNEKLYLYYLQNGRDMYVDQELDINRLSDYDVDHIVPQSFLKDDSIDNKVLTRSDKARGKSDNVPSEEVVKKMKNYWRQLLNAKLITQRKFDNLTKAERGGLSELDKAGFIKRQLVETRQITKHVAQILDSRMNTKYDENDKLIREVKVITLKSKLVSDFRKDFQFYKVREINNYHHAHDAYLNAVVGTALIKKYPKLESEFVYGDYKVYDVRKMIAKSEQEIGKATAKYFFYSNIMNFFKTEITLANGEIRKRPLIETNGETGEIVWDKGRDFATVRKVLSMPQVNIVKKTEVQTGGFSKESILPKRNSDKLIARKKDWDPKKYGGFDSPTVAYSVLVVAKVEKGKSKKLKSVKELLGITIMERSSFEKNPIDFLEAKGYKEVKKDLIIKLPKYSLFELENGRKRMLASAGELQKGNELALPSKYVNFLYLASHYEKLKGSPEDNEQKQLFVEQHKHYLDEIIEQISEFSKRVILADANLDKVLSAYNKHRDKPIREQAENIIHLFTLTNLGAPAAFKYFDTTIDRKRYTSTKEVLDATLIHQSITGLYETRIDLSQLGGDGGGGGGGGGMDPLQLLQPLEAEIKGTKLKAHWNSGATITCVPEAFLEDERPIQTMLIKTIHGEKQQDVYYLTFKVQGRKVEAEVLASPYDYILLNPSDVPWLMKKPLQLTVLVPLHEYQERLLQQTALPKEQKELLQKLFLKYDALWQHWENQVGHRRIKPHNIATGTLAPRPQKQYPINPKAKPSIQIVIDDLLKQGVLIQQNSTMNTPVYPVPKPDGKWRMVLDYREVNKTIPLIAAQNQHSAGILSSIYRGKYKTTLDLTNGFWAHPITPESYWLTAFTWQGKQYCWTRLPQGFLNSPALFNADVVDLLKEIPNVQAYVDDIYISHDDPQEHLEQLEKIFSILLNAGYVVSLKKSEIAQREVEFLGFNITKEGRGLTDTFKQKLLNITPPKDLKQLQSILGLLNFARNFIPNYSELVKPLYTIVAPANGKFISWTEDNSNQLQHIISVLNQADNLEERNPETRLIIKVNSSPSAGYIRYYNEGSKRPIMYVNYIFSKAEAKFTQTEKLLTTMHKGLIKAMDLAMGQEILVYSPIVSMTKIQRTPLPERKALPVRWITWMTYLEDPRIQFHYDKSLPELQQIPNVTEDVIAKTKHPSEFAMVFYTDGSAIKHPDVNKSHSAGMGIAQVQFIPEYKIVHQWSIPLGDHTAQLAEIAAVEFACKKALKISGPVLIVTDSFYVAESANKELPYWKSNGFLNNKKKPLRHVSKWKSIAECLQLKPDIIIMHEKGHQQPMTTLHTEGNNLADKLATQGSYVVHAGKRTADGSEFEKRTADGSEFESPKKKAKVE

SEQ ID NO: 480 - protein, 2211 aa, synthetic construct
MPAAKRVKLDGGDKKYSIGLDIGTNSVGWAVITDEYKVPSKKFKVLGNTDRHSIKKNLIGALLFDSGETAEATRLKRTARRRYTRRKNRICYLQEIFSNEMAKVDDSFFHRLEESFLVEEDKKHERHPIFGNIVDEVAYHEKYPTIYHLRKKLVDSTDKADLRLIYLALAHMIKFRGHFLIEGDLNPDNSDVDKLFIQLVQTYNQLFEENPINASGVDAKAILSARLSKSRRLENLIAQLPGEKKNGLFGNLIALSLGLTPNFKSNFDLAEDAKLQLSKDTYDDDLDNLLAQIGDQYADLFLAAKNLSDAILLSDILRVNTEITKAPLSASMIKRYDEHHQDLTLLKALVRQQLPEKYKEIFFDQSKNGYAGYIDGGASQEEFYKFIKPILEKMDGTEELLVKLNREDLLRKQRTFDNGSIPHQIHLGELHAILRRQEDFYPFLKDNREKIEKILTFRIPYYVGPLARGNSRFAWMTRKSEETITPWNFEEVVDKGASAQSFIERMTNFDKNLPNEKVLPKHSLLYEYFTVYNELTKVKYVTEGMRKPAFLSGEQKKAIVDLLFKTNRKVTVKQLKEDYFKKIECFDSVEISGVEDRFNASLGTYHDLLKIIKDKDFLDNEENEDILEDIVLTLTLFEDREMIEERLKTYAHLFDDKVMKQLKRRRYTGWGRLSRKLINGIRDKQSGKTILDFLKSDGFANRNFMQLIHDDSLTFKEDIQKAQVSGQGDSLHEHIANLAGSPAIKKGILQTVKVVDELVKVMGRHKPENIVIEMARENQTTQKGQKNSRERMKRIEEGIKELGSQILKEHPVENTQLQNEKLYLYYLQNGRDMYVDQELDINRLSDYDVDHIVPQSFLKDDSIDNKVLTRSDKARGKSDNVPSEEVVKKMKNYWRQLLNAKLITQRKFDNLTKAERGGLSELDKAGFIKRQLVETRQITKHVAQILDSRMNTKYDENDKLIREVKVITLKSKLVSDFRKDFQFYKVREINNYHHAHDAYLNAVVGTALIKKYPKLESEFVYGDYKVYDVRKMIAKSEQEIGKATAKYFFYSNIMNFFKTEITLANGEIRKRPLIETNGETGEIVWDKGRDFATVRKVLSMPQVNIVKKTEVQTGGFSKESILPKRNSDKLIARKKDWDPKKYGGFDSPTVAYSVLVVAKVEKGKSKKLKSVKELLGITIMERSSFEKNPIDFLEAKGYKEVKKDLIIKLPKYSLFELENGRKRMLASAGELQKGNELALPSKYVNFLYLASHYEKLKGSPEDNEQKQLFVEQHKHYLDEIIEQISEFSKRVILADANLDKVLSAYNKHRDKPIREQAENIIHLFTLTNLGAPAAFKYFDTTIDRKRYTSTKEVLDATLIHQSITGLYETRIDLSQLGGDGGAEAAAKEAAAKEAAAKEAAAKALEAEAAAKEAAAKEAAAKEAAAKAGGMDPLQLLQPLEAEIKGTKLKAHWNSGATITCVPEAFLEDERPIQTMLIKTIHGEKQQDVYYLTFKVQGRKVEAEVLASPYDYILLNPSDVPWLMKKPLQLTVLVPLHEYQERLLQQTALPKEQKELLQKLFLKYDALWQHWENQVGHRRIKPHNIATGTLAPRPQKQYPINPKAKPSIQIVIDDLLKQGVLIQQNSTMNTPVYPVPKPDGKWRMVLDYREVNKTIPLIAAQNQHSAGILSSIYRGKYKTTLDLTNGFWAHPITPESYWLTAFTWQGKQYCWTRLPQGFLNSPALFNADVVDLLKEIPNVQAYVDDIYISHDDPQEHLEQLEKIFSILLNAGYVVSLKKSEIAQREVEFLGFNITKEGRGLTDTFKQKLLNITPPKDLKQLQSILGKLNFARNFIPNYSELVKPLYTIVAPANGKFISWTEDNSNQLQHIISVLNQADNLEERNPETRLIIKVNSSPSAGYIRYYNEGSKRPIMYVNYIFSKAEAKFTQTEKLLTTMHKGLIKAMDLAMGQEILVYSPIVSMTKIQRTPLPERKALPVRWITWMTYLEDPRIQFHYDKSLPELQQIPNVTEDVIAKTKHPSEFAMVFYTDGSAIKHPDVNKSHSAGMGIAQVQFIPEYKIVHQWSIPLGDHTAQLAEIAAVEFACKKALKISGPVLIVTDSFYVAESANKELPYWKSNGFLNNKKKPLRHVSKWKSIAECLQLKPDIIIMHEKGHQQPMTTLHTEGNNLADKLATQGSYVVHAGKRTADGSEFEKRTADGSEFESPKKKAKVE

SEQ ID NO: 481 - protein, 2195 aa, synthetic construct
MPAAKRVKLDGGDKKYSIGLDIGTNSVGWAVITDEYKVPSKKFKVLGNTDRHSIKKNLIGALLFDSGETAEATRLKRTARRRYTRRKNRICYLQEIFSNEMAKVDDSFFHRLEESFLVEEDKKHERHPIFGNIVDEVAYHEKYPTIYHLRKKLVDSTDKADLRLIYLALAHMIKFRGHFLIEGDLNPDNSDVDKLFIQLVQTYNQLFEENPINASGVDAKAILSARLSKSRRLENLIAQLPGEKKNGLFGNLIALSLGLTPNFKSNFDLAEDAKLQLSKDTYDDDLDNLLAQIGDQYADLFLAAKNLSDAILLSDILRVNTEITKAPLSASMIKRYDEHHQDLTLLKALVRQQLPEKYKEIFFDQSKNGYAGYIDGGASQEEFYKFIKPILEKMDGTEELLVKLNREDLLRKQRTFDNGSIPHQIHLGELHAILRRQEDFYPFLKDNREKIEKILTFRIPYYVGPLARGNSRFAWMTRKSEETITPWNFEEVVDKGASAQSFIERMTNFDKNLPNEKVLPKHSLLYEYFTVYNELTKVKYVTEGMRKPAFLSGEQKKAIVDLLFKTNRKVTVKQLKEDYFKKIECFDSVEISGVEDRFNASLGTYHDLLKIIKDKDFLDNEENEDILEDIVLTLTLFEDREMIEERLKTYAHLFDDKVMKQLKRRRYTGWGRLSRKLINGIRDKQSGKTILDFLKSDGFANRNFMQLIHDDSLTFKEDIQKAQVSGQGDSLHEHIANLAGSPAIKKGILQTVKVVDELVKVMGRHKPENIVIEMARENQTTQKGQKNSRERMKRIEEGIKELGSQILKEHPVENTQLQNEKLYLYYLQNGRDMYVDQELDINRLSDYDVDHIVPQSFLKDDSIDNKVLTRSDKARGKSDNVPSEEVVKKMKNYWRQLLNAKLITQRKFDNLTKAERGGLSELDKAGFIKRQLVETRQITKHVAQILDSRMNTKYDENDKLIREVKVITLKSKLVSDFRKDFQFYKVREINNYHHAHDAYLNAVVGTALIKKYPKLESEFVYGDYKVYDVRKMIAKSEQEIGKATAKYFFYSNIMNFFKTEITLANGEIRKRPLIETNGETGEIVWDKGRDFATVRKVLSMPQVNIVKKTEVQTGGFSKESILPKRNSDKLIARKKDWDPKKYGGFDSPTVAYSVLVVAKVEKGKSKKLKSVKELLGITIMERSSFEKNPIDFLEAKGYKEVKKDLIIKLPKYSLFELENGRKRMLASAGELQKGNELALPSKYVNFLYLASHYEKLKGSPEDNEQKQLFVEQHKHYLDEIIEQISEFSKRVILADANLDKVLSAYNKHRDKPIREQAENIIHLFTLTNLGAPAAFKYFDTTIDRKRYTSTKEVLDATLIHQSITGLYETRIDLSQLGGDGGEAAAKEAAAKEAAAKEAAAKEAAAKEAAAKGGMDPLQLLQPLEAEIKGTKLKAHWNSGATITCVPEAFLEDERPIQTMLIKTIHGEKQQDVYYLTFKVQGRKVEAEVLASPYDYILLNPSDVPWLMKKPLQLTVLVPLHEYQERLLQQTALPKEQKELLQKLFLKYDALWQHWENQVGHRRIKPHNIATGTLAPRPQKQYPINPKAKPSIQIVIDDLLKQGVLIQQNSTMNTPVYPVPKPDGKWRMVLDYREVNKTIPLIAAQNQHSAGILSSIYRGKYKTTLDLTNGFWAHPITPESYWLTAFTWQGKQYCWTRLPQGFLNSPALFNADVVDLLKEIPNVQAYVDDIYISHDDPQEHLEQLEKIFSILLNAGYVVSLKKSEIAQREVEFLGFNITKEGRGLTDTFKQKLLNITPPKDLKQLQSILGKLNFARNFIPNYSELVKPLYTIVAPANGKFISWTEDNSNQLQHIISVLNQADNLEERNPETRLIIKVNSSPSAGYIRYYNEGSKRPIMYVNYIFSKAEAKFTQTEKLLTTMHKGLIKAMDLAMGQEILVYSPIVSMTKIQRTPLPERKALPVRWITWMTYLEDPRIQFHYDKSLPELQQIPNVTEDVIAKTKHPSEFAMVFYTDGSAIKHPDVNKSHSAGMGIAQVQFIPEYKIVHQWSIPLGDHTAQLAEIAAVEFACKKALKISGPVLIVTDSFYVAESANKELPYWKSNGFLNNKKKPLRHVSKWKSIAECLQLKPDIIIMHEKGHQQPMTTLHTEGNNLADKLATQGSYVVHAGKRTADGSEFEKRTADGSEFESPKKKAKVE

SEQ ID NO: 482 - protein, 2176 aa, synthetic construct
MPAAKRVKLDGGDKKYSIGLDIGTNSVGWAVITDEYKVPSKKFKVLGNTDRHSIKKNLIGALLFDSGETAEATRLKRTARRRYTRRKNRICYLQEIFSNEMAKVDDSFFHRLEESFLVEEDKKHERHPIFGNIVDEVAYHEKYPTIYHLRKKLVDSTDKADLRLIYLALAHMIKFRGHFLIEGDLNPDNSDVDKLFIQLVQTYNQLFEENPINASGVDAKAILSARLSKSRRLENLIAQLPGEKKNGLFGNLIALSLGLTPNFKSNFDLAEDAKLQLSKDTYDDDLDNLLAQIGDQYADLFLAAKNLSDAILLSDILRVNTEITKAPLSASMIKRYDEHHQDLTLLKALVRQQLPEKYKEIFFDQSKNGYAGYIDGGASQEEFYKFIKPILEKMDGTEELLVKLNREDLLRKQRTFDNGSIPHQIHLGELHAILRRQEDFYPFLKDNREKIEKILTFRIPYYVGPLARGNSRFAWMTRKSEETITPWNFEEVVDKGASAQSFIERMTNFDKNLPNEKVLPKHSLLYEYFTVYNELTKVKYVTEGMRKPAFLSGEQKKAIVDLLFKTNRKVTVKQLKEDYFKKIECFDSVEISGVEDRFNASLGTYHDLLKIIKDKDFLDNEENEDILEDIVLTLTLFEDREMIEERLKTYAHLFDDKVMKQLKRRRYTGWGRLSRKLINGIRDKQSGKTILDFLKSDGFANRNFMQLIHDDSLTFKEDIQKAQVSGQGDSLHEHIANLAGSPAIKKGILQTVKVVDELVKVMGRHKPENIVIEMARENQTTQKGQKNSRERMKRIEEGIKELGSQILKEHPVENTQLQNEKLYLYYLQNGRDMYVDQELDINRLSDYDVDHIVPQSFLKDDSIDNKVLTRSDKARGKSDNVPSEEVVKKMKNYWRQLLNAKLITQRKFDNLTKAERGGLSELDKAGFIKRQLVETRQITKHVAQILDSRMNTKYDENDKLIREVKVITLKSKLVSDFRKDFQFYKVREINNYHHAHDAYLNAVVGTALIKKYPKLESEFVYGDYKVYDVRKMIAKSEQEIGKATAKYFFYSNIMNFFKTEITLANGEIRKRPLIETNGETGEIVWDKGRDFATVRKVLSMPQVNIVKKTEVQTGGFSKESILPKRNSDKLIARKKDWDPKKYGGFDSPTVAYSVLVVAKVEKGKSKKLKSVKELLGITIMERSSFEKNPIDFLEAKGYKEVKKDLIIKLPKYSLFELENGRKRMLASAGELQKGNELALPSKYVNFLYLASHYEKLKGSPEDNEQKQLFVEQHKHYLDEIIEQISEFSKRVILADANLDKVLSAYNKHRDKPIREQAENIIHLFTLTNLGAPAAFKYFDTTIDRKRYTSTKEVLDATLIHQSITGLYETRIDLSQLGGDGGEAAAKGGSPAPGGMDPLQLLQPLEAEIKGTKLKAHWNSGATITCVPEAFLEDERPIQTMLIKTIHGEKQQDVYYLTFKVQGRKVEAEVLASPYDYILLNPSDVPWLMKKPLQLTVLVPLHEYQERLLQQTALPKEQKELLQKLFLKYDALWQHWENQVGHRRIKPHNIATGTLAPRPQKQYPINPKAKPSIQIVIDDLLKQGVLIQQNSTMNTPVYPVPKPDGKWRMVLDYREVNKTIPLIAAQNQHSAGILSSIYRGKYKTTLDLTNGFWAHPITPESYWLTAFTWQGKQYCWTRLPQGFLNSPALFNADVVDLLKEIPNVQAYVDDIYISHDDPQEHLEQLEKIFSILLNAGYVVSLKKSEIAQREVEFLGFNITKEGRGLTDTFKQKLLNITPPKDLKQLQSILGKLNFARNFIPNYSELVKPLYTIVAPANGKFISWTEDNSNQLQHIISVLNQADNLEERNPETRLIIKVNSSPSAGYIRYYNEGSKRPIMYVNYIFSKAEAKFTQTEKLLTTMHKGLIKAMDLAMGQEILVYSPIVSMTKIQRTPLPERKALPVRWITWMTYLEDPRIQFHYDKSLPELQQIPNVTEDVIAKTKHPSEFAMVFYTDGSAIKHPDVNKSHSAGMGIAQVQFIPEYKIVHQWSIPLGDHTAQLAEIAAVEFACKKALKISGPVLIVTDSFYVAESANKELPYWKSNGFLNNKKKPLRHVSKWKSIAECLQLKPDIIIMHEKGHQQPMTTLHTEGNNLADKLATQGSYVVHAGKRTADGSEFEKRTADGSEFESPKKKAKVE

SEQ ID NO: 483 - protein, 2174 aa, synthetic construct
MPAAKRVKLDGGDKKYSIGLDIGTNSVGWAVITDEYKVPSKKFKVLGNTDRHSIKKNLIGALLFDSGETAEATRLKRTARRRYTRRKNRICYLQEIFSNEMAKVDDSFFHRLEESFLVEEDKKHERHPIFGNIVDEVAYHEKYPTIYHLRKKLVDSTDKADLRLIYLALAHMIKFRGHFLIEGDLNPDNSDVDKLFIQLVQTYNQLFEENPINASGVDAKAILSARLSKSRRLENLIAQLPGEKKNGLFGNLIALSLGLTPNFKSNFDLAEDAKLQLSKDTYDDDLDNLLAQIGDQYADLFLAAKNLSDAILLSDILRVNTEITKAPLSASMIKRYDEHHQDLTLLKALVRQQLPEKYKEIFFDQSKNGYAGYIDGGASQEEFYKFIKPILEKMDGTEELLVKLNREDLLRKQRTFDNGSIPHQIHLGELHAILRRQEDFYPFLKDNREKIEKILTFRIPYYVGPLARGNSRFAWMTRKSEETITPWNFEEVVDKGASAQSFIERMTNFDKNLPNEKVLPKHSLLYEYFTVYNELTKVKYVTEGMRKPAFLSGEQKKAIVDLLFKTNRKVTVKQLKEDYFKKIECFDSVEISGVEDRFNASLGTYHDLLKIIKDKDFLDNEENEDILEDIVLTLTLFEDREMIEERLKTYAHLFDDKVMKQLKRRRYTGWGRLSRKLINGIRDKQSGKTILDFLKSDGFANRNFMQLIHDDSLTFKEDIQKAQVSGQGDSLHEHIANLAGSPAIKKGILQTVKVVDELVKVMGRHKPENIVIEMARENQTTQKGQKNSRERMKRIEEGIKELGSQILKEHPVENTQLQNEKLYLYYLQNGRDMYVDQELDINRLSDYDVDHIVPQSFLKDDSIDNKVLTRSDKARGKSDNVPSEEVVKKMKNYWRQLLNAKLITQRKFDNLTKAERGGLSELDKAGFIKRQLVETRQITKHVAQILDSRMNTKYDENDKLIREVKVITLKSKLVSDFRKDFQFYKVREINNYHHAHDAYLNAVVGTALIKKYPKLESEFVYGDYKVYDVRKMIAKSEQEIGKATAKYFFYSNIMNFFKTEITLANGEIRKRPLIETNGETGEIVWDKGRDFATVRKVLSMPQVNIVKKTEVQTGGFSKESILPKRNSDKLIARKKDWDPKKYGGFDSPTVAYSVLVVAKVEKGKSKKLKSVKELLGITIMERSSFEKNPIDFLEAKGYKEVKKDLIIKLPKYSLFELENGRKRMLASAGELQKGNELALPSKYVNFLYLASHYEKLKGSPEDNEQKQLFVEQHKHYLDEIIEQISEFSKRVILADANLDKVLSAYNKHRDKPIREQAENIIHLFTLTNLGAPAAFKYFDTTIDRKRYTSTKEVLDATLIHQSITGLYETRIDLSQLGGDGGGGSGSSPAPGGMDPLQLLQPLEAEIKGTKLKAHWNSGATITCVPEAFLEDERPIQTMLIKTIHGEKQQDVYYLTFKVQGRKVEAEVLASPYDYILLNPSDVPWLMKKPLQLTVLVPLHEYQERLLQQTALPKEQKELLQKLFLKYDALWQHWENQVGHRRIKPHNIATGTLAPRPQKQYPINPKAKPSIQIVIDDLLKQGVLIQQNSTMNTPVYPVPKPDGKWRMVLDYREVNKTIPLIAAQNQHSAGILSSIYRGKYKTTLDLTNGFWAHPITPESYWLTAFTWQGKQYCWTRLPQGFLNSPALFNADVVDLLKEIPNVQAYVDDIYISHDDPQEHLEQLEKIFSILLNAGYVVSLKKSEIAQREVEFLGFNITKEGRGLTDTFKQKLLNITPPKDLKQLQSILGKLNFARNFIPNYSELVKPLYTIVAPANGKFISWTEDNSNQLQHIISVLNQADNLEERNPETRLIIKVNSSPSAGYIRYYNEGSKRPIMYVNYIFSKAEAKFTQTEKLLTTMHKGLIKAMDLAMGQEILVYSPIVSMTKIQRTPLPERKALPVRWITWMTYLEDPRIQFHYDKSLPELQQIPNVTEDVIAKTKHPSEFAMVFYTDGSAIKHPDVNKSHSAGMGIAQVQFIPEYKIVHQWSIPLGDHTAQLAEIAAVEFACKKALKISGPVLIVTDSFYVAESANKELPYWKSNGFLNNKKKPLRHVSKWKSIAECLQLKPDIIIMHEKGHQQPMTTLHTEGNNLADKLATQGSYVVHAGKRTADGSEFEKRTADGSEFESPKKKAKVE

SEQ ID NO: 484 - protein, 2171 aa, synthetic construct
MPAAKRVKLDGGDKKYSIGLDIGTNSVGWAVITDEYKVPSKKFKVLGNTDRHSIKKNLIGALLFDSGETAEATRLKRTARRRYTRRKNRICYLQEIFSNEMAKVDDSFFHRLEESFLVEEDKKHERHPIFGNIVDEVAYHEKYPTIYHLRKKLVDSTDKADLRLIYLALAHMIKFRGHFLIEGDLNPDNSDVDKLFIQLVQTYNQLFEENPINASGVDAKAILSARLSKSRRLENLIAQLPGEKKNGLFGNLIALSLGLTPNFKSNFDLAEDAKLQLSKDTYDDDLDNLLAQIGDQYADLFLAAKNLSDAILLSDILRVNTEITKAPLSASMIKRYDEHHQDLTLLKALVRQQLPEKYKEIFFDQSKNGYAGYIDGGASQEEFYKFIKPILEKMDGTEELLVKLNREDLLRKQRTFDNGSIPHQIHLGELHAILRRQEDFYPFLKDNREKIEKILTFRIPYYVGPLARGNSRFAWMTRKSEETITPWNFEEVVDKGASAQSFIERMTNFDKNLPNEKVLPKHSLLYEYFTVYNELTKVKYVTEGMRKPAFLSGEQKKAIVDLLFKTNRKVTVKQLKEDYFKKIECFDSVEISGVEDRFNASLGTYHDLLKIIKDKDFLDNEENEDILEDIVLTLTLFEDREMIEERLKTYAHLFDDKVMKQLKRRRYTGWGRLSRKLINGIRDKQSGKTILDFLKSDGFANRNFMQLIHDDSLTFKEDIQKAQVSGQGDSLHEHIANLAGSPAIKKGILQTVKVVDELVKVMGRHKPENIVIEMARENQTTQKGQKNSRERMKRIEEGIKELGSQILKEHPVENTQLQNEKLYLYYLQNGRDMYVDQELDINRLSDYDVDHIVPQSFLKDDSIDNKVLTRSDKARGKSDNVPSEEVVKKMKNYWRQLLNAKLITQRKFDNLTKAERGGLSELDKAGFIKRQLVETRQITKHVAQILDSRMNTKYDENDKLIREVKVITLKSKLVSDFRKDFQFYKVREINNYHHAHDAYLNAVVGTALIKKYPKLESEFVYGDYKVYDVRKMIAKSEQEIGKATAKYFFYSNIMNFFKTEITLANGEIRKRPLIETNGETGEIVWDKGRDFATVRKVLSMPQVNIVKKTEVQTGGFSKESILPKRNSDKLIARKKDWDPKKYGGFDSPTVAYSVLVVAKVEKGKSKKLKSVKELLGITIMERSSFEKNPIDFLEAKGYKEVKKDLIIKLPKYSLFELENGRKRMLASAGELQKGNELALPSKYVNFLYLASHYEKLKGSPEDNEQKQLFVEQHKHYLDEIIEQISEFSKRVILADANLDKVLSAYNKHRDKPIREQAENIIHLFTLTNLGAPAAFKYFDTTIDRKRYTSTKEVLDATLIHQSITGLYETRIDLSQLGGDGGGGGGGGGGMDPLQLLQPLEAEIKGTKLKAHWNSGATITCVPEAFLEDERPIQTMLIKTIHGEKQQDVYYLTFKVQGRKVEAEVLASPYDYILLNPSDVPWLMKKPLQLTVLVPLHEYQERLLQQTALPKEQKELLQKLFLKYDALWQHWENQVGHRRIKPHNIATGTLAPRPQKQYPINPKAKPSIQIVIDDLLKQGVLIQQNSTMNTPVYPVPKPDGKWRMVLDYREVNKTIPLIAAQNQHSAGILSSIYRGKYKTTLDLTNGFWAHPITPESYWLTAFTWQGKQYCWTRLPQGFLNSPALFNADVVDLLKEIPNVQAYVDDIYISHDDPQEHLEQLEKIFSILLNAGYVVSLKKSEIAQREVEFLGFNITKEGRGLTDTFKQKLLNITPPKDLKQLQSILGKLNFARNFIPNYSELVKPLYTIVAPANGKFISWTEDNSNQLQHIISVLNQADNLEERNPETRLIIKVNSSPSAGYIRYYNEGSKRPIMYVNYIFSKAEAKFTQTEKLLTTMHKGLIKAMDLAMGQEILVYSPIVSMTKIQRTPLPERKALPVRWITWMTYLEDPRIQFHYDKSLPELQQIPNVTEDVIAKTKHPSEFAMVFYTDGSAIKHPDVNKSHSAGMGIAQVQFIPEYKIVHQWSIPLGDHTAQLAEIAAVEFACKKALKISGPVLIVTDSFYVAESANKELPYWKSNGFLNNKKKPLRHVSKWKSIAECLQLKPDIIIMHEKGHQQPMTTLHTEGNNLADKLATQGSYVVHAGKRTADGSEFEKRTADGSEFESPKKKAKVE

SEQ ID NO: 485 - protein, 2176 aa, synthetic construct
MPAAKRVKLDGGDKKYSIGLDIGTNSVGWAVITDEYKVPSKKFKVLGNTDRHSIKKNLIGALLFDSGETAEATRLKRTARRRYTRRKNRICYLQEIFSNEMAKVDDSFFHRLEESFLVEEDKKHERHPIFGNIVDEVAYHEKYPTIYHLRKKLVDSTDKADLRLIYLALAHMIKFRGHFLIEGDLNPDNSDVDKLFIQLVQTYNQLFEENPINASGVDAKAILSARLSKSRRLENLIAQLPGEKKNGLFGNLIALSLGLTPNFKSNFDLAEDAKLQLSKDTYDDDLDNLLAQIGDQYADLFLAAKNLSDAILLSDILRVNTEITKAPLSASMIKRYDEHHQDLTLLKALVRQQLPEKYKEIFFDQSKNGYAGYIDGGASQEEFYKFIKPILEKMDGTEELLVKLNREDLLRKQRTFDNGSIPHQIHLGELHAILRRQEDFYPFLKDNREKIEKILTFRIPYYVGPLARGNSRFAWMTRKSEETITPWNFEEVVDKGASAQSFIERMTNFDKNLPNEKVLPKHSLLYEYFTVYNELTKVKYVTEGMRKPAFLSGEQKKAIVDLLFKTNRKVTVKQLKEDYFKKIECFDSVEISGVEDRFNASLGTYHDLLKIIKDKDFLDNEENEDILEDIVLTLTLFEDREMIEERLKTYAHLFDDKVMKQLKRRRYTGWGRLSRKLINGIRDKQSGKTILDFLKSDGFANRNFMQLIHDDSLTFKEDIQKAQVSGQGDSLHEHIANLAGSPAIKKGILQTVKVVDELVKVMGRHKPENIVIEMARENQTTQKGQKNSRERMKRIEEGIKELGSQILKEHPVENTQLQNEKLYLYYLQNGRDMYVDQELDINRLSDYDVDHIVPQSFLKDDSIDNKVLTRSDKARGKSDNVPSEEVVKKMKNYWRQLLNAKLITQRKFDNLTKAERGGLSELDKAGFIKRQLVETRQITKHVAQILDSRMNTKYDENDKLIREVKVITLKSKLVSDFRKDFQFYKVREINNYHHAHDAYLNAVVGTALIKKYPKLESEFVYGDYKVYDVRKMIAKSEQEIGKATAKYFFYSNIMNFFKTEITLANGEIRKRPLIETNGETGEIVWDKGRDFATVRKVLSMPQVNIVKKTEVQTGGFSKESILPKRNSDKLIARKKDWDPKKYGGFDSPTVAYSVLVVAKVEKGKSKKLKSVKELLGITIMERSSFEKNPIDFLEAKGYKEVKKDLIIKLPKYSLFELENGRKRMLASAGELQKGNELALPSKYVNFLYLASHYEKLKGSPEDNEQKQLFVEQHKHYLDEIIEQISEFSKRVILADANLDKVLSAYNKHRDKPIREQAENIIHLFTLTNLGAPAAFKYFDTTIDRKRYTSTKEVLDATLIHQSITGLYETRIDLSQLGGDGGGSSGGGEAAAKGGMDPLQLLQPLEAEIKGTKLKAHWNSGATITCVPEAFLEDERPIQTMLIKTIHGEKQQDVYYLTFKVQGRKVEAEVLASPYDYILLNPSDVPWLMKKPLQLTVLVPLHEYQERLLQQTALPKEQKELLQKLFLKYDALWQHWENQVGHRRIKPHNIATGTLAPRPQKQYPINPKAKPSIQIVIDDLLKQGVLIQQNSTMNTPVYPVPKPDGKWRMVLDYREVNKTIPLIAAQNQHSAGILSSIYRGKYKTTLDLTNGFWAHPITPESYWLTAFTWQGKQYCWTRLPQGFLNSPALFNADVVDLLKEIPNVQAYVDDIYISHDDPQEHLEQLEKIFSILLNAGYVVSLKKSEIAQREVEFLGFNITKEGRGLTDTFKQKLLNITPPKDLKQLQSILGKLNFARNFIPNYSELVKPLYTIVAPANGKFISWTEDNSNQLQHIISVLNQADNLEERNPETRLIIKVNSSPSAGYIRYYNEGSKRPIMYVNYIFSKAEAKFTQTEKLLTTMHKGLIKAMDLAMGQEILVYSPIVSMTKIQRTPLPERKALPVRWITWMTYLEDPRIQFHYDKSLPELQQIPNVTEDVIAKTKHPSEFAMVFYTDGSAIKHPDVNKSHSAGMGIAQVQFIPEYKIVHQWSIPLGDHTAQLAEIAAVEFACKKALKISGPVLIVTDSFYVAESANKELPYWKSNGFLNNKKKPLRHVSKWKSIAECLQLKPDIIIMHEKGHQQPMTTLHTEGNNLADKLATQGSYVVHAGKRTADGSEFEKRTADGSEFESPKKKAKVE

SEQ ID NO: 486 - protein, 2176 aa, synthetic construct
MPAAKRVKLDGGDKKYSIGLDIGTNSVGWAVITDEYKVPSKKFKVLGNTDRHSIKKNLIGALLFDSGETAEATRLKRTARRRYTRRKNRICYLQEIFSNEMAKVDDSFFHRLEESFLVEEDKKHERHPIFGNIVDEVAYHEKYPTIYHLRKKLVDSTDKADLRLIYLALAHMIKFRGHFLIEGDLNPDNSDVDKLFIQLVQTYNQLFEENPINASGVDAKAILSARLSKSRRLENLIAQLPGEKKNGLFGNLIALSLGLTPNFKSNFDLAEDAKLQLSKDTYDDDLDNLLAQIGDQYADLFLAAKNLSDAILLSDILRVNTEITKAPLSASMIKRYDEHHQDLTLLKALVRQQLPEKYKEIFFDQSKNGYAGYIDGGASQEEFYKFIKPILEKMDGTEELLVKLNREDLLRKQRTFDNGSIPHQIHLGELHAILRRQEDFYPFLKDNREKIEKILTFRIPYYVGPLARGNSRFAWMTRKSEETITPWNFEEVVDKGASAQSFIERMTNFDKNLPNEKVLPKHSLLYEYFTVYNELTKVKYVTEGMRKPAFLSGEQKKAIVDLLFKTNRKVTVKQLKEDYFKKIECFDSVEISGVEDRFNASLGTYHDLLKIIKDKDFLDNEENEDILEDIVLTLTLFEDREMIEERLKTYAHLFDDKVMKQLKRRRYTGWGRLSRKLINGIRDKQSGKTILDFLKSDGFANRNFMQLIHDDSLTFKEDIQKAQVSGQGDSLHEHIANLAGSPAIKKGILQTVKVVDELVKVMGRHKPENIVIEMARENQTTQKGQKNSRERMKRIEEGIKELGSQILKEHPVENTQLQNEKLYLYYLQNGRDMYVDQELDINRLSDYDVDHIVPQSFLKDDSIDNKVLTRSDKARGKSDNVPSEEVVKKMKNYWRQLLNAKLITQRKFDNLTKAERGGLSELDKAGFIKRQLVETRQITKHVAQILDSRMNTKYDENDKLIREVKVITLKSKLVSDFRKDFQFYKVREINNYHHAHDAYLNAVVGTALIKKYPKLESEFVYGDYKVYDVRKMIAKSEQEIGKATAKYFFYSNIMNFFKTEITLANGEIRKRPLIETNGETGEIVWDKGRDFATVRKVLSMPQVNIVKKTEVQTGGFSKESILPKRNSDKLIARKKDWDPKKYGGFDSPTVAYSVLVVAKVEKGKSKKLKSVKELLGITIMERSSFEKNPIDFLEAKGYKEVKKDLIIKLPKYSLFELENGRKRMLASAGELQKGNELALPSKYVNFLYLASHYEKLKGSPEDNEQKQLFVEQHKHYLDEIIEQISEFSKRVILADANLDKVLSAYNKHRDKPIREQAENIIHLFTLTNLGAPAAFKYFDTTIDRKRYTSTKEVLDATLIHQSITGLYETRIDLSQLGGDGGPAPAPAPAPAPGGMDPLQLLQPLEAEIKGTKLKAHWNSGATITCVPEAFLEDERPIQTMLIKTIHGEKQQDVYYLTFKVQGRKVEAEVLASPYDYILLNPSDVPWLMKKPLQLTVLVPLHEYQERLLQQTALPKEQKELLQKLFLKYDALWQHWENQVGHRRIKPHNIATGTLAPRPQKQYPINPKAKPSIQIVIDDLLKQGVLIQQNSTMNTPVYPVPKPDGKWRMVLDYREVNKTIPLIAAQNQHSAGILSSIYRGKYKTTLDLTNGFWAHPITPESYWLTAFTWQGKQYCWTRLPQGFLNSPALFNADVVDLLKEIPNVQAYVDDIYISHDDPQEHLEQLEKIFSILLNAGYVVSLKKSEIAQREVEFLGFNITKEGRGLTDTFKQKLLNITPPKDLKQLQSILGKLNFARNFIPNYSELVKPLYTIVAPANGKFISWTEDNSNQLQHIISVLNQADNLEERNPETRLIIKVNSSPSAGYIRYYNEGSKRPIMYVNYIFSKAEAKFTQTEKLLTTMHKGLIKAMDLAMGQEILVYSPIVSMTKIQRTPLPERKALPVRWITWMTYLEDPRIQFHYDKSLPELQQIPNVTEDVIAKTKHPSEFAMVFYTDGSAIKHPDVNKSHSAGMGIAQVQFIPEYKIVHQWSIPLGDHTAQLAEIAAVEFACKKALKISGPVLIVTDSFYVAESANKELPYWKSNGFLNNKKKPLRHVSKWKSIAECLQLKPDIIIMHEKGHQQPMTTLHTEGNNLADKLATQGSYVVHAGKRTADGSEFEKRTADGSEFESPKKKAKVE

SEQ ID NO: 487 - protein, 2177 aa, synthetic construct
MPAAKRVKLDGGDKKYSIGLDIGTNSVGWAVITDEYKVPSKKFKVLGNTDRHSIKKNLIGALLFDSGETAEATRLKRTARRRYTRRKNRICYLQEIFSNEMAKVDDSFFHRLEESFLVEEDKKHERHPIFGNIVDEVAYHEKYPTIYHLRKKLVDSTDKADLRLIYLALAHMIKFRGHFLIEGDLNPDNSDVDKLFIQLVQTYNQLFEENPINASGVDAKAILSARLSKSRRLENLIAQLPGEKKNGLFGNLIALSLGLTPNFKSNFDLAEDAKLQLSKDTYDDDLDNLLAQIGDQYADLFLAAKNLSDAILLSDILRVNTEITKAPLSASMIKRYDEHHQDLTLLKALVRQQLPEKYKEIFFDQSKNGYAGYIDGGASQEEFYKFIKPILEKMDGTEELLVKLNREDLLRKQRTFDNGSIPHQIHLGELHAILRRQEDFYPFLKDNREKIEKILTFRIPYYVGPLARGNSRFAWMTRKSEETITPWNFEEVVDKGASAQSFIERMTNFDKNLPNEKVLPKHSLLYEYFTVYNELTKVKYVTEGMRKPAFLSGEQKKAIVDLLFKTNRKVTVKQLKEDYFKKIECFDSVEISGVEDRFNASLGTYHDLLKIIKDKDFLDNEENEDILEDIVLTLTLFEDREMIEERLKTYAHLFDDKVMKQLKRRRYTGWGRLSRKLINGIRDKQSGKTILDFLKSDGFANRNFMQLIHDDSLTFKEDIQKAQVSGQGDSLHEHIANLAGSPAIKKGILQTVKVVDELVKVMGRHKPENIVIEMARENQTTQKGQKNSRERMKRIEEGIKELGSQILKEHPVENTQLQNEKLYLYYLQNGRDMYVDQELDINRLSDYDVDHIVPQSFLKDDSIDNKVLTRSDKARGKSDNVPSEEVVKKMKNYWRQLLNAKLITQRKFDNLTKAERGGLSELDKAGFIKRQLVETRQITKHVAQILDSRMNTKYDENDKLIREVKVITLKSKLVSDFRKDFQFYKVREINNYHHAHDAYLNAVVGTALIKKYPKLESEFVYGDYKVYDVRKMIAKSEQEIGKATAKYFFYSNIMNFFKTEITLANGEIRKRPLIETNGETGEIVWDKGRDFATVRKVLSMPQVNIVKKTEVQTGGFSKESILPKRNSDKLIARKKDWDPKKYGGFDSPTVAYSVLVVAKVEKGKSKKLKSVKELLGITIMERSSFEKNPIDFLEAKGYKEVKKDLIIKLPKYSLFELENGRKRMLASAGELQKGNELALPSKYVNFLYLASHYEKLKGSPEDNEQKQLFVEQHKHYLDEIIEQISEFSKRVILADANLDKVLSAYNKHRDKPIREQAENIIHLFTLTNLGAPAAFKYFDTTIDRKRYTSTKEVLDATLIHQSITGLYETRIDLSQLGGDGGGGSGGSGGSGGSGGMDPLQLLQPLEAEIKGTKLKAHWNSGATITCVPEAFLEDERPIQTMLIKTIHGEKQQDVYYLTFKVQGRKVEAEVLASPYDYILLNPSDVPWLMKKPLQLTVLVPLHEYQERLLQQTALPKEQKELLQKLFLKYDALWQHWENQVGHRRIKPHNIATGTLAPRPQKQYPINPKAKPSIQIVIDDLLKQGVLIQQNSTMNTPVYPVPKPDGKWRMVLDYREVNKTIPLIAAQNQHSAGILSSIYRGKYKTTLDLTNGFWAHPITPESYWLTAFTWQGKQYCWTRLPQGFLNSPALFNADVVDLLKEIPNVQAYVDDIYISHDDPQEHLEQLEKIFSILLNAGYVVSLKKSEIAQREVEFLGFNITKEGRGLTDTFKQKLLNITPPKDLKQLQSILGKLNFARNFIPNYSELVKPLYTIVAPANGKFISWTEDNSNQLQHIISVLNQADNLEERNPETRLIIKVNSSPSAGYIRYYNEGSKRPIMYVNYIFSKAEAKFTQTEKLLTTMHKGLIKAMDLAMGQEILVYSPIVSMTKIQRTPLPERKALPVRWITWMTYLEDPRIQFHYDKSLPELQQIPNVTEDVIAKTKHPSEFAMVFYTDGSAIKHPDVNKSHSAGMGIAQVQFIPEYKIVHQWSIPLGDHTAQLAEIAAVEFACKKALKISGPVLIVTDSFYVAESANKELPYWKSNGFLNNKKKPLRHVSKWKSIAECLQLKPDIIIMHEKGHQQPMTTLHTEGNNLADKLATQGSYVVHAGKRTADGSEFEKRTADGSEFESPKKKAKVE

SEQ ID NO: 488 - protein, 2171 aa, synthetic construct
MPAAKRVKLDGGDKKYSIGLDIGTNSVGWAVITDEYKVPSKKFKVLGNTDRHSIKKNLIGALLFDSGETAEATRLKRTARRRYTRRKNRICYLQEIFSNEMAKVDDSFFHRLEESFLVEEDKKHERHPIFGNIVDEVAYHEKYPTIYHLRKKLVDSTDKADLRLIYLALAHMIKFRGHFLIEGDLNPDNSDVDKLFIQLVQTYNQLFEENPINASGVDAKAILSARLSKSRRLENLIAQLPGEKKNGLFGNLIALSLGLTPNFKSNFDLAEDAKLQLSKDTYDDDLDNLLAQIGDQYADLFLAAKNLSDAILLSDILRVNTEITKAPLSASMIKRYDEHHQDLTLLKALVRQQLPEKYKEIFFDQSKNGYAGYIDGGASQEEFYKFIKPILEKMDGTEELLVKLNREDLLRKQRTFDNGSIPHQIHLGELHAILRRQEDFYPFLKDNREKIEKILTFRIPYYVGPLARGNSRFAWMTRKSEETITPWNFEEVVDKGASAQSFIERMTNFDKNLPNEKVLPKHSLLYEYFTVYNELTKVKYVTEGMRKPAFLSGEQKKAIVDLLFKTNRKVTVKQLKEDYFKKIECFDSVEISGVEDRFNASLGTYHDLLKIIKDKDFLDNEENEDILEDIVLTLTLFEDREMIEERLKTYAHLFDDKVMKQLKRRRYTGWGRLSRKLINGIRDKQSGKTILDFLKSDGFANRNFMQLIHDDSLTFKEDIQKAQVSGQGDSLHEHIANLAGSPAIKKGILQTVKVVDELVKVMGRHKPENIVIEMARENQTTQKGQKNSRERMKRIEEGIKELGSQILKEHPVENTQLQNEKLYLYYLQNGRDMYVDQELDINRLSDYDVDHIVPQSFLKDDSIDNKVLTRSDKARGKSDNVPSEEVVKKMKNYWRQLLNAKLITQRKFDNLTKAERGGLSELDKAGFIKRQLVETRQITKHVAQILDSRMNTKYDENDKLIREVKVITLKSKLVSDFRKDFQFYKVREINNYHHAHDAYLNAVVGTALIKKYPKLESEFVYGDYKVYDVRKMIAKSEQEIGKATAKYFFYSNIMNFFKTEITLANGEIRKRPLIETNGETGEIVWDKGRDFATVRKVLSMPQVNIVKKTEVQTGGFSKESILPKRNSDKLIARKKDWDPKKYGGFDSPTVAYSVLVVAKVEKGKSKKLKSVKELLGITIMERSSFEKNPIDFLEAKGYKEVKKDLIIKLPKYSLFELENGRKRMLASAGELQKGNELALPSKYVNFLYLASHYEKLKGSPEDNEQKQLFVEQHKHYLDEIIEQISEFSKRVILADANLDKVLSAYNKHRDKPIREQAENIIHLFTLTNLGAPAAFKYFDTTIDRKRYTSTKEVLDATLIHQSITGLYETRIDLSQLGGDGGGGGGGSGGMDPLQLLQPLEAEIKGTKLKAHWNSGATITCVPEAFLEDERPIQTMLIKTIHGEKQQDVYYLTFKVQGRKVEAEVLASPYDYILLNPSDVPWLMKKPLQLTVLVPLHEYQERLLQQTALPKEQKELLQKLFLKYDALWQHWENQVGHRRIKPHNIATGTLAPRPQKQYPINPKAKPSIQIVIDDLLKQGVLIQQNSTMNTPVYPVPKPDGKWRMVLDYREVNKTIPLIAAQNQHSAGILSSIYRGKYKTTLDLTNGFWAHPITPESYWLTAFTWQGKQYCWTRLPQGFLNSPALFNADVVDLLKEIPNVQAYVDDIYISHDDPQEHLEQLEKIFSILLNAGYVVSLKKSEIAQREVEFLGFNITKEGRGLTDTFKQKLLNITPPKDLKQLQSILGKLNFARNFIPNYSELVKPLYTIVAPANGKFISWTEDNSNQLQHIISVLNQADNLEERNPETRLIIKVNSSPSAGYIRYYNEGSKRPIMYVNYIFSKAEAKFTQTEKLLTTMHKGLIKAMDLAMGQEILVYSPIVSMTKIQRTPLPERKALPVRWITWMTYLEDPRIQFHYDKSLPELQQIPNVTEDVIAKTKHPSEFAMVFYTDGSAIKHPDVNKSHSAGMGIAQVQFIPEYKIVHQWSIPLGDHTAQLAEIAAVEFACKKALKISGPVLIVTDSFYVAESANKELPYWKSNGFLNNKKKPLRHVSKWKSIAECLQLKPDIIIMHEKGHQQPMTTLHTEGNNLADKLATQGSYVVHAGKRTADGSEFEKRTADGSEFESPKKKAKVE

SEQ ID NO: 489 - protein, 2211 aa, synthetic construct
MPAAKRVKLDGGDKKYSIGLDIGTNSVGWAVITDEYKVPSKKFKVLGNTDRHSIKKNLIGALLFDSGETAEATRLKRTARRRYTRRKNRICYLQEIFSNEMAKVDDSFFHRLEESFLVEEDKKHERHPIFGNIVDEVAYHEKYPTIYHLRKKLVDSTDKADLRLIYLALAHMIKFRGHFLIEGDLNPDNSDVDKLFIQLVQTYNQLFEENPINASGVDAKAILSARLSKSRRLENLIAQLPGEKKNGLFGNLIALSLGLTPNFKSNFDLAEDAKLQLSKDTYDDDLDNLLAQIGDQYADLFLAAKNLSDAILLSDILRVNTEITKAPLSASMIKRYDEHHQDLTLLKALVRQQLPEKYKEIFFDQSKNGYAGYIDGGASQEEFYKFIKPILEKMDGTEELLVKLNREDLLRKQRTFDNGSIPHQIHLGELHAILRRQEDFYPFLKDNREKIEKILTFRIPYYVGPLARGNSRFAWMTRKSEETITPWNFEEVVDKGASAQSFIERMTNFDKNLPNEKVLPKHSLLYEYFTVYNELTKVKYVTEGMRKPAFLSGEQKKAIVDLLFKTNRKVTVKQLKEDYFKKIECFDSVEISGVEDRFNASLGTYHDLLKIIKDKDFLDNEENEDILEDIVLTLTLFEDREMIEERLKTYAHLFDDKVMKQLKRRRYTGWGRLSRKLINGIRDKQSGKTILDFLKSDGFANRNFMQLIHDDSLTFKEDIQKAQVSGQGDSLHEHIANLAGSPAIKKGILQTVKVVDELVKVMGRHKPENIVIEMARENQTTQKGQKNSRERMKRIEEGIKELGSQILKEHPVENTQLQNEKLYLYYLQNGRDMYVDQELDINRLSDYDVDHIVPQSFLKDDSIDNKVLTRSDKARGKSDNVPSEEVVKKMKNYWRQLLNAKLITQRKFDNLTKAERGGLSELDKAGFIKRQLVETRQITKHVAQILDSRMNTKYDENDKLIREVKVITLKSKLVSDFRKDFQFYKVREINNYHHAHDAYLNAVVGTALIKKYPKLESEFVYGDYKVYDVRKMIAKSEQEIGKATAKYFFYSNIMNFFKTEITLANGEIRKRPLIETNGETGEIVWDKGRDFATVRKVLSMPQVNIVKKTEVQTGGFSKESILPKRNSDKLIARKKDWDPKKYGGFDSPTVAYSVLVVAKVEKGKSKKLKSVKELLGITIMERSSFEKNPIDFLEAKGYKEVKKDLIIKLPKYSLFELENGRKRMLASAGELQKGNELALPSKYVNFLYLASHYEKLKGSPEDNEQKQLFVEQHKHYLDEIIEQISEFSKRVILADANLDKVLSAYNKHRDKPIREQAENIIHLFTLTNLGAPAAFKYFDTTIDRKRYTSTKEVLDATLIHQSITGLYETRIDLSQLGGDGGAEAAAKEAAAKEAAAKEAAAKALEAEAAAKEAAAKEAAAKEAAAKAGGMDPLQLLQPLEAEIKGTKLKAHWNSGATITCVPQAFLEEEVPIKNIWIKTIHGEKEQPVYYLTFKIQGRKVEAEVISSPYDYILVSPSDIPWLMKKPLQLTTLVPLQEYEERLLKQTMLTGSYKEKLQSLFLKYDALWQHWENQVGHRRIKPHHIATGTVNPRPQKQYPINPKAKASIQTVINDLLKQGVLIQQNSIMNTPVYPVPKPDGKWRMVLDYREVNKTIPLIAAQNQHSAGILSSIFRGKYKTTLDLSNGFWAHSITPESYWLTAFTWLGQQYCWTRLPQGFLNSPALFTADVVDLLKEVPNVQVYVDDIYISHDDPREHLEQLEKVFSLLLNAGYVVSLKKSEIAQHEVEFLGFNITKEGRGLTETFKQKLLNITPPRDLKQLQSILGLLNFARNFIPNFSELVKPLYNIIATANGKYITWTTDNSQQLQNIISMLNSAENLEERNPEVRLIMKVNTSPSAGYIRFYNEFAKRPIMYLNYVYTKAEVKFTNTEKLLTTIHKGLIKALDLGMGQEILVYSPIVSMTKIQKTPLPERKALPIRWITWMSYLEDPRIQFHYDKTLPELQQVPTVTDDIIAKIKHPSEFSMVFYTDGSAIKHPNVNKSHNAGMGIAQVQFKPEFTVINTWSIPLGDHTAQLAEVAAVEFACKKALKIDGPVLIVTDSFYVAESVNKELPYWQSNGFFNNKKKPLKHVSKWKSIADCIQLKPDIIIIHEKGHQPTASTFHTEGNNLADKLATQGSYVVNAGKRTADGSEFEKRTADGSEFESPKKKAKVE

SEQ ID NO: 490 - protein, 2190 aa, synthetic construct
MPAAKRVKLDGGDKKYSIGLDIGTNSVGWAVITDEYKVPSKKFKVLGNTDRHSIKKNLIGALLFDSGETAEATRLKRTARRRYTRRKNRICYLQEIFSNEMAKVDDSFFHRLEESFLVEEDKKHERHPIFGNIVDEVAYHEKYPTIYHLRKKLVDSTDKADLRLIYLALAHMIKFRGHFLIEGDLNPDNSDVDKLFIQLVQTYNQLFEENPINASGVDAKAILSARLSKSRRLENLIAQLPGEKKNGLFGNLIALSLGLTPNFKSNFDLAEDAKLQLSKDTYDDDLDNLLAQIGDQYADLFLAAKNLSDAILLSDILRVNTEITKAPLSASMIKRYDEHHQDLTLLKALVRQQLPEKYKEIFFDQSKNGYAGYIDGGASQEEFYKFIKPILEKMDGTEELLVKLNREDLLRKQRTFDNGSIPHQIHLGELHAILRRQEDFYPFLKDNREKIEKILTFRIPYYVGPLARGNSRFAWMTRKSEETITPWNFEEVVDKGASAQSFIERMTNFDKNLPNEKVLPKHSLLYEYFTVYNELTKVKYVTEGMRKPAFLSGEQKKAIVDLLFKTNRKVTVKQLKEDYFKKIECFDSVEISGVEDRFNASLGTYHDLLKIIKDKDFLDNEENEDILEDIVLTLTLFEDREMIEERLKTYAHLFDDKVMKQLKRRRYTGWGRLSRKLINGIRDKQSGKTILDFLKSDGFANRNFMQLIHDDSLTFKEDIQKAQVSGQGDSLHEHIANLAGSPAIKKGILQTVKVVDELVKVMGRHKPENIVIEMARENQTTQKGQKNSRERMKRIEEGIKELGSQILKEHPVENTQLQNEKLYLYYLQNGRDMYVDQELDINRLSDYDVDHIVPQSFLKDDSIDNKVLTRSDKARGKSDNVPSEEVVKKMKNYWRQLLNAKLITQRKFDNLTKAERGGLSELDKAGFIKRQLVETRQITKHVAQILDSRMNTKYDENDKLIREVKVITLKSKLVSDFRKDFQFYKVREINNYHHAHDAYLNAVVGTALIKKYPKLESEFVYGDYKVYDVRKMIAKSEQEIGKATAKYFFYSNIMNFFKTEITLANGEIRKRPLIETNGETGEIVWDKGRDFATVRKVLSMPQVNIVKKTEVQTGGFSKESILPKRNSDKLIARKKDWDPKKYGGFDSPTVAYSVLVVAKVEKGKSKKLKSVKELLGITIMERSSFEKNPIDFLEAKGYKEVKKDLIIKLPKYSLFELENGRKRMLASAGELQKGNELALPSKYVNFLYLASHYEKLKGSPEDNEQKQLFVEQHKHYLDEIIEQISEFSKRVILADANLDKVLSAYNKHRDKPIREQAENIIHLFTLTNLGAPAAFKYFDTTIDRKRYTSTKEVLDATLIHQSITGLYETRIDLSQLGGDGGEAAAKEAAAKEAAAKEAAAKEAAAKGGMDPLQLLQPLEAEIKGTKLKAHWNSGATITCVPQAFLEEEVPIKNIWIKTIHGEKEQPVYYLTFKIQGRKVEAEVISSPYDYILVSPSDIPWLMKKPLQLTTLVPLQEYEERLLKQTMLTGSYKEKLQSLFLKYDALWQHWENQVGHRRIKPHHIATGTVNPRPQKQYPINPKAKASIQTVINDLLKQGVLIQQNSIMNTPVYPVPKPDGKWRMVLDYREVNKTIPLIAAQNQHSAGILSSIFRGKYKTTLDLSNGFWAHSITPESYWLTAFTWLGQQYCWTRLPQGFLNSPALFTADVVDLLKEVPNVQVYVDDIYISHDDPREHLEQLEKVFSLLLNAGYVVSLKKSEIAQHEVEFLGFNITKEGRGLTETFKQKLLNITPPRDLKQLQSILGLLNFARNFIPNFSELVKPLYNIIATANGKYITWTTDNSQQLQNIISMLNSAENLEERNPEVRLIMKVNTSPSAGYIRFYNEFAKRPIMYLNYVYTKAEVKFTNTEKLLTTIHKGLIKALDLGMGQEILVYSPIVSMTKIQKTPLPERKALPIRWITWMSYLEDPRIQFHYDKTLPELQQVPTVTDDIIAKIKHPSEFSMVFYTDGSAIKHPNVNKSHNAGMGIAQVQFKPEFTVINTWSIPLGDHTAQLAEVAAVEFACKKALKIDGPVLIVTDSFYVAESVNKELPYWQSNGFFNNKKKPLKHVSKWKSIADCIQLKPDIIIIHEKGHQPTASTFHTEGNNLADKLATQGSYVVNAGKRTADGSEFEKRTADGSEFESPKKKAKVE

SEQ ID NO: 491 - protein, 2176 aa, synthetic construct
MPAAKRVKLDGGDKKYSIGLDIGTNSVGWAVITDEYKVPSKKFKVLGNTDRHSIKKNLIGALLFDSGETAEATRLKRTARRRYTRRKNRICYLQEIFSNEMAKVDDSFFHRLEESFLVEEDKKHERHPIFGNIVDEVAYHEKYPTIYHLRKKLVDSTDKADLRLIYLALAHMIKFRGHFLIEGDLNPDNSDVDKLFIQLVQTYNQLFEENPINASGVDAKAILSARLSKSRRLENLIAQLPGEKKNGLFGNLIALSLGLTPNFKSNFDLAEDAKLQLSKDTYDDDLDNLLAQIGDQYADLFLAAKNLSDAILLSDILRVNTEITKAPLSASMIKRYDEHHQDLTLLKALVRQQLPEKYKEIFFDQSKNGYAGYIDGGASQEEFYKFIKPILEKMDGTEELLVKLNREDLLRKQRTFDNGSIPHQIHLGELHAILRRQEDFYPFLKDNREKIEKILTFRIPYYVGPLARGNSRFAWMTRKSEETITPWNFEEVVDKGASAQSFIERMTNFDKNLPNEKVLPKHSLLYEYFTVYNELTKVKYVTEGMRKPAFLSGEQKKAIVDLLFKTNRKVTVKQLKEDYFKKIECFDSVEISGVEDRFNASLGTYHDLLKIIKDKDFLDNEENEDILEDIVLTLTLFEDREMIEERLKTYAHLFDDKVMKQLKRRRYTGWGRLSRKLINGIRDKQSGKTILDFLKSDGFANRNFMQLIHDDSLTFKEDIQKAQVSGQGDSLHEHIANLAGSPAIKKGILQTVKVVDELVKVMGRHKPENIVIEMARENQTTQKGQKNSRERMKRIEEGIKELGSQILKEHPVENTQLQNEKLYLYYLQNGRDMYVDQELDINRLSDYDVDHIVPQSFLKDDSIDNKVLTRSDKARGKSDNVPSEEVVKKMKNYWRQLLNAKLITQRKFDNLTKAERGGLSELDKAGFIKRQLVETRQITKHVAQILDSRMNTKYDENDKLIREVKVITLKSKLVSDFRKDFQFYKVREINNYHHAHDAYLNAVVGTALIKKYPKLESEFVYGDYKVYDVRKMIAKSEQEIGKATAKYFFYSNIMNFFKTEITLANGEIRKRPLIETNGETGEIVWDKGRDFATVRKVLSMPQVNIVKKTEVQTGGFSKESILPKRNSDKLIARKKDWDPKKYGGFDSPTVAYSVLVVAKVEKGKSKKLKSVKELLGITIMERSSFEKNPIDFLEAKGYKEVKKDLIIKLPKYSLFELENGRKRMLASAGELQKGNELALPSKYVNFLYLASHYEKLKGSPEDNEQKQLFVEQHKHYLDEIIEQISEFSKRVILADANLDKVLSAYNKHRDKPIREQAENIIHLFTLTNLGAPAAFKYFDTTIDRKRYTSTKEVLDATLIHQSITGLYETRIDLSQLGGDGGEAAAKGGGPAPGGMDPLQLLQPLEAEIKGTKLKAHWNSGATITCVPQAFLEEEVPIKNIWIKTIHGEKEQPVYYLTFKIQGRKVEAEVISSPYDYILVSPSDIPWLMKKPLQLTTLVPLQEYEERLLKQTMLTGSYKEKLQSLFLKYDALWQHWENQVGHRRIKPHHIATGTVNPRPQKQYPINPKAKASIQTVINDLLKQGVLIQQNSIMNTPVYPVPKPDGKWRMVLDYREVNKTIPLIAAQNQHSAGILSSIFRGKYKTTLDLSNGFWAHSITPESYWLTAFTWLGQQYCWTRLPQGFLNSPALFTADVVDLLKEVPNVQVYVDDIYISHDDPREHLEQLEKVFSLLLNAGYVVSLKKSEIAQHEVEFLGFNITKEGRGLTETFKQKLLNITPPRDLKQLQSILGLLNFARNFIPNFSELVKPLYNIIATANGKYITWTTDNSQQLQNIISMLNSAENLEERNPEVRLIMKVNTSPSAGYIRFYNEFAKRPIMYLNYVYTKAEVKFTNTEKLLTTIHKGLIKALDLGMGQEILVYSPIVSMTKIQKTPLPERKALPIRWITWMSYLEDPRIQFHYDKTLPELQQVPTVTDDIIAKIKHPSEFSMVFYTDGSAIKHPNVNKSHNAGMGIAQVQFKPEFTVINTWSIPLGDHTAQLAEVAAVEFACKKALKIDGPVLIVTDSFYVAESVNKELPYWQSNGFFNNKKKPLKHVSKWKSIADCIQLKPDIIIIHEKGHQPTASTFHTEGNNLADKLATQGSYVVNAGKRTADGSEFEKRTADGSEFESPKKKAKVE

SEQ ID NO: 492 - protein, 2180 aa, synthetic construct
MPAAKRVKLDGGDKKYSIGLDIGTNSVGWAVITDEYKVPSKKFKVLGNTDRHSIKKNLIGALLFDSGETAEATRLKRTARRRYTRRKNRICYLQEIFSNEMAKVDDSFFHRLEESFLVEEDKKHERHPIFGNIVDEVAYHEKYPTIYHLRKKLVDSTDKADLRLIYLALAHMIKFRGHFLIEGDLNPDNSDVDKLFIQLVQTYNQLFEENPINASGVDAKAILSARLSKSRRLENLIAQLPGEKKNGLFGNLIALSLGLTPNFKSNFDLAEDAKLQLSKDTYDDDLDNLLAQIGDQYADLFLAAKNLSDAILLSDILRVNTEITKAPLSASMIKRYDEHHQDLTLLKALVRQQLPEKYKEIFFDQSKNGYAGYIDGGASQEEFYKFIKPILEKMDGTEELLVKLNREDLLRKQRTFDNGSIPHQIHLGELHAILRRQEDFYPFLKDNREKIEKILTFRIPYYVGPLARGNSRFAWMTRKSEETITPWNFEEVVDKGASAQSFIERMTNFDKNLPNEKVLPKHSLLYEYFTVYNELTKVKYVTEGMRKPAFLSGEQKKAIVDLLFKTNRKVTVKQLKEDYFKKIECFDSVEISGVEDRFNASLGTYHDLLKIIKDKDFLDNEENEDILEDIVLTLTLFEDREMIEERLKTYAHLFDDKVMKQLKRRRYTGWGRLSRKLINGIRDKQSGKTILDFLKSDGFANRNFMQLIHDDSLTFKEDIQKAQVSGQGDSLHEHIANLAGSPAIKKGILQTVKVVDELVKVMGRHKPENIVIEMARENQTTQKGQKNSRERMKRIEEGIKELGSQILKEHPVENTQLQNEKLYLYYLQNGRDMYVDQELDINRLSDYDVDHIVPQSFLKDDSIDNKVLTRSDKARGKSDNVPSEEVVKKMKNYWRQLLNAKLITQRKFDNLTKAERGGLSELDKAGFIKRQLVETRQITKHVAQILDSRMNTKYDENDKLIREVKVITLKSKLVSDFRKDFQFYKVREINNYHHAHDAYLNAVVGTALIKKYPKLESEFVYGDYKVYDVRKMIAKSEQEIGKATAKYFFYSNIMNFFKTEITLANGEIRKRPLIETNGETGEIVWDKGRDFATVRKVLSMPQVNIVKKTEVQTGGFSKESILPKRNSDKLIARKKDWDPKKYGGFDSPTVAYSVLVVAKVEKGKSKKLKSVKELLGITIMERSSFEKNPIDFLEAKGYKEVKKDLIIKLPKYSLFELENGRKRMLASAGELQKGNELALPSKYVNFLYLASHYEKLKGSPEDNEQKQLFVEQHKHYLDEIIEQISEFSKRVILADANLDKVLSAYNKHRDKPIREQAENIIHLFTLTNLGAPAAFKYFDTTIDRKRYTSTKEVLDATLIHQSITGLYETRIDLSQLGGDGGGSSGSSGSSGSSGSSGGMDPLQLLQPLEAEIKGTKLKAHWNSGATITCVPQAFLEEEVPIKNIWIKTIHGEKEQPVYYLTFKIQGRKVEAEVISSPYDYILVSPSDIPWLMKKPLQLTTLVPLQEYEERLLKQTMLTGSYKEKLQSLFLKYDALWQHWENQVGHRRIKPHHIATGTVNPRPQKQYPINPKAKASIQTVINDLLKQGVLIQQNSIMNTPVYPVPKPDGKWRMVLDYREVNKTIPLIAAQNQHSAGILSSIFRGKYKTTLDLSNGFWAHSITPESYWLTAFTWLGQQYCWTRLPQGFLNSPALFTADVVDLLKEVPNVQVYVDDIYISHDDPREHLEQLEKVFSLLLNAGYVVSLKKSEIAQHEVEFLGFNITKEGRGLTETFKQKLLNITPPRDLKQLQSILGLLNFARNFIPNFSELVKPLYNIIATANGKYITWTTDNSQQLQNIISMLNSAENLEERNPEVRLIMKVNTSPSAGYIRFYNEFAKRPIMYLNYVYTKAEVKFTNTEKLLTTIHKGLIKALDLGMGQEILVYSPIVSMTKIQKTPLPERKALPIRWITWMSYLEDPRIQFHYDKTLPELQQVPTVTDDIIAKIKHPSEFSMVFYTDGSAIKHPNVNKSHNAGMGIAQVQFKPEFTVINTWSIPLGDHTAQLAEVAAVEFACKKALKIDGPVLIVTDSFYVAESVNKELPYWQSNGFFNNKKKPLKHVSKWKSIADCIQLKPDIIIIHEKGHQPTASTFHTEGNNLADKLATQGSYVVNAGKRTADGSEFEKRTADGSEFESPKKKAKVE

SEQ ID NO: 493 - protein, 2176 aa, synthetic construct
MPAAKRVKLDGGDKKYSIGLDIGTNSVGWAVITDEYKVPSKKFKVLGNTDRHSIKKNLIGALLFDSGETAEATRLKRTARRRYTRRKNRICYLQEIFSNEMAKVDDSFFHRLEESFLVEEDKKHERHPIFGNIVDEVAYHEKYPTIYHLRKKLVDSTDKADLRLIYLALAHMIKFRGHFLIEGDLNPDNSDVDKLFIQLVQTYNQLFEENPINASGVDAKAILSARLSKSRRLENLIAQLPGEKKNGLFGNLIALSLGLTPNFKSNFDLAEDAKLQLSKDTYDDDLDNLLAQIGDQYADLFLAAKNLSDAILLSDILRVNTEITKAPLSASMIKRYDEHHQDLTLLKALVRQQLPEKYKEIFFDQSKNGYAGYIDGGASQEEFYKFIKPILEKMDGTEELLVKLNREDLLRKQRTFDNGSIPHQIHLGELHAILRRQEDFYPFLKDNREKIEKILTFRIPYYVGPLARGNSRFAWMTRKSEETITPWNFEEVVDKGASAQSFIERMTNFDKNLPNEKVLPKHSLLYEYFTVYNELTKVKYVTEGMRKPAFLSGEQKKAIVDLLFKTNRKVTVKQLKEDYFKKIECFDSVEISGVEDRFNASLGTYHDLLKIIKDKDFLDNEENEDILEDIVLTLTLFEDREMIEERLKTYAHLFDDKVMKQLKRRRYTGWGRLSRKLINGIRDKQSGKTILDFLKSDGFANRNFMQLIHDDSLTFKEDIQKAQVSGQGDSLHEHIANLAGSPAIKKGILQTVKVVDELVKVMGRHKPENIVIEMARENQTTQKGQKNSRERMKRIEEGIKELGSQILKEHPVENTQLQNEKLYLYYLQNGRDMYVDQELDINRLSDYDVDHIVPQSFLKDDSIDNKVLTRSDKARGKSDNVPSEEVVKKMKNYWRQLLNAKLITQRKFDNLTKAERGGLSELDKAGFIKRQLVETRQITKHVAQILDSRMNTKYDENDKLIREVKVITLKSKLVSDFRKDFQFYKVREINNYHHAHDAYLNAVVGTALIKKYPKLESEFVYGDYKVYDVRKMIAKSEQEIGKATAKYFFYSNIMNFFKTEITLANGEIRKRPLIETNGETGEIVWDKGRDFATVRKVLSMPQVNIVKKTEVQTGGFSKESILPKRNSDKLIARKKDWDPKKYGGFDSPTVAYSVLVVAKVEKGKSKKLKSVKELLGITIMERSSFEKNPIDFLEAKGYKEVKKDLIIKLPKYSLFELENGRKRMLASAGELQKGNELALPSKYVNFLYLASHYEKLKGSPEDNEQKQLFVEQHKHYLDEIIEQISEFSKRVILADANLDKVLSAYNKHRDKPIREQAENIIHLFTLTNLGAPAAFKYFDTTIDRKRYTSTKEVLDATLIHQSITGLYETRIDLSQLGGDGGEAAAKGGSPAPGGMDPLQLLQPLEAEIKGTKLKAHWNSGATITCVPQAFLEEEVPIKNIWIKTIHGEKEQPVYYLTFKIQGRKVEAEVISSPYDYILVSPSDIPWLMKKPLQLTTLVPLQEYEERLLKQTMLTGSYKEKLQSLFLKYDALWQHWENQVGHRRIKPHHIATGTVNPRPQKQYPINPKAKASIQTVINDLLKQGVLIQQNSIMNTPVYPVPKPDGKWRMVLDYREVNKTIPLIAAQNQHSAGILSSIFRGKYKTTLDLSNGFWAHSITPESYWLTAFTWLGQQYCWTRLPQGFLNSPALFTADVVDLLKEVPNVQVYVDDIYISHDDPREHLEQLEKVFSLLLNAGYVVSLKKSEIAQHEVEFLGFNITKEGRGLTETFKQKLLNITPPRDLKQLQSILGLLNFARNFIPNFSELVKPLYNIIATANGKYITWTTDNSQQLQNIISMLNSAENLEERNPEVRLIMKVNTSPSAGYIRFYNEFAKRPIMYLNYVYTKAEVKFTNTEKLLTTIHKGLIKALDLGMGQEILVYSPIVSMTKIQKTPLPERKALPIRWITWMSYLEDPRIQFHYDKTLPELQQVPTVTDDIIAKIKHPSEFSMVFYTDGSAIKHPNVNKSHNAGMGIAQVQFKPEFTVINTWSIPLGDHTAQLAEVAAVEFACKKALKIDGPVLIVTDSFYVAESVNKELPYWQSNGFFNNKKKPLKHVSKWKSIADCIQLKPDIIIIHEKGHQPTASTFHTEGNNLADKLATQGSYVVNAGKRTADGSEFEKRTADGSEFESPKKKAKVE

SEQ ID NO: 494 - protein, 2181 aa, synthetic construct
MPAAKRVKLDGGDKKYSIGLDIGTNSVGWAVITDEYKVPSKKFKVLGNTDRHSIKKNLIGALLFDSGETAEATRLKRTARRRYTRRKNRICYLQEIFSNEMAKVDDSFFHRLEESFLVEEDKKHERHPIFGNIVDEVAYHEKYPTIYHLRKKLVDSTDKADLRLIYLALAHMIKFRGHFLIEGDLNPDNSDVDKLFIQLVQTYNQLFEENPINASGVDAKAILSARLSKSRRLENLIAQLPGEKKNGLFGNLIALSLGLTPNFKSNFDLAEDAKLQLSKDTYDDDLDNLLAQIGDQYADLFLAAKNLSDAILLSDILRVNTEITKAPLSASMIKRYDEHHQDLTLLKALVRQQLPEKYKEIFFDQSKNGYAGYIDGGASQEEFYKFIKPILEKMDGTEELLVKLNREDLLRKQRTFDNGSIPHQIHLGELHAILRRQEDFYPFLKDNREKIEKILTFRIPYYVGPLARGNSRFAWMTRKSEETITPWNFEEVVDKGASAQSFIERMTNFDKNLPNEKVLPKHSLLYEYFTVYNELTKVKYVTEGMRKPAFLSGEQKKAIVDLLFKTNRKVTVKQLKEDYFKKIECFDSVEISGVEDRFNASLGTYHDLLKIIKDKDFLDNEENEDILEDIVLTLTLFEDREMIEERLKTYAHLFDDKVMKQLKRRRYTGWGRLSRKLINGIRDKQSGKTILDFLKSDGFANRNFMQLIHDDSLTFKEDIQKAQVSGQGDSLHEHIANLAGSPAIKKGILQTVKVVDELVKVMGRHKPENIVIEMARENQTTQKGQKNSRERMKRIEEGIKELGSQILKEHPVENTQLQNEKLYLYYLQNGRDMYVDQELDINRLSDYDVDHIVPQSFLKDDSIDNKVLTRSDKARGKSDNVPSEEVVKKMKNYWRQLLNAKLITQRKFDNLTKAERGGLSELDKAGFIKRQLVETRQITKHVAQILDSRMNTKYDENDKLIREVKVITLKSKLVSDFRKDFQFYKVREINNYHHAHDAYLNAVVGTALIKKYPKLESEFVYGDYKVYDVRKMIAKSEQEIGKATAKYFFYSNIMNFFKTEITLANGEIRKRPLIETNGETGEIVWDKGRDFATVRKVLSMPQVNIVKKTEVQTGGFSKESILPKRNSDKLIARKKDWDPKKYGGFDSPTVAYSVLVVAKVEKGKSKKLKSVKELLGITIMERSSFEKNPIDFLEAKGYKEVKKDLIIKLPKYSLFELENGRKRMLASAGELQKGNELALPSKYVNFLYLASHYEKLKGSPEDNEQKQLFVEQHKHYLDEIIEQISEFSKRVILADANLDKVLSAYNKHRDKPIREQAENIIHLFTLTNLGAPAAFKYFDTTIDRKRYTSTKEVLDATLIHQSITGLYETRIDLSQLGGDGGSGSETPGTSESATPESGGMDPLQLLQPLEAEIKGTKLKAHWNSGATITCVPQAFLEEEVPIKNIWIKTIHGEKEQPVYYLTFKIQGRKVEAEVISSPYDYILVSPSDIPWLMKKPLQLTTLVPLQEYEERLLKQTMLTGSYKEKLQSLFLKYDALWQHWENQVGHRRIKPHHIATGTVNPRPQKQYPINPKAKASIQTVINDLLKQGVLIQQNSIMNTPVYPVPKPDGKWRMVLDYREVNKTIPLIAAQNQHSAGILSSIFRGKYKTTLDLSNGFWAHSITPESYWLTAFTWLGQQYCWTRLPQGFLNSPALFTADVVDLLKEVPNVQVYVDDIYISHDDPREHLEQLEKVFSLLLNAGYVVSLKKSEIAQHEVEFLGFNITKEGRGLTETFKQKLLNITPPRDLKQLQSILGLLNFARNFIPNFSELVKPLYNIIATANGKYITWTTDNSQQLQNIISMLNSAENLEERNPEVRLIMKVNTSPSAGYIRFYNEFAKRPIMYLNYVYTKAEVKFTNTEKLLTTIHKGLIKALDLGMGQEILVYSPIVSMTKIQKTPLPERKALPIRWITWMSYLEDPRIQFHYDKTLPELQQVPTVTDDIIAKIKHPSEFSMVFYTDGSAIKHPNVNKSHNAGMGIAQVQFKPEFTVINTWSIPLGDHTAQLAEVAAVEFACKKALKIDGPVLIVTDSFYVAESVNKELPYWQSNGFFNNKKKPLKHVSKWKSIADCIQLKPDIIIIHEKGHQPTASTFHTEGNNLADKLATQGSYVVNAGKRTADGSEFEKRTADGSEFESPKKKAKVE

SEQ ID NO: 495 - protein, 2176 aa, synthetic construct
MPAAKRVKLDGGDKKYSIGLDIGTNSVGWAVITDEYKVPSKKFKVLGNTDRHSIKKNLIGALLFDSGETAEATRLKRTARRRYTRRKNRICYLQEIFSNEMAKVDDSFFHRLEESFLVEEDKKHERHPIFGNIVDEVAYHEKYPTIYHLRKKLVDSTDKADLRLIYLALAHMIKFRGHFLIEGDLNPDNSDVDKLFIQLVQTYNQLFEENPINASGVDAKAILSARLSKSRRLENLIAQLPGEKKNGLFGNLIALSLGLTPNFKSNFDLAEDAKLQLSKDTYDDDLDNLLAQIGDQYADLFLAAKNLSDAILLSDILRVNTEITKAPLSASMIKRYDEHHQDLTLLKALVRQQLPEKYKEIFFDQSKNGYAGYIDGGASQEEFYKFIKPILEKMDGTEELLVKLNREDLLRKQRTFDNGSIPHQIHLGELHAILRRQEDFYPFLKDNREKIEKILTFRIPYYVGPLARGNSRFAWMTRKSEETITPWNFEEVVDKGASAQSFIERMTNFDKNLPNEKVLPKHSLLYEYFTVYNELTKVKYVTEGMRKPAFLSGEQKKAIVDLLFKTNRKVTVKQLKEDYFKKIECFDSVEISGVEDRFNASLGTYHDLLKIIKDKDFLDNEENEDILEDIVLTLTLFEDREMIEERLKTYAHLFDDKVMKQLKRRRYTGWGRLSRKLINGIRDKQSGKTILDFLKSDGFANRNFMQLIHDDSLTFKEDIQKAQVSGQGDSLHEHIANLAGSPAIKKGILQTVKVVDELVKVMGRHKPENIVIEMARENQTTQKGQKNSRERMKRIEEGIKELGSQILKEHPVENTQLQNEKLYLYYLQNGRDMYVDQELDINRLSDYDVDHIVPQSFLKDDSIDNKVLTRSDKARGKSDNVPSEEVVKKMKNYWRQLLNAKLITQRKFDNLTKAERGGLSELDKAGFIKRQLVETRQITKHVAQILDSRMNTKYDENDKLIREVKVITLKSKLVSDFRKDFQFYKVREINNYHHAHDAYLNAVVGTALIKKYPKLESEFVYGDYKVYDVRKMIAKSEQEIGKATAKYFFYSNIMNFFKTEITLANGEIRKRPLIETNGETGEIVWDKGRDFATVRKVLSMPQVNIVKKTEVQTGGFSKESILPKRNSDKLIARKKDWDPKKYGGFDSPTVAYSVLVVAKVEKGKSKKLKSVKELLGITIMERSSFEKNPIDFLEAKGYKEVKKDLIIKLPKYSLFELENGRKRMLASAGELQKGNELALPSKYVNFLYLASHYEKLKGSPEDNEQKQLFVEQHKHYLDEIIEQISEFSKRVILADANLDKVLSAYNKHRDKPIREQAENIIHLFTLTNLGAPAAFKYFDTTIDRKRYTSTKEVLDATLIHQSITGLYETRIDLSQLGGDGGEAAAKPAPGSSGGMDPLQLLQPLEAEIKGTKLKAHWNSGATITCVPQAFLEEEVPIKNIWIKTIHGEKEQPVYYLTFKIQGRKVEAEVISSPYDYILVSPSDIPWLMKKPLQLTTLVPLQEYEERLLKQTMLTGSYKEKLQSLFLKYDALWQHWENQVGHRRIKPHHIATGTVNPRPQKQYPINPKAKASIQTVINDLLKQGVLIQQNSIMNTPVYPVPKPDGKWRMVLDYREVNKTIPLIAAQNQHSAGILSSIFRGKYKTTLDLSNGFWAHSITPESYWLTAFTWLGQQYCWTRLPQGFLNSPALFTADVVDLLKEVPNVQVYVDDIYISHDDPREHLEQLEKVFSLLLNAGYVVSLKKSEIAQHEVEFLGFNITKEGRGLTETFKQKLLNITPPRDLKQLQSILGLLNFARNFIPNFSELVKPLYNIIATANGKYITWTTDNSQQLQNIISMLNSAENLEERNPEVRLIMKVNTSPSAGYIRFYNEFAKRPIMYLNYVYTKAEVKFTNTEKLLTTIHKGLIKALDLGMGQEILVYSPIVSMTKIQKTPLPERKALPIRWITWMSYLEDPRIQFHYDKTLPELQQVPTVTDDIIAKIKHPSEFSMVFYTDGSAIKHPNVNKSHNAGMGIAQVQFKPEFTVINTWSIPLGDHTAQLAEVAAVEFACKKALKIDGPVLIVTDSFYVAESVNKELPYWQSNGFFNNKKKPLKHVSKWKSIADCIQLKPDIIIIHEKGHQPTASTFHTEGNNLADKLATQGSYVVNAGKRTADGSEFEKRTADGSEFESPKKKAKVE

SEQ ID NO: 496 - protein, 2176 aa, synthetic construct
MPAAKRVKLDGGDKKYSIGLDIGTNSVGWAVITDEYKVPSKKFKVLGNTDRHSIKKNLIGALLFDSGETAEATRLKRTARRRYTRRKNRICYLQEIFSNEMAKVDDSFFHRLEESFLVEEDKKHERHPIFGNIVDEVAYHEKYPTIYHLRKKLVDSTDKADLRLIYLALAHMIKFRGHFLIEGDLNPDNSDVDKLFIQLVQTYNQLFEENPINASGVDAKAILSARLSKSRRLENLIAQLPGEKKNGLFGNLIALSLGLTPNFKSNFDLAEDAKLQLSKDTYDDDLDNLLAQIGDQYADLFLAAKNLSDAILLSDILRVNTEITKAPLSASMIKRYDEHHQDLTLLKALVRQQLPEKYKEIFFDQSKNGYAGYIDGGASQEEFYKFIKPILEKMDGTEELLVKLNREDLLRKQRTFDNGSIPHQIHLGELHAILRRQEDFYPFLKDNREKIEKILTFRIPYYVGPLARGNSRFAWMTRKSEETITPWNFEEVVDKGASAQSFIERMTNFDKNLPNEKVLPKHSLLYEYFTVYNELTKVKYVTEGMRKPAFLSGEQKKAIVDLLFKTNRKVTVKQLKEDYFKKIECFDSVEISGVEDRFNASLGTYHDLLKIIKDKDFLDNEENEDILEDIVLTLTLFEDREMIEERLKTYAHLFDDKVMKQLKRRRYTGWGRLSRKLINGIRDKQSGKTILDFLKSDGFANRNFMQLIHDDSLTFKEDIQKAQVSGQGDSLHEHIANLAGSPAIKKGILQTVKVVDELVKVMGRHKPENIVIEMARENQTTQKGQKNSRERMKRIEEGIKELGSQILKEHPVENTQLQNEKLYLYYLQNGRDMYVDQELDINRLSDYDVDHIVPQSFLKDDSIDNKVLTRSDKARGKSDNVPSEEVVKKMKNYWRQLLNAKLITQRKFDNLTKAERGGLSELDKAGFIKRQLVETRQITKHVAQILDSRMNTKYDENDKLIREVKVITLKSKLVSDFRKDFQFYKVREINNYHHAHDAYLNAVVGTALIKKYPKLESEFVYGDYKVYDVRKMIAKSEQEIGKATAKYFFYSNIMNFFKTEITLANGEIRKRPLIETNGETGEIVWDKGRDFATVRKVLSMPQVNIVKKTEVQTGGFSKESILPKRNSDKLIARKKDWDPKKYGGFDSPTVAYSVLVVAKVEKGKSKKLKSVKELLGITIMERSSFEKNPIDFLEAKGYKEVKKDLIIKLPKYSLFELENGRKRMLASAGELQKGNELALPSKYVNFLYLASHYEKLKGSPEDNEQKQLFVEQHKHYLDEIIEQISEFSKRVILADANLDKVLSAYNKHRDKPIREQAENIIHLFTLTNLGAPAAFKYFDTTIDRKRYTSTKEVLDATLIHQSITGLYETRIDLSQLGGDGGEAAAKGSSPAPGGMDPLQLLQPLEAEIKGTKLKAHWNSGATITCVPQAFLEEEVPIKNIWIKTIHGEKEQPVYYLTFKIQGRKVEAEVISSPYDYILVSPSDIPWLMKKPLQLTTLVPLQEYEERLLKQTMLTGSYKEKLQSLFLKYDALWQHWENQVGHRRIKPHHIATGTVNPRPQKQYPINPKAKASIQTVINDLLKQGVLIQQNSIMNTPVYPVPKPDGKWRMVLDYREVNKTIPLIAAQNQHSAGILSSIFRGKYKTTLDLSNGFWAHSITPESYWLTAFTWLGQQYCWTRLPQGFLNSPALFTADVVDLLKEVPNVQVYVDDIYISHDDPREHLEQLEKVFSLLLNAGYVVSLKKSEIAQHEVEFLGFNITKEGRGLTETFKQKLLNITPPRDLKQLQSILGLLNFARNFIPNFSELVKPLYNIIATANGKYITWTTDNSQQLQNIISMLNSAENLEERNPEVRLIMKVNTSPSAGYIRFYNEFAKRPIMYLNYVYTKAEVKFTNTEKLLTTIHKGLIKALDLGMGQEILVYSPIVSMTKIQKTPLPERKALPIRWITWMSYLEDPRIQFHYDKTLPELQQVPTVTDDIIAKIKHPSEFSMVFYTDGSAIKHPNVNKSHNAGMGIAQVQFKPEFTVINTWSIPLGDHTAQLAEVAAVEFACKKALKIDGPVLIVTDSFYVAESVNKELPYWQSNGFFNNKKKPLKHVSKWKSIADCIQLKPDIIIIHEKGHQPTASTFHTEGNNLADKLATQGSYVVNAGKRTADGSEFEKRTADGSEFESPKKKAKVE

SEQ ID NO: 497 - protein, 2176 aa, synthetic construct
MPAAKRVKLDGGDKKYSIGLDIGTNSVGWAVITDEYKVPSKKFKVLGNTDRHSIKKNLIGALLFDSGETAEATRLKRTARRRYTRRKNRICYLQEIFSNEMAKVDDSFFHRLEESFLVEEDKKHERHPIFGNIVDEVAYHEKYPTIYHLRKKLVDSTDKADLRLIYLALAHMIKFRGHFLIEGDLNPDNSDVDKLFIQLVQTYNQLFEENPINASGVDAKAILSARLSKSRRLENLIAQLPGEKKNGLFGNLIALSLGLTPNFKSNFDLAEDAKLQLSKDTYDDDLDNLLAQIGDQYADLFLAAKNLSDAILLSDILRVNTEITKAPLSASMIKRYDEHHQDLTLLKALVRQQLPEKYKEIFFDQSKNGYAGYIDGGASQEEFYKFIKPILEKMDGTEELLVKLNREDLLRKQRTFDNGSIPHQIHLGELHAILRRQEDFYPFLKDNREKIEKILTFRIPYYVGPLARGNSRFAWMTRKSEETITPWNFEEVVDKGASAQSFIERMTNFDKNLPNEKVLPKHSLLYEYFTVYNELTKVKYVTEGMRKPAFLSGEQKKAIVDLLFKTNRKVTVKQLKEDYFKKIECFDSVEISGVEDRFNASLGTYHDLLKIIKDKDFLDNEENEDILEDIVLTLTLFEDREMIEERLKTYAHLFDDKVMKQLKRRRYTGWGRLSRKLINGIRDKQSGKTILDFLKSDGFANRNFMQLIHDDSLTFKEDIQKAQVSGQGDSLHEHIANLAGSPAIKKGILQTVKVVDELVKVMGRHKPENIVIEMARENQTTQKGQKNSRERMKRIEEGIKELGSQILKEHPVENTQLQNEKLYLYYLQNGRDMYVDQELDINRLSDYDVDHIVPQSFLKDDSIDNKVLTRSDKARGKSDNVPSEEVVKKMKNYWRQLLNAKLITQRKFDNLTKAERGGLSELDKAGFIKRQLVETRQITKHVAQILDSRMNTKYDENDKLIREVKVITLKSKLVSDFRKDFQFYKVREINNYHHAHDAYLNAVVGTALIKKYPKLESEFVYGDYKVYDVRKMIAKSEQEIGKATAKYFFYSNIMNFFKTEITLANGEIRKRPLIETNGETGEIVWDKGRDFATVRKVLSMPQVNIVKKTEVQTGGFSKESILPKRNSDKLIARKKDWDPKKYGGFDSPTVAYSVLVVAKVEKGKSKKLKSVKELLGITIMERSSFEKNPIDFLEAKGYKEVKKDLIIKLPKYSLFELENGRKRMLASAGELQKGNELALPSKYVNFLYLASHYEKLKGSPEDNEQKQLFVEQHKHYLDEIIEQISEFSKRVILADANLDKVLSAYNKHRDKPIREQAENIIHLFTLTNLGAPAAFKYFDTTIDRKRYTSTKEVLDATLIHQSITGLYETRIDLSQLGGDGGPAPGGGEAAAKGGMDPLQLLQPLEAEIKGTKLKAHWNSGATITCVPQAFLEEEVPIKNIWIKTIHGEKEQPVYYLTFKIQGRKVEAEVISSPYDYILVSPSDIPWLMKKPLQLTTLVPLQEYEERLLKQTMLTGSYKEKLQSLFLKYDALWQHWENQVGHRRIKPHHIATGTVNPRPQKQYPINPKAKASIQTVINDLLKQGVLIQQNSIMNTPVYPVPKPDGKWRMVLDYREVNKTIPLIAAQNQHSAGILSSIFRGKYKTTLDLSNGFWAHSITPESYWLTAFTWLGQQYCWTRLPQGFLNSPALFTADVVDLLKEVPNVQVYVDDIYISHDDPREHLEQLEKVFSLLLNAGYVVSLKKSEIAQHEVEFLGFNITKEGRGLTETFKQKLLNITPPRDLKQLQSILGLLNFARNFIPNFSELVKPLYNIIATANGKYITWTTDNSQQLQNIISMLNSAENLEERNPEVRLIMKVNTSPSAGYIRFYNEFAKRPIMYLNYVYTKAEVKFTNTEKLLTTIHKGLIKALDLGMGQEILVYSPIVSMTKIQKTPLPERKALPIRWITWMSYLEDPRIQFHYDKTLPELQQVPTVTDDIIAKIKHPSEFSMVFYTDGSAIKHPNVNKSHNAGMGIAQVQFKPEFTVINTWSIPLGDHTAQLAEVAAVEFACKKALKIDGPVLIVTDSFYVAESVNKELPYWQSNGFFNNKKKPLKHVSKWKSIADCIQLKPDIIIIHEKGHQPTASTFHTEGNNLADKLATQGSYVVNAGKRTADGSEFEKRTADGSEFESPKKKAKVE

SEQ ID NO: 498 - protein, 2180 aa, synthetic construct
MPAAKRVKLDGGDKKYSIGLDIGTNSVGWAVITDEYKVPSKKFKVLGNTDRHSIKKNLIGALLFDSGETAEATRLKRTARRRYTRRKNRICYLQEIFSNEMAKVDDSFFHRLEESFLVEEDKKHERHPIFGNIVDEVAYHEKYPTIYHLRKKLVDSTDKADLRLIYLALAHMIKFRGHFLIEGDLNPDNSDVDKLFIQLVQTYNQLFEENPINASGVDAKAILSARLSKSRRLENLIAQLPGEKKNGLFGNLIALSLGLTPNFKSNFDLAEDAKLQLSKDTYDDDLDNLLAQIGDQYADLFLAAKNLSDAILLSDILRVNTEITKAPLSASMIKRYDEHHQDLTLLKALVRQQLPEKYKEIFFDQSKNGYAGYIDGGASQEEFYKFIKPILEKMDGTEELLVKLNREDLLRKQRTFDNGSIPHQIHLGELHAILRRQEDFYPFLKDNREKIEKILTFRIPYYVGPLARGNSRFAWMTRKSEETITPWNFEEVVDKGASAQSFIERMTNFDKNLPNEKVLPKHSLLYEYFTVYNELTKVKYVTEGMRKPAFLSGEQKKAIVDLLFKTNRKVTVKQLKEDYFKKIECFDSVEISGVEDRFNASLGTYHDLLKIIKDKDFLDNEENEDILEDIVLTLTLFEDREMIEERLKTYAHLFDDKVMKQLKRRRYTGWGRLSRKLINGIRDKQSGKTILDFLKSDGFANRNFMQLIHDDSLTFKEDIQKAQVSGQGDSLHEHIANLAGSPAIKKGILQTVKVVDELVKVMGRHKPENIVIEMARENQTTQKGQKNSRERMKRIEEGIKELGSQILKEHPVENTQLQNEKLYLYYLQNGRDMYVDQELDINRLSDYDVDHIVPQSFLKDDSIDNKVLTRSDKARGKSDNVPSEEVVKKMKNYWRQLLNAKLITQRKFDNLTKAERGGLSELDKAGFIKRQLVETRQITKHVAQILDSRMNTKYDENDKLIREVKVITLKSKLVSDFRKDFQFYKVREINNYHHAHDAYLNAVVGTALIKKYPKLESEFVYGDYKVYDVRKMIAKSEQEIGKATAKYFFYSNIMNFFKTEITLANGEIRKRPLIETNGETGEIVWDKGRDFATVRKVLSMPQVNIVKKTEVQTGGFSKESILPKRNSDKLIARKKDWDPKKYGGFDSPTVAYSVLVVAKVEKGKSKKLKSVKELLGITIMERSSFEKNPIDFLEAKGYKEVKKDLIIKLPKYSLFELENGRKRMLASAGELQKGNELALPSKYVNFLYLASHYEKLKGSPEDNEQKQLFVEQHKHYLDEIIEQISEFSKRVILADANLDKVLSAYNKHRDKPIREQAENIIHLFTLTNLGAPAAFKYFDTTIDRKRYTSTKEVLDATLIHQSITGLYETRIDLSQLGGDGGEAAAKEAAAKEAAAKGGMDPLQLLQPLEAEIKGTKLKAHWNSGATITCVPQAFLEEEVPIKNIWIKTIHGEKEQPVYYLTFKIQGRKVEAEVISSPYDYILVSPSDIPWLMKKPLQLTTLVPLQEYEERLLKQTMLTGSYKEKLQSLFLKYDALWQHWENQVGHRRIKPHHIATGTVNPRPQKQYPINPKAKASIQTVINDLLKQGVLIQQNSIMNTPVYPVPKPDGKWRMVLDYREVNKTIPLIAAQNQHSAGILSSIFRGKYKTTLDLSNGFWAHSITPESYWLTAFTWLGQQYCWTRLPQGFLNSPALFTADVVDLLKEVPNVQVYVDDIYISHDDPREHLEQLEKVFSLLLNAGYVVSLKKSEIAQHEVEFLGFNITKEGRGLTETFKQKLLNITPPRDLKQLQSILGLLNFARNFIPNFSELVKPLYNIIATANGKYITWTTDNSQQLQNIISMLNSAENLEERNPEVRLIMKVNTSPSAGYIRFYNEFAKRPIMYLNYVYTKAEVKFTNTEKLLTTIHKGLIKALDLGMGQEILVYSPIVSMTKIQKTPLPERKALPIRWITWMSYLEDPRIQFHYDKTLPELQQVPTVTDDIIAKIKHPSEFSMVFYTDGSAIKHPNVNKSHNAGMGIAQVQFKPEFTVINTWSIPLGDHTAQLAEVAAVEFACKKALKIDGPVLIVTDSFYVAESVNKELPYWQSNGFFNNKKKPLKHVSKWKSIADCIQLKPDIIIIHEKGHQPTASTFHTEGNNLADKLATQGSYVVNAGKRTADGSEFEKRTADGSEFESPKKKAKVE

SEQ ID NO: 499 - protein, 2176 aa, synthetic construct
MPAAKRVKLDGGDKKYSIGLDIGTNSVGWAVITDEYKVPSKKFKVLGNTDRHSIKKNLIGALLFDSGETAEATRLKRTARRRYTRRKNRICYLQEIFSNEMAKVDDSFFHRLEESFLVEEDKKHERHPIFGNIVDEVAYHEKYPTIYHLRKKLVDSTDKADLRLIYLALAHMIKFRGHFLIEGDLNPDNSDVDKLFIQLVQTYNQLFEENPINASGVDAKAILSARLSKSRRLENLIAQLPGEKKNGLFGNLIALSLGLTPNFKSNFDLAEDAKLQLSKDTYDDDLDNLLAQIGDQYADLFLAAKNLSDAILLSDILRVNTEITKAPLSASMIKRYDEHHQDLTLLKALVRQQLPEKYKEIFFDQSKNGYAGYIDGGASQEEFYKFIKPILEKMDGTEELLVKLNREDLLRKQRTFDNGSIPHQIHLGELHAILRRQEDFYPFLKDNREKIEKILTFRIPYYVGPLARGNSRFAWMTRKSEETITPWNFEEVVDKGASAQSFIERMTNFDKNLPNEKVLPKHSLLYEYFTVYNELTKVKYVTEGMRKPAFLSGEQKKAIVDLLFKTNRKVTVKQLKEDYFKKIECFDSVEISGVEDRFNASLGTYHDLLKIIKDKDFLDNEENEDILEDIVLTLTLFEDREMIEERLKTYAHLFDDKVMKQLKRRRYTGWGRLSRKLINGIRDKQSGKTILDFLKSDGFANRNFMQLIHDDSLTFKEDIQKAQVSGQGDSLHEHIANLAGSPAIKKGILQTVKVVDELVKVMGRHKPENIVIEMARENQTTQKGQKNSRERMKRIEEGIKELGSQILKEHPVENTQLQNEKLYLYYLQNGRDMYVDQELDINRLSDYDVDHIVPQSFLKDDSIDNKVLTRSDKARGKSDNVPSEEVVKKMKNYWRQLLNAKLITQRKFDNLTKAERGGLSELDKAGFIKRQLVETRQITKHVAQILDSRMNTKYDENDKLIREVKVITLKSKLVSDFRKDFQFYKVREINNYHHAHDAYLNAVVGTALIKKYPKLESEFVYGDYKVYDVRKMIAKSEQEIGKATAKYFFYSNIMNFFKTEITLANGEIRKRPLIETNGETGEIVWDKGRDFATVRKVLSMPQVNIVKKTEVQTGGFSKESILPKRNSDKLIARKKDWDPKKYGGFDSPTVAYSVLVVAKVEKGKSKKLKSVKELLGITIMERSSFEKNPIDFLEAKGYKEVKKDLIIKLPKYSLFELENGRKRMLASAGELQKGNELALPSKYVNFLYLASHYEKLKGSPEDNEQKQLFVEQHKHYLDEIIEQISEFSKRVILADANLDKVLSAYNKHRDKPIREQAENIIHLFTLTNLGAPAAFKYFDTTIDRKRYTSTKEVLDATLIHQSITGLYETRIDLSQLGGDGGEAAAKPAPGGSGGMDPLQLLQPLEAEIKGTKLKAHWNSGATITCVPQAFLEEEVPIKNIWIKTIHGEKEQPVYYLTFKIQGRKVEAEVISSPYDYILVSPSDIPWLMKKPLQLTTLVPLQEYEERLLKQTMLTGSYKEKLQSLFLKYDALWQHWENQVGHRRIKPHHIATGTVNPRPQKQYPINPKAKASIQTVINDLLKQGVLIQQNSIMNTPVYPVPKPDGKWRMVLDYREVNKTIPLIAAQNQHSAGILSSIFRGKYKTTLDLSNGFWAHSITPESYWLTAFTWLGQQYCWTRLPQGFLNSPALFTADVVDLLKEVPNVQVYVDDIYISHDDPREHLEQLEKVFSLLLNAGYVVSLKKSEIAQHEVEFLGFNITKEGRGLTETFKQKLLNITPPRDLKQLQSILGLLNFARNFIPNFSELVKPLYNIIATANGKYITWTTDNSQQLQNIISMLNSAENLEERNPEVRLIMKVNTSPSAGYIRFYNEFAKRPIMYLNYVYTKAEVKFTNTEKLLTTIHKGLIKALDLGMGQEILVYSPIVSMTKIQKTPLPERKALPIRWITWMSYLEDPRIQFHYDKTLPELQQVPTVTDDIIAKIKHPSEFSMVFYTDGSAIKHPNVNKSHNAGMGIAQVQFKPEFTVINTWSIPLGDHTAQLAEVAAVEFACKKALKIDGPVLIVTDSFYVAESVNKELPYWQSNGFFNNKKKPLKHVSKWKSIADCIQLKPDIIIIHEKGHQPTASTFHTEGNNLADKLATQGSYVVNAGKRTADGSEFEKRTADGSEFESPKKKAKVE

SEQ ID NO: 500 - protein, 2178 aa, synthetic construct
MPAAKRVKLDGGDKKYSIGLDIGTNSVGWAVITDEYKVPSKKFKVLGNTDRHSIKKNLIGALLFDSGETAEATRLKRTARRRYTRRKNRICYLQEIFSNEMAKVDDSFFHRLEESFLVEEDKKHERHPIFGNIVDEVAYHEKYPTIYHLRKKLVDSTDKADLRLIYLALAHMIKFRGHFLIEGDLNPDNSDVDKLFIQLVQTYNQLFEENPINASGVDAKAILSARLSKSRRLENLIAQLPGEKKNGLFGNLIALSLGLTPNFKSNFDLAEDAKLQLSKDTYDDDLDNLLAQIGDQYADLFLAAKNLSDAILLSDILRVNTEITKAPLSASMIKRYDEHHQDLTLLKALVRQQLPEKYKEIFFDQSKNGYAGYIDGGASQEEFYKFIKPILEKMDGTEELLVKLNREDLLRKQRTFDNGSIPHQIHLGELHAILRRQEDFYPFLKDNREKIEKILTFRIPYYVGPLARGNSRFAWMTRKSEETITPWNFEEVVDKGASAQSFIERMTNFDKNLPNEKVLPKHSLLYEYFTVYNELTKVKYVTEGMRKPAFLSGEQKKAIVDLLFKTNRKVTVKQLKEDYFKKIECFDSVEISGVEDRFNASLGTYHDLLKIIKDKDFLDNEENEDILEDIVLTLTLFEDREMIEERLKTYAHLFDDKVMKQLKRRRYTGWGRLSRKLINGIRDKQSGKTILDFLKSDGFANRNFMQLIHDDSLTFKEDIQKAQVSGQGDSLHEHIANLAGSPAIKKGILQTVKVVDELVKVMGRHKPENIVIEMARENQTTQKGQKNSRERMKRIEEGIKELGSQILKEHPVENTQLQNEKLYLYYLQNGRDMYVDQELDINRLSDYDVDHIVPQSFLKDDSIDNKVLTRSDKARGKSDNVPSEEVVKKMKNYWRQLLNAKLITQRKFDNLTKAERGGLSELDKAGFIKRQLVETRQITKHVAQILDSRMNTKYDENDKLIREVKVITLKSKLVSDFRKDFQFYKVREINNYHHAHDAYLNAVVGTALIKKYPKLESEFVYGDYKVYDVRKMIAKSEQEIGKATAKYFFYSNIMNFFKTEITLANGEIRKRPLIETNGETGEIVWDKGRDFATVRKVLSMPQVNIVKKTEVQTGGFSKESILPKRNSDKLIARKKDWDPKKYGGFDSPTVAYSVLVVAKVEKGKSKKLKSVKELLGITIMERSSFEKNPIDFLEAKGYKEVKKDLIIKLPKYSLFELENGRKRMLASAGELQKGNELALPSKYVNFLYLASHYEKLKGSPEDNEQKQLFVEQHKHYLDEIIEQISEFSKRVILADANLDKVLSAYNKHRDKPIREQAENIIHLFTLTNLGAPAAFKYFDTTIDRKRYTSTKEVLDATLIHQSITGLYETRIDLSQLGGDGGPAPAPAPAPAPAPGGMDPLQLLQPLEAEIKGTKLKAHWNSGATITCVPQAFLEEEVPIKNIWIKTIHGEKEQPVYYLTFKIQGRKVEAEVISSPYDYILVSPSDIPWLMKKPLQLTTLVPLQEYEERLLKQTMLTGSYKEKLQSLFLKYDALWQHWENQVGHRRIKPHHIATGTVNPRPQKQYPINPKAKASIQTVINDLLKQGVLIQQNSIMNTPVYPVPKPDGKWRMVLDYREVNKTIPLIAAQNQHSAGILSSIFRGKYKTTLDLSNGFWAHSITPESYWLTAFTWLGQQYCWTRLPQGFLNSPALFTADVVDLLKEVPNVQVYVDDIYISHDDPREHLEQLEKVFSLLLNAGYVVSLKKSEIAQHEVEFLGFNITKEGRGLTETFKQKLLNITPPRDLKQLQSILGLLNFARNFIPNFSELVKPLYNIIATANGKYITWTTDNSQQLQNIISMLNSAENLEERNPEVRLIMKVNTSPSAGYIRFYNEFAKRPIMYLNYVYTKAEVKFTNTEKLLTTIHKGLIKALDLGMGQEILVYSPIVSMTKIQKTPLPERKALPIRWITWMSYLEDPRIQFHYDKTLPELQQVPTVTDDIIAKIKHPSEFSMVFYTDGSAIKHPNVNKSHNAGMGIAQVQFKPEFTVINTWSIPLGDHTAQLAEVAAVEFACKKALKIDGPVLIVTDSFYVAESVNKELPYWQSNGFFNNKKKPLKHVSKWKSIADCIQLKPDIIIIHEKGHQPTASTFHTEGNNLADKLATQGSYVVNAGKRTADGSEFEKRTADGSEFESPKKKAKVE

SEQ ID NO: 501 - protein, 2176 aa, synthetic construct
MPAAKRVKLDGGDKKYSIGLDIGTNSVGWAVITDEYKVPSKKFKVLGNTDRHSIKKNLIGALLFDSGETAEATRLKRTARRRYTRRKNRICYLQEIFSNEMAKVDDSFFHRLEESFLVEEDKKHERHPIFGNIVDEVAYHEKYPTIYHLRKKLVDSTDKADLRLIYLALAHMIKFRGHFLIEGDLNPDNSDVDKLFIQLVQTYNQLFEENPINASGVDAKAILSARLSKSRRLENLIAQLPGEKKNGLFGNLIALSLGLTPNFKSNFDLAEDAKLQLSKDTYDDDLDNLLAQIGDQYADLFLAAKNLSDAILLSDILRVNTEITKAPLSASMIKRYDEHHQDLTLLKALVRQQLPEKYKEIFFDQSKNGYAGYIDGGASQEEFYKFIKPILEKMDGTEELLVKLNREDLLRKQRTFDNGSIPHQIHLGELHAILRRQEDFYPFLKDNREKIEKILTFRIPYYVGPLARGNSRFAWMTRKSEETITPWNFEEVVDKGASAQSFIERMTNFDKNLPNEKVLPKHSLLYEYFTVYNELTKVKYVTEGMRKPAFLSGEQKKAIVDLLFKTNRKVTVKQLKEDYFKKIECFDSVEISGVEDRFNASLGTYHDLLKIIKDKDFLDNEENEDILEDIVLTLTLFEDREMIEERLKTYAHLFDDKVMKQLKRRRYTGWGRLSRKLINGIRDKQSGKTILDFLKSDGFANRNFMQLIHDDSLTFKEDIQKAQVSGQGDSLHEHIANLAGSPAIKKGILQTVKVVDELVKVMGRHKPENIVIEMARENQTTQKGQKNSRERMKRIEEGIKELGSQILKEHPVENTQLQNEKLYLYYLQNGRDMYVDQELDINRLSDYDVDHIVPQSFLKDDSIDNKVLTRSDKARGKSDNVPSEEVVKKMKNYWRQLLNAKLITQRKFDNLTKAERGGLSELDKAGFIKRQLVETRQITKHVAQILDSRMNTKYDENDKLIREVKVITLKSKLVSDFRKDFQFYKVREINNYHHAHDAYLNAVVGTALIKKYPKLESEFVYGDYKVYDVRKMIAKSEQEIGKATAKYFFYSNIMNFFKTEITLANGEIRKRPLIETNGETGEIVWDKGRDFATVRKVLSMPQVNIVKKTEVQTGGFSKESILPKRNSDKLIARKKDWDPKKYGGFDSPTVAYSVLVVAKVEKGKSKKLKSVKELLGITIMERSSFEKNPIDFLEAKGYKEVKKDLIIKLPKYSLFELENGRKRMLASAGELQKGNELALPSKYVNFLYLASHYEKLKGSPEDNEQKQLFVEQHKHYLDEIIEQISEFSKRVILADANLDKVLSAYNKHRDKPIREQAENIIHLFTLTNLGAPAAFKYFDTTIDRKRYTSTKEVLDATLIHQSITGLYETRIDLSQLGGDGGGGGEAAAKGGSGGMDPLQLLQPLEAEIKGTKLKAHWNSGATITCVPQAFLEEEVPIKNIWIKTIHGEKEQPVYYLTFKIQGRKVEAEVISSPYDYILVSPSDIPWLMKKPLQLTTLVPLQEYEERLLKQTMLTGSYKEKLQSLFLKYDALWQHWENQVGHRRIKPHHIATGTVNPRPQKQYPINPKAKASIQTVINDLLKQGVLIQQNSIMNTPVYPVPKPDGKWRMVLDYREVNKTIPLIAAQNQHSAGILSSIFRGKYKTTLDLSNGFWAHSITPESYWLTAFTWLGQQYCWTRLPQGFLNSPALFTADVVDLLKEVPNVQVYVDDIYISHDDPREHLEQLEKVFSLLLNAGYVVSLKKSEIAQHEVEFLGFNITKEGRGLTETFKQKLLNITPPRDLKQLQSILGLLNFARNFIPNFSELVKPLYNIIATANGKYITWTTDNSQQLQNIISMLNSAENLEERNPEVRLIMKVNTSPSAGYIRFYNEFAKRPIMYLNYVYTKAEVKFTNTEKLLTTIHKGLIKALDLGMGQEILVYSPIVSMTKIQKTPLPERKALPIRWITWMSYLEDPRIQFHYDKTLPELQQVPTVTDDIIAKIKHPSEFSMVFYTDGSAIKHPNVNKSHNAGMGIAQVQFKPEFTVINTWSIPLGDHTAQLAEVAAVEFACKKALKIDGPVLIVTDSFYVAESVNKELPYWQSNGFFNNKKKPLKHVSKWKSIADCIQLKPDIIIIHEKGHQPTASTFHTEGNNLADKLATQGSYVVNAGKRTADGSEFEKRTADGSEFESPKKKAKVE

SEQ ID NO: 502 - protein, 2176 aa, synthetic construct
MPAAKRVKLDGGDKKYSIGLDIGTNSVGWAVITDEYKVPSKKFKVLGNTDRHSIKKNLIGALLFDSGETAEATRLKRTARRRYTRRKNRICYLQEIFSNEMAKVDDSFFHRLEESFLVEEDKKHERHPIFGNIVDEVAYHEKYPTIYHLRKKLVDSTDKADLRLIYLALAHMIKFRGHFLIEGDLNPDNSDVDKLFIQLVQTYNQLFEENPINASGVDAKAILSARLSKSRRLENLIAQLPGEKKNGLFGNLIALSLGLTPNFKSNFDLAEDAKLQLSKDTYDDDLDNLLAQIGDQYADLFLAAKNLSDAILLSDILRVNTEITKAPLSASMIKRYDEHHQDLTLLKALVRQQLPEKYKEIFFDQSKNGYAGYIDGGASQEEFYKFIKPILEKMDGTEELLVKLNREDLLRKQRTFDNGSIPHQIHLGELHAILRRQEDFYPFLKDNREKIEKILTFRIPYYVGPLARGNSRFAWMTRKSEETITPWNFEEVVDKGASAQSFIERMTNFDKNLPNEKVLPKHSLLYEYFTVYNELTKVKYVTEGMRKPAFLSGEQKKAIVDLLFKTNRKVTVKQLKEDYFKKIECFDSVEISGVEDRFNASLGTYHDLLKIIKDKDFLDNEENEDILEDIVLTLTLFEDREMIEERLKTYAHLFDDKVMKQLKRRRYTGWGRLSRKLINGIRDKQSGKTILDFLKSDGFANRNFMQLIHDDSLTFKEDIQKAQVSGQGDSLHEHIANLAGSPAIKKGILQTVKVVDELVKVMGRHKPENIVIEMARENQTTQKGQKNSRERMKRIEEGIKELGSQILKEHPVENTQLQNEKLYLYYLQNGRDMYVDQELDINRLSDYDVDHIVPQSFLKDDSIDNKVLTRSDKARGKSDNVPSEEVVKKMKNYWRQLLNAKLITQRKFDNLTKAERGGLSELDKAGFIKRQLVETRQITKHVAQILDSRMNTKYDENDKLIREVKVITLKSKLVSDFRKDFQFYKVREINNYHHAHDAYLNAVVGTALIKKYPKLESEFVYGDYKVYDVRKMIAKSEQEIGKATAKYFFYSNIMNFFKTEITLANGEIRKRPLIETNGETGEIVWDKGRDFATVRKVLSMPQVNIVKKTEVQTGGFSKESILPKRNSDKLIARKKDWDPKKYGGFDSPTVAYSVLVVAKVEKGKSKKLKSVKELLGITIMERSSFEKNPIDFLEAKGYKEVKKDLIIKLPKYSLFELENGRKRMLASAGELQKGNELALPSKYVNFLYLASHYEKLKGSPEDNEQKQLFVEQHKHYLDEIIEQISEFSKRVILADANLDKVLSAYNKHRDKPIREQAENIIHLFTLTNLGAPAAFKYFDTTIDRKRYTSTKEVLDATLIHQSITGLYETRIDLSQLGGDGGGGSPAPEAAAKGGMDPLQLLQPLEAEIKGTKLKAHWNSGATITCVPQAFLEEEVPIKNIWIKTIHGEKEQPVYYLTFKIQGRKVEAEVISSPYDYILVSPSDIPWLMKKPLQLTTLVPLQEYEERLLKQTMLTGSYKEKLQSLFLKYDALWQHWENQVGHRRIKPHHIATGTVNPRPQKQYPINPKAKASIQTVINDLLKQGVLIQQNSIMNTPVYPVPKPDGKWRMVLDYREVNKTIPLIAAQNQHSAGILSSIFRGKYKTTLDLSNGFWAHSITPESYWLTAFTWLGQQYCWTRLPQGFLNSPALFTADVVDLLKEVPNVQVYVDDIYISHDDPREHLEQLEKVFSLLLNAGYVVSLKKSEIAQHEVEFLGFNITKEGRGLTETFKQKLLNITPPRDLKQLQSILGLLNFARNFIPNFSELVKPLYNIIATANGKYITWTTDNSQQLQNIISMLNSAENLEERNPEVRLIMKVNTSPSAGYIRFYNEFAKRPIMYLNYVYTKAEVKFTNTEKLLTTIHKGLIKALDLGMGQEILVYSPIVSMTKIQKTPLPERKALPIRWITWMSYLEDPRIQFHYDKTLPELQQVPTVTDDIIAKIKHPSEFSMVFYTDGSAIKHPNVNKSHNAGMGIAQVQFKPEFTVINTWSIPLGDHTAQLAEVAAVEFACKKALKIDGPVLIVTDSFYVAESVNKELPYWQSNGFFNNKKKPLKHVSKWKSIADCIQLKPDIIIIHEKGHQPTASTFHTEGNNLADKLATQGSYVVNAGKRTADGSEFEKRTADGSEFESPKKKAKVE

SEQ ID NO: 503 - protein, 2174 aa, synthetic construct
MPAAKRVKLDGGDKKYSIGLDIGTNSVGWAVITDEYKVPSKKFKVLGNTDRHSIKKNLIGALLFDSGETAEATRLKRTARRRYTRRKNRICYLQEIFSNEMAKVDDSFFHRLEESFLVEEDKKHERHPIFGNIVDEVAYHEKYPTIYHLRKKLVDSTDKADLRLIYLALAHMIKFRGHFLIEGDLNPDNSDVDKLFIQLVQTYNQLFEENPINASGVDAKAILSARLSKSRRLENLIAQLPGEKKNGLFGNLIALSLGLTPNFKSNFDLAEDAKLQLSKDTYDDDLDNLLAQIGDQYADLFLAAKNLSDAILLSDILRVNTEITKAPLSASMIKRYDEHHQDLTLLKALVRQQLPEKYKEIFFDQSKNGYAGYIDGGASQEEFYKFIKPILEKMDGTEELLVKLNREDLLRKQRTFDNGSIPHQIHLGELHAILRRQEDFYPFLKDNREKIEKILTFRIPYYVGPLARGNSRFAWMTRKSEETITPWNFEEVVDKGASAQSFIERMTNFDKNLPNEKVLPKHSLLYEYFTVYNELTKVKYVTEGMRKPAFLSGEQKKAIVDLLFKTNRKVTVKQLKEDYFKKIECFDSVEISGVEDRFNASLGTYHDLLKIIKDKDFLDNEENEDILEDIVLTLTLFEDREMIEERLKTYAHLFDDKVMKQLKRRRYTGWGRLSRKLINGIRDKQSGKTILDFLKSDGFANRNFMQLIHDDSLTFKEDIQKAQVSGQGDSLHEHIANLAGSPAIKKGILQTVKVVDELVKVMGRHKPENIVIEMARENQTTQKGQKNSRERMKRIEEGIKELGSQILKEHPVENTQLQNEKLYLYYLQNGRDMYVDQELDINRLSDYDVDHIVPQSFLKDDSIDNKVLTRSDKARGKSDNVPSEEVVKKMKNYWRQLLNAKLITQRKFDNLTKAERGGLSELDKAGFIKRQLVETRQITKHVAQILDSRMNTKYDENDKLIREVKVITLKSKLVSDFRKDFQFYKVREINNYHHAHDAYLNAVVGTALIKKYPKLESEFVYGDYKVYDVRKMIAKSEQEIGKATAKYFFYSNIMNFFKTEITLANGEIRKRPLIETNGETGEIVWDKGRDFATVRKVLSMPQVNIVKKTEVQTGGFSKESILPKRNSDKLIARKKDWDPKKYGGFDSPTVAYSVLVVAKVEKGKSKKLKSVKELLGITIMERSSFEKNPIDFLEAKGYKEVKKDLIIKLPKYSLFELENGRKRMLASAGELQKGNELALPSKYVNFLYLASHYEKLKGSPEDNEQKQLFVEQHKHYLDEIIEQISEFSKRVILADANLDKVLSAYNKHRDKPIREQAENIIHLFTLTNLGAPAAFKYFDTTIDRKRYTSTKEVLDATLIHQSITGLYETRIDLSQLGGDGGPAPAPAPAPGGMDPLQLLQPLEAEIKGTKLKAHWNSGATITCVPQAFLEEEVPIKNIWIKTIHGEKEQPVYYLTFKIQGRKVEAEVISSPYDYILVSPSDIPWLMKKPLQLTTLVPLQEYEERLLKQTMLTGSYKEKLQSLFLKYDALWQHWENQVGHRRIKPHHIATGTVNPRPQKQYPINPKAKASIQTVINDLLKQGVLIQQNSIMNTPVYPVPKPDGKWRMVLDYREVNKTIPLIAAQNQHSAGILSSIFRGKYKTTLDLSNGFWAHSITPESYWLTAFTWLGQQYCWTRLPQGFLNSPALFTADVVDLLKEVPNVQVYVDDIYISHDDPREHLEQLEKVFSLLLNAGYVVSLKKSEIAQHEVEFLGFNITKEGRGLTETFKQKLLNITPPRDLKQLQSILGLLNFARNFIPNFSELVKPLYNIIATANGKYITWTTDNSQQLQNIISMLNSAENLEERNPEVRLIMKVNTSPSAGYIRFYNEFAKRPIMYLNYVYTKAEVKFTNTEKLLTTIHKGLIKALDLGMGQEILVYSPIVSMTKIQKTPLPERKALPIRWITWMSYLEDPRIQFHYDKTLPELQQVPTVTDDIIAKIKHPSEFSMVFYTDGSAIKHPNVNKSHNAGMGIAQVQFKPEFTVINTWSIPLGDHTAQLAEVAAVEFACKKALKIDGPVLIVTDSFYVAESVNKELPYWQSNGFFNNKKKPLKHVSKWKSIADCIQLKPDIIIIHEKGHQPTASTFHTEGNNLADKLATQGSYVVNAGKRTADGSEFEKRTADGSEFESPKKKAKVE

SEQ ID NO: 504 - protein, 2176 aa, synthetic construct
MPAAKRVKLDGGDKKYSIGLDIGTNSVGWAVITDEYKVPSKKFKVLGNTDRHSIKKNLIGALLFDSGETAEATRLKRTARRRYTRRKNRICYLQEIFSNEMAKVDDSFFHRLEESFLVEEDKKHERHPIFGNIVDEVAYHEKYPTIYHLRKKLVDSTDKADLRLIYLALAHMIKFRGHFLIEGDLNPDNSDVDKLFIQLVQTYNQLFEENPINASGVDAKAILSARLSKSRRLENLIAQLPGEKKNGLFGNLIALSLGLTPNFKSNFDLAEDAKLQLSKDTYDDDLDNLLAQIGDQYADLFLAAKNLSDAILLSDILRVNTEITKAPLSASMIKRYDEHHQDLTLLKALVRQQLPEKYKEIFFDQSKNGYAGYIDGGASQEEFYKFIKPILEKMDGTEELLVKLNREDLLRKQRTFDNGSIPHQIHLGELHAILRRQEDFYPFLKDNREKIEKILTFRIPYYVGPLARGNSRFAWMTRKSEETITPWNFEEVVDKGASAQSFIERMTNFDKNLPNEKVLPKHSLLYEYFTVYNELTKVKYVTEGMRKPAFLSGEQKKAIVDLLFKTNRKVTVKQLKEDYFKKIECFDSVEISGVEDRFNASLGTYHDLLKIIKDKDFLDNEENEDILEDIVLTLTLFEDREMIEERLKTYAHLFDDKVMKQLKRRRYTGWGRLSRKLINGIRDKQSGKTILDFLKSDGFANRNFMQLIHDDSLTFKEDIQKAQVSGQGDSLHEHIANLAGSPAIKKGILQTVKVVDELVKVMGRHKPENIVIEMARENQTTQKGQKNSRERMKRIEEGIKELGSQILKEHPVENTQLQNEKLYLYYLQNGRDMYVDQELDINRLSDYDVDHIVPQSFLKDDSIDNKVLTRSDKARGKSDNVPSEEVVKKMKNYWRQLLNAKLITQRKFDNLTKAERGGLSELDKAGFIKRQLVETRQITKHVAQILDSRMNTKYDENDKLIREVKVITLKSKLVSDFRKDFQFYKVREINNYHHAHDAYLNAVVGTALIKKYPKLESEFVYGDYKVYDVRKMIAKSEQEIGKATAKYFFYSNIMNFFKTEITLANGEIRKRPLIETNGETGEIVWDKGRDFATVRKVLSMPQVNIVKKTEVQTGGFSKESILPKRNSDKLIARKKDWDPKKYGGFDSPTVAYSVLVVAKVEKGKSKKLKSVKELLGITIMERSSFEKNPIDFLEAKGYKEVKKDLIIKLPKYSLFELENGRKRMLASAGELQKGNELALPSKYVNFLYLASHYEKLKGSPEDNEQKQLFVEQHKHYLDEIIEQISEFSKRVILADANLDKVLSAYNKHRDKPIREQAENIIHLFTLTNLGAPAAFKYFDTTIDRKRYTSTKEVLDATLIHQSITGLYETRIDLSQLGGDGGGGGEAAAKGSSGGMDPLQLLQPLEAEIKGTKLKAHWNSGATITCVPQAFLEEEVPIKNIWIKTIHGEKEQPVYYLTFKIQGRKVEAEVISSPYDYILVSPSDIPWLMKKPLQLTTLVPLQEYEERLLKQTMLTGSYKEKLQSLFLKYDALWQHWENQVGHRRIKPHHIATGTVNPRPQKQYPINPKAKASIQTVINDLLKQGVLIQQNSIMNTPVYPVPKPDGKWRMVLDYREVNKTIPLIAAQNQHSAGILSSIFRGKYKTTLDLSNGFWAHSITPESYWLTAFTWLGQQYCWTRLPQGFLNSPALFTADVVDLLKEVPNVQVYVDDIYISHDDPREHLEQLEKVFSLLLNAGYVVSLKKSEIAQHEVEFLGFNITKEGRGLTETFKQKLLNITPPRDLKQLQSILGLLNFARNFIPNFSELVKPLYNIIATANGKYITWTTDNSQQLQNIISMLNSAENLEERNPEVRLIMKVNTSPSAGYIRFYNEFAKRPIMYLNYVYTKAEVKFTNTEKLLTTIHKGLIKALDLGMGQEILVYSPIVSMTKIQKTPLPERKALPIRWITWMSYLEDPRIQFHYDKTLPELQQVPTVTDDIIAKIKHPSEFSMVFYTDGSAIKHPNVNKSHNAGMGIAQVQFKPEFTVINTWSIPLGDHTAQLAEVAAVEFACKKALKIDGPVLIVTDSFYVAESVNKELPYWQSNGFFNNKKKPLKHVSKWKSIADCIQLKPDIIIIHEKGHQPTASTFHTEGNNLADKLATQGSYVVNAGKRTADGSEFEKRTADGSEFESPKKKAKVE

SEQ ID NO: 505 - protein, 2176 aa, synthetic construct
MPAAKRVKLDGGDKKYSIGLDIGTNSVGWAVITDEYKVPSKKFKVLGNTDRHSIKKNLIGALLFDSGETAEATRLKRTARRRYTRRKNRICYLQEIFSNEMAKVDDSFFHRLEESFLVEEDKKHERHPIFGNIVDEVAYHEKYPTIYHLRKKLVDSTDKADLRLIYLALAHMIKFRGHFLIEGDLNPDNSDVDKLFIQLVQTYNQLFEENPINASGVDAKAILSARLSKSRRLENLIAQLPGEKKNGLFGNLIALSLGLTPNFKSNFDLAEDAKLQLSKDTYDDDLDNLLAQIGDQYADLFLAAKNLSDAILLSDILRVNTEITKAPLSASMIKRYDEHHQDLTLLKALVRQQLPEKYKEIFFDQSKNGYAGYIDGGASQEEFYKFIKPILEKMDGTEELLVKLNREDLLRKQRTFDNGSIPHQIHLGELHAILRRQEDFYPFLKDNREKIEKILTFRIPYYVGPLARGNSRFAWMTRKSEETITPWNFEEVVDKGASAQSFIERMTNFDKNLPNEKVLPKHSLLYEYFTVYNELTKVKYVTEGMRKPAFLSGEQKKAIVDLLFKTNRKVTVKQLKEDYFKKIECFDSVEISGVEDRFNASLGTYHDLLKIIKDKDFLDNEENEDILEDIVLTLTLFEDREMIEERLKTYAHLFDDKVMKQLKRRRYTGWGRLSRKLINGIRDKQSGKTILDFLKSDGFANRNFMQLIHDDSLTFKEDIQKAQVSGQGDSLHEHIANLAGSPAIKKGILQTVKVVDELVKVMGRHKPENIVIEMARENQTTQKGQKNSRERMKRIEEGIKELGSQILKEHPVENTQLQNEKLYLYYLQNGRDMYVDQELDINRLSDYDVDHIVPQSFLKDDSIDNKVLTRSDKARGKSDNVPSEEVVKKMKNYWRQLLNAKLITQRKFDNLTKAERGGLSELDKAGFIKRQLVETRQITKHVAQILDSRMNTKYDENDKLIREVKVITLKSKLVSDFRKDFQFYKVREINNYHHAHDAYLNAVVGTALIKKYPKLESEFVYGDYKVYDVRKMIAKSEQEIGKATAKYFFYSNIMNFFKTEITLANGEIRKRPLIETNGETGEIVWDKGRDFATVRKVLSMPQVNIVKKTEVQTGGFSKESILPKRNSDKLIARKKDWDPKKYGGFDSPTVAYSVLVVAKVEKGKSKKLKSVKELLGITIMERSSFEKNPIDFLEAKGYKEVKKDLIIKLPKYSLFELENGRKRMLASAGELQKGNELALPSKYVNFLYLASHYEKLKGSPEDNEQKQLFVEQHKHYLDEIIEQISEFSKRVILADANLDKVLSAYNKHRDKPIREQAENIIHLFTLTNLGAPAAFKYFDTTIDRKRYTSTKEVLDATLIHQSITGLYETRIDLSQLGGDGGEAAAKGGSGSSGGMDPLQLLQPLEAEIKGTKLKAHWNSGATITCVPQAFLEEEVPIKNIWIKTIHGEKEQPVYYLTFKIQGRKVEAEVISSPYDYILVSPSDIPWLMKKPLQLTTLVPLQEYEERLLKQTMLTGSYKEKLQSLFLKYDALWQHWENQVGHRRIKPHHIATGTVNPRPQKQYPINPKAKASIQTVINDLLKQGVLIQQNSIMNTPVYPVPKPDGKWRMVLDYREVNKTIPLIAAQNQHSAGILSSIFRGKYKTTLDLSNGFWAHSITPESYWLTAFTWLGQQYCWTRLPQGFLNSPALFTADVVDLLKEVPNVQVYVDDIYISHDDPREHLEQLEKVFSLLLNAGYVVSLKKSEIAQHEVEFLGFNITKEGRGLTETFKQKLLNITPPRDLKQLQSILGLLNFARNFIPNFSELVKPLYNIIATANGKYITWTTDNSQQLQNIISMLNSAENLEERNPEVRLIMKVNTSPSAGYIRFYNEFAKRPIMYLNYVYTKAEVKFTNTEKLLTTIHKGLIKALDLGMGQEILVYSPIVSMTKIQKTPLPERKALPIRWITWMSYLEDPRIQFHYDKTLPELQQVPTVTDDIIAKIKHPSEFSMVFYTDGSAIKHPNVNKSHNAGMGIAQVQFKPEFTVINTWSIPLGDHTAQLAEVAAVEFACKKALKIDGPVLIVTDSFYVAESVNKELPYWQSNGFFNNKKKPLKHVSKWKSIADCIQLKPDIIIIHEKGHQPTASTFHTEGNNLADKLATQGSYVVNAGKRTADGSEFEKRTADGSEFESPKKKAKVE

SEQ ID NO: 506 - protein, 2176 aa, synthetic construct
MPAAKRVKLDGGDKKYSIGLDIGTNSVGWAVITDEYKVPSKKFKVLGNTDRHSIKKNLIGALLFDSGETAEATRLKRTARRRYTRRKNRICYLQEIFSNEMAKVDDSFFHRLEESFLVEEDKKHERHPIFGNIVDEVAYHEKYPTIYHLRKKLVDSTDKADLRLIYLALAHMIKFRGHFLIEGDLNPDNSDVDKLFIQLVQTYNQLFEENPINASGVDAKAILSARLSKSRRLENLIAQLPGEKKNGLFGNLIALSLGLTPNFKSNFDLAEDAKLQLSKDTYDDDLDNLLAQIGDQYADLFLAAKNLSDAILLSDILRVNTEITKAPLSASMIKRYDEHHQDLTLLKALVRQQLPEKYKEIFFDQSKNGYAGYIDGGASQEEFYKFIKPILEKMDGTEELLVKLNREDLLRKQRTFDNGSIPHQIHLGELHAILRRQEDFYPFLKDNREKIEKILTFRIPYYVGPLARGNSRFAWMTRKSEETITPWNFEEVVDKGASAQSFIERMTNFDKNLPNEKVLPKHSLLYEYFTVYNELTKVKYVTEGMRKPAFLSGEQKKAIVDLLFKTNRKVTVKQLKEDYFKKIECFDSVEISGVEDRFNASLGTYHDLLKIIKDKDFLDNEENEDILEDIVLTLTLFEDREMIEERLKTYAHLFDDKVMKQLKRRRYTGWGRLSRKLINGIRDKQSGKTILDFLKSDGFANRNFMQLIHDDSLTFKEDIQKAQVSGQGDSLHEHIANLAGSPAIKKGILQTVKVVDELVKVMGRHKPENIVIEMARENQTTQKGQKNSRERMKRIEEGIKELGSQILKEHPVENTQLQNEKLYLYYLQNGRDMYVDQELDINRLSDYDVDHIVPQSFLKDDSIDNKVLTRSDKARGKSDNVPSEEVVKKMKNYWRQLLNAKLITQRKFDNLTKAERGGLSELDKAGFIKRQLVETRQITKHVAQILDSRMNTKYDENDKLIREVKVITLKSKLVSDFRKDFQFYKVREINNYHHAHDAYLNAVVGTALIKKYPKLESEFVYGDYKVYDVRKMIAKSEQEIGKATAKYFFYSNIMNFFKTEITLANGEIRKRPLIETNGETGEIVWDKGRDFATVRKVLSMPQVNIVKKTEVQTGGFSKESILPKRNSDKLIARKKDWDPKKYGGFDSPTVAYSVLVVAKVEKGKSKKLKSVKELLGITIMERSSFEKNPIDFLEAKGYKEVKKDLIIKLPKYSLFELENGRKRMLASAGELQKGNELALPSKYVNFLYLASHYEKLKGSPEDNEQKQLFVEQHKHYLDEIIEQISEFSKRVILADANLDKVLSAYNKHRDKPIREQAENIIHLFTLTNLGAPAAFKYFDTTIDRKRYTSTKEVLDATLIHQSITGLYETRIDLSQLGGDGGGSSEAAAKPAPGGMDPLQLLQPLEAEIKGTKLKAHWNSGATITCVPQAFLEEEVPIKNIWIKTIHGEKEQPVYYLTFKIQGRKVEAEVISSPYDYILVSPSDIPWLMKKPLQLTTLVPLQEYEERLLKQTMLTGSYKEKLQSLFLKYDALWQHWENQVGHRRIKPHHIATGTVNPRPQKQYPINPKAKASIQTVINDLLKQGVLIQQNSIMNTPVYPVPKPDGKWRMVLDYREVNKTIPLIAAQNQHSAGILSSIFRGKYKTTLDLSNGFWAHSITPESYWLTAFTWLGQQYCWTRLPQGFLNSPALFTADVVDLLKEVPNVQVYVDDIYISHDDPREHLEQLEKVFSLLLNAGYVVSLKKSEIAQHEVEFLGFNITKEGRGLTETFKQKLLNITPPRDLKQLQSILGLLNFARNFIPNFSELVKPLYNIIATANGKYITWTTDNSQQLQNIISMLNSAENLEERNPEVRLIMKVNTSPSAGYIRFYNEFAKRPIMYLNYVYTKAEVKFTNTEKLLTTIHKGLIKALDLGMGQEILVYSPIVSMTKIQKTPLPERKALPIRWITWMSYLEDPRIQFHYDKTLPELQQVPTVTDDIIAKIKHPSEFSMVFYTDGSAIKHPNVNKSHNAGMGIAQVQFKPEFTVINTWSIPLGDHTAQLAEVAAVEFACKKALKIDGPVLIVTDSFYVAESVNKELPYWQSNGFFNNKKKPLKHVSKWKSIADCIQLKPDIIIIHEKGHQPTASTFHTEGNNLADKLATQGSYVVNAGKRTADGSEFEKRTADGSEFESPKKKAKVE

SEQ ID NO: 507 - protein, 2176 aa, synthetic construct
MPAAKRVKLDGGDKKYSIGLDIGTNSVGWAVITDEYKVPSKKFKVLGNTDRHSIKKNLIGALLFDSGETAEATRLKRTARRRYTRRKNRICYLQEIFSNEMAKVDDSFFHRLEESFLVEEDKKHERHPIFGNIVDEVAYHEKYPTIYHLRKKLVDSTDKADLRLIYLALAHMIKFRGHFLIEGDLNPDNSDVDKLFIQLVQTYNQLFEENPINASGVDAKAILSARLSKSRRLENLIAQLPGEKKNGLFGNLIALSLGLTPNFKSNFDLAEDAKLQLSKDTYDDDLDNLLAQIGDQYADLFLAAKNLSDAILLSDILRVNTEITKAPLSASMIKRYDEHHQDLTLLKALVRQQLPEKYKEIFFDQSKNGYAGYIDGGASQEEFYKFIKPILEKMDGTEELLVKLNREDLLRKQRTFDNGSIPHQIHLGELHAILRRQEDFYPFLKDNREKIEKILTFRIPYYVGPLARGNSRFAWMTRKSEETITPWNFEEVVDKGASAQSFIERMTNFDKNLPNEKVLPKHSLLYEYFTVYNELTKVKYVTEGMRKPAFLSGEQKKAIVDLLFKTNRKVTVKQLKEDYFKKIECFDSVEISGVEDRFNASLGTYHDLLKIIKDKDFLDNEENEDILEDIVLTLTLFEDREMIEERLKTYAHLFDDKVMKQLKRRRYTGWGRLSRKLINGIRDKQSGKTILDFLKSDGFANRNFMQLIHDDSLTFKEDIQKAQVSGQGDSLHEHIANLAGSPAIKKGILQTVKVVDELVKVMGRHKPENIVIEMARENQTTQKGQKNSRERMKRIEEGIKELGSQILKEHPVENTQLQNEKLYLYYLQNGRDMYVDQELDINRLSDYDVDHIVPQSFLKDDSIDNKVLTRSDKARGKSDNVPSEEVVKKMKNYWRQLLNAKLITQRKFDNLTKAERGGLSELDKAGFIKRQLVETRQITKHVAQILDSRMNTKYDENDKLIREVKVITLKSKLVSDFRKDFQFYKVREINNYHHAHDAYLNAVVGTALIKKYPKLESEFVYGDYKVYDVRKMIAKSEQEIGKATAKYFFYSNIMNFFKTEITLANGEIRKRPLIETNGETGEIVWDKGRDFATVRKVLSMPQVNIVKKTEVQTGGFSKESILPKRNSDKLIARKKDWDPKKYGGFDSPTVAYSVLVVAKVEKGKSKKLKSVKELLGITIMERSSFEKNPIDFLEAKGYKEVKKDLIIKLPKYSLFELENGRKRMLASAGELQKGNELALPSKYVNFLYLASHYEKLKGSPEDNEQKQLFVEQHKHYLDEIIEQISEFSKRVILADANLDKVLSAYNKHRDKPIREQAENIIHLFTLTNLGAPAAFKYFDTTIDRKRYTSTKEVLDATLIHQSITGLYETRIDLSQLGGDGGGGGPAPEAAAKGGMDPLQLLQPLEAEIKGTKLKAHWNSGATITCVPQAFLEEEVPIKNIWIKTIHGEKEQPVYYLTFKIQGRKVEAEVISSPYDYILVSPSDIPWLMKKPLQLTTLVPLQEYEERLLKQTMLTGSYKEKLQSLFLKYDALWQHWENQVGHRRIKPHHIATGTVNPRPQKQYPINPKAKASIQTVINDLLKQGVLIQQNSIMNTPVYPVPKPDGKWRMVLDYREVNKTIPLIAAQNQHSAGILSSIFRGKYKTTLDLSNGFWAHSITPESYWLTAFTWLGQQYCWTRLPQGFLNSPALFTADVVDLLKEVPNVQVYVDDIYISHDDPREHLEQLEKVFSLLLNAGYVVSLKKSEIAQHEVEFLGFNITKEGRGLTETFKQKLLNITPPRDLKQLQSILGLLNFARNFIPNFSELVKPLYNIIATANGKYITWTTDNSQQLQNIISMLNSAENLEERNPEVRLIMKVNTSPSAGYIRFYNEFAKRPIMYLNYVYTKAEVKFTNTEKLLTTIHKGLIKALDLGMGQEILVYSPIVSMTKIQKTPLPERKALPIRWITWMSYLEDPRIQFHYDKTLPELQQVPTVTDDIIAKIKHPSEFSMVFYTDGSAIKHPNVNKSHNAGMGIAQVQFKPEFTVINTWSIPLGDHTAQLAEVAAVEFACKKALKIDGPVLIVTDSFYVAESVNKELPYWQSNGFFNNKKKPLKHVSKWKSIADCIQLKPDIIIIHEKGHQPTASTFHTEGNNLADKLATQGSYVVNAGKRTADGSEFEKRTADGSEFESPKKKAKVE

SEQ ID NO: 508 - protein, 2174 aa, synthetic construct
MPAAKRVKLDGGDKKYSIGLDIGTNSVGWAVITDEYKVPSKKFKVLGNTDRHSIKKNLIGALLFDSGETAEATRLKRTARRRYTRRKNRICYLQEIFSNEMAKVDDSFFHRLEESFLVEEDKKHERHPIFGNIVDEVAYHEKYPTIYHLRKKLVDSTDKADLRLIYLALAHMIKFRGHFLIEGDLNPDNSDVDKLFIQLVQTYNQLFEENPINASGVDAKAILSARLSKSRRLENLIAQLPGEKKNGLFGNLIALSLGLTPNFKSNFDLAEDAKLQLSKDTYDDDLDNLLAQIGDQYADLFLAAKNLSDAILLSDILRVNTEITKAPLSASMIKRYDEHHQDLTLLKALVRQQLPEKYKEIFFDQSKNGYAGYIDGGASQEEFYKFIKPILEKMDGTEELLVKLNREDLLRKQRTFDNGSIPHQIHLGELHAILRRQEDFYPFLKDNREKIEKILTFRIPYYVGPLARGNSRFAWMTRKSEETITPWNFEEVVDKGASAQSFIERMTNFDKNLPNEKVLPKHSLLYEYFTVYNELTKVKYVTEGMRKPAFLSGEQKKAIVDLLFKTNRKVTVKQLKEDYFKKIECFDSVEISGVEDRFNASLGTYHDLLKIIKDKDFLDNEENEDILEDIVLTLTLFEDREMIEERLKTYAHLFDDKVMKQLKRRRYTGWGRLSRKLINGIRDKQSGKTILDFLKSDGFANRNFMQLIHDDSLTFKEDIQKAQVSGQGDSLHEHIANLAGSPAIKKGILQTVKVVDELVKVMGRHKPENIVIEMARENQTTQKGQKNSRERMKRIEEGIKELGSQILKEHPVENTQLQNEKLYLYYLQNGRDMYVDQELDINRLSDYDVDHIVPQSFLKDDSIDNKVLTRSDKARGKSDNVPSEEVVKKMKNYWRQLLNAKLITQRKFDNLTKAERGGLSELDKAGFIKRQLVETRQITKHVAQILDSRMNTKYDENDKLIREVKVITLKSKLVSDFRKDFQFYKVREINNYHHAHDAYLNAVVGTALIKKYPKLESEFVYGDYKVYDVRKMIAKSEQEIGKATAKYFFYSNIMNFFKTEITLANGEIRKRPLIETNGETGEIVWDKGRDFATVRKVLSMPQVNIVKKTEVQTGGFSKESILPKRNSDKLIARKKDWDPKKYGGFDSPTVAYSVLVVAKVEKGKSKKLKSVKELLGITIMERSSFEKNPIDFLEAKGYKEVKKDLIIKLPKYSLFELENGRKRMLASAGELQKGNELALPSKYVNFLYLASHYEKLKGSPEDNEQKQLFVEQHKHYLDEIIEQISEFSKRVILADANLDKVLSAYNKHRDKPIREQAENIIHLFTLTNLGAPAAFKYFDTTIDRKRYTSTKEVLDATLIHQSITGLYETRIDLSQLGGDGGGSSGGGGGSGGMDPLQLLQPLEAEIKGTKLKAHWNSGATITCVPQAFLEEEVPIKNIWIKTIHGEKEQPVYYLTFKIQGRKVEAEVISSPYDYILVSPSDIPWLMKKPLQLTTLVPLQEYEERLLKQTMLTGSYKEKLQSLFLKYDALWQHWENQVGHRRIKPHHIATGTVNPRPQKQYPINPKAKASIQTVINDLLKQGVLIQQNSIMNTPVYPVPKPDGKWRMVLDYREVNKTIPLIAAQNQHSAGILSSIFRGKYKTTLDLSNGFWAHSITPESYWLTAFTWLGQQYCWTRLPQGFLNSPALFTADVVDLLKEVPNVQVYVDDIYISHDDPREHLEQLEKVFSLLLNAGYVVSLKKSEIAQHEVEFLGFNITKEGRGLTETFKQKLLNITPPRDLKQLQSILGLLNFARNFIPNFSELVKPLYNIIATANGKYITWTTDNSQQLQNIISMLNSAENLEERNPEVRLIMKVNTSPSAGYIRFYNEFAKRPIMYLNYVYTKAEVKFTNTEKLLTTIHKGLIKALDLGMGQEILVYSPIVSMTKIQKTPLPERKALPIRWITWMSYLEDPRIQFHYDKTLPELQQVPTVTDDIIAKIKHPSEFSMVFYTDGSAIKHPNVNKSHNAGMGIAQVQFKPEFTVINTWSIPLGDHTAQLAEVAAVEFACKKALKIDGPVLIVTDSFYVAESVNKELPYWQSNGFFNNKKKPLKHVSKWKSIADCIQLKPDIIIIHEKGHQPTASTFHTEGNNLADKLATQGSYVVNAGKRTADGSEFEKRTADGSEFESPKKKAKVE

SEQ ID NO: 509 - protein, 2183 aa, synthetic construct
MPAAKRVKLDGGDKKYSIGLDIGTNSVGWAVITDEYKVPSKKFKVLGNTDRHSIKKNLIGALLFDSGETAEATRLKRTARRRYTRRKNRICYLQEIFSNEMAKVDDSFFHRLEESFLVEEDKKHERHPIFGNIVDEVAYHEKYPTIYHLRKKLVDSTDKADLRLIYLALAHMIKFRGHFLIEGDLNPDNSDVDKLFIQLVQTYNQLFEENPINASGVDAKAILSARLSKSRRLENLIAQLPGEKKNGLFGNLIALSLGLTPNFKSNFDLAEDAKLQLSKDTYDDDLDNLLAQIGDQYADLFLAAKNLSDAILLSDILRVNTEITKAPLSASMIKRYDEHHQDLTLLKALVRQQLPEKYKEIFFDQSKNGYAGYIDGGASQEEFYKFIKPILEKMDGTEELLVKLNREDLLRKQRTFDNGSIPHQIHLGELHAILRRQEDFYPFLKDNREKIEKILTFRIPYYVGPLARGNSRFAWMTRKSEETITPWNFEEVVDKGASAQSFIERMTNFDKNLPNEKVLPKHSLLYEYFTVYNELTKVKYVTEGMRKPAFLSGEQKKAIVDLLFKTNRKVTVKQLKEDYFKKIECFDSVEISGVEDRFNASLGTYHDLLKIIKDKDFLDNEENEDILEDIVLTLTLFEDREMIEERLKTYAHLFDDKVMKQLKRRRYTGWGRLSRKLINGIRDKQSGKTILDFLKSDGFANRNFMQLIHDDSLTFKEDIQKAQVSGQGDSLHEHIANLAGSPAIKKGILQTVKVVDELVKVMGRHKPENIVIEMARENQTTQKGQKNSRERMKRIEEGIKELGSQILKEHPVENTQLQNEKLYLYYLQNGRDMYVDQELDINRLSDYDVDHIVPQSFLKDDSIDNKVLTRSDKARGKSDNVPSEEVVKKMKNYWRQLLNAKLITQRKFDNLTKAERGGLSELDKAGFIKRQLVETRQITKHVAQILDSRMNTKYDENDKLIREVKVITLKSKLVSDFRKDFQFYKVREINNYHHAHDAYLNAVVGTALIKKYPKLESEFVYGDYKVYDVRKMIAKSEQEIGKATAKYFFYSNIMNFFKTEITLANGEIRKRPLIETNGETGEIVWDKGRDFATVRKVLSMPQVNIVKKTEVQTGGFSKESILPKRNSDKLIARKKDWDPKKYGGFDSPTVAYSVLVVAKVEKGKSKKLKSVKELLGITIMERSSFEKNPIDFLEAKGYKEVKKDLIIKLPKYSLFELENGRKRMLASAGELQKGNELALPSKYVNFLYLASHYEKLKGSPEDNEQKQLFVEQHKHYLDEIIEQISEFSKRVILADANLDKVLSAYNKHRDKPIREQAENIIHLFTLTNLGAPAAFKYFDTTIDRKRYTSTKEVLDATLIHQSITGLYETRIDLSQLGGDGGGSSGSSGSSGSSGSSGSSGGMDPLQLLQPLEAEIKGTKLKAHWNSGATITCVPQAFLEEEVPIKNIWIKTIHGEKEQPVYYLTFKIQGRKVEAEVISSPYDYILVSPSDIPWLMKKPLQLTTLVPLQEYEERLLKQTMLTGSYKEKLQSLFLKYDALWQHWENQVGHRRIKPHHIATGTVNPRPQKQYPINPKAKASIQTVINDLLKQGVLIQQNSIMNTPVYPVPKPDGKWRMVLDYREVNKTIPLIAAQNQHSAGILSSIFRGKYKTTLDLSNGFWAHSITPESYWLTAFTWLGQQYCWTRLPQGFLNSPALFTADVVDLLKEVPNVQVYVDDIYISHDDPREHLEQLEKVFSLLLNAGYVVSLKKSEIAQHEVEFLGFNITKEGRGLTETFKQKLLNITPPRDLKQLQSILGLLNFARNFIPNFSELVKPLYNIIATANGKYITWTTDNSQQLQNIISMLNSAENLEERNPEVRLIMKVNTSPSAGYIRFYNEFAKRPIMYLNYVYTKAEVKFTNTEKLLTTIHKGLIKALDLGMGQEILVYSPIVSMTKIQKTPLPERKALPIRWITWMSYLEDPRIQFHYDKTLPELQQVPTVTDDIIAKIKHPSEFSMVFYTDGSAIKHPNVNKSHNAGMGIAQVQFKPEFTVINTWSIPLGDHTAQLAEVAAVEFACKKALKIDGPVLIVTDSFYVAESVNKELPYWQSNGFFNNKKKPLKHVSKWKSIADCIQLKPDIIIIHEKGHQPTASTFHTEGNNLADKLATQGSYVVNAGKRTADGSEFEKRTADGSEFESPKKKAKVE

SEQ ID NO: 510 - protein, 2176 aa, synthetic construct
MPAAKRVKLDGGDKKYSIGLDIGTNSVGWAVITDEYKVPSKKFKVLGNTDRHSIKKNLIGALLFDSGETAEATRLKRTARRRYTRRKNRICYLQEIFSNEMAKVDDSFFHRLEESFLVEEDKKHERHPIFGNIVDEVAYHEKYPTIYHLRKKLVDSTDKADLRLIYLALAHMIKFRGHFLIEGDLNPDNSDVDKLFIQLVQTYNQLFEENPINASGVDAKAILSARLSKSRRLENLIAQLPGEKKNGLFGNLIALSLGLTPNFKSNFDLAEDAKLQLSKDTYDDDLDNLLAQIGDQYADLFLAAKNLSDAILLSDILRVNTEITKAPLSASMIKRYDEHHQDLTLLKALVRQQLPEKYKEIFFDQSKNGYAGYIDGGASQEEFYKFIKPILEKMDGTEELLVKLNREDLLRKQRTFDNGSIPHQIHLGELHAILRRQEDFYPFLKDNREKIEKILTFRIPYYVGPLARGNSRFAWMTRKSEETITPWNFEEVVDKGASAQSFIERMTNFDKNLPNEKVLPKHSLLYEYFTVYNELTKVKYVTEGMRKPAFLSGEQKKAIVDLLFKTNRKVTVKQLKEDYFKKIECFDSVEISGVEDRFNASLGTYHDLLKIIKDKDFLDNEENEDILEDIVLTLTLFEDREMIEERLKTYAHLFDDKVMKQLKRRRYTGWGRLSRKLINGIRDKQSGKTILDFLKSDGFANRNFMQLIHDDSLTFKEDIQKAQVSGQGDSLHEHIANLAGSPAIKKGILQTVKVVDELVKVMGRHKPENIVIEMARENQTTQKGQKNSRERMKRIEEGIKELGSQILKEHPVENTQLQNEKLYLYYLQNGRDMYVDQELDINRLSDYDVDHIVPQSFLKDDSIDNKVLTRSDKARGKSDNVPSEEVVKKMKNYWRQLLNAKLITQRKFDNLTKAERGGLSELDKAGFIKRQLVETRQITKHVAQILDSRMNTKYDENDKLIREVKVITLKSKLVSDFRKDFQFYKVREINNYHHAHDAYLNAVVGTALIKKYPKLESEFVYGDYKVYDVRKMIAKSEQEIGKATAKYFFYSNIMNFFKTEITLANGEIRKRPLIETNGETGEIVWDKGRDFATVRKVLSMPQVNIVKKTEVQTGGFSKESILPKRNSDKLIARKKDWDPKKYGGFDSPTVAYSVLVVAKVEKGKSKKLKSVKELLGITIMERSSFEKNPIDFLEAKGYKEVKKDLIIKLPKYSLFELENGRKRMLASAGELQKGNELALPSKYVNFLYLASHYEKLKGSPEDNEQKQLFVEQHKHYLDEIIEQISEFSKRVILADANLDKVLSAYNKHRDKPIREQAENIIHLFTLTNLGAPAAFKYFDTTIDRKRYTSTKEVLDATLIHQSITGLYETRIDLSQLGGDGGPAPEAAAKGGGGGMDPLQLLQPLEAEIKGTKLKAHWNSGATITCVPQAFLEEEVPIKNIWIKTIHGEKEQPVYYLTFKIQGRKVEAEVISSPYDYILVSPSDIPWLMKKPLQLTTLVPLQEYEERLLKQTMLTGSYKEKLQSLFLKYDALWQHWENQVGHRRIKPHHIATGTVNPRPQKQYPINPKAKASIQTVINDLLKQGVLIQQNSIMNTPVYPVPKPDGKWRMVLDYREVNKTIPLIAAQNQHSAGILSSIFRGKYKTTLDLSNGFWAHSITPESYWLTAFTWLGQQYCWTRLPQGFLNSPALFTADVVDLLKEVPNVQVYVDDIYISHDDPREHLEQLEKVFSLLLNAGYVVSLKKSEIAQHEVEFLGFNITKEGRGLTETFKQKLLNITPPRDLKQLQSILGLLNFARNFIPNFSELVKPLYNIIATANGKYITWTTDNSQQLQNIISMLNSAENLEERNPEVRLIMKVNTSPSAGYIRFYNEFAKRPIMYLNYVYTKAEVKFTNTEKLLTTIHKGLIKALDLGMGQEILVYSPIVSMTKIQKTPLPERKALPIRWITWMSYLEDPRIQFHYDKTLPELQQVPTVTDDIIAKIKHPSEFSMVFYTDGSAIKHPNVNKSHNAGMGIAQVQFKPEFTVINTWSIPLGDHTAQLAEVAAVEFACKKALKIDGPVLIVTDSFYVAESVNKELPYWQSNGFFNNKKKPLKHVSKWKSIADCIQLKPDIIIIHEKGHQPTASTFHTEGNNLADKLATQGSYVVNAGKRTADGSEFEKRTADGSEFESPKKKAKVE

SEQ ID NO: 511 - protein, 2176 aa, synthetic construct
MPAAKRVKLDGGDKKYSIGLDIGTNSVGWAVITDEYKVPSKKFKVLGNTDRHSIKKNLIGALLFDSGETAEATRLKRTARRRYTRRKNRICYLQEIFSNEMAKVDDSFFHRLEESFLVEEDKKHERHPIFGNIVDEVAYHEKYPTIYHLRKKLVDSTDKADLRLIYLALAHMIKFRGHFLIEGDLNPDNSDVDKLFIQLVQTYNQLFEENPINASGVDAKAILSARLSKSRRLENLIAQLPGEKKNGLFGNLIALSLGLTPNFKSNFDLAEDAKLQLSKDTYDDDLDNLLAQIGDQYADLFLAAKNLSDAILLSDILRVNTEITKAPLSASMIKRYDEHHQDLTLLKALVRQQLPEKYKEIFFDQSKNGYAGYIDGGASQEEFYKFIKPILEKMDGTEELLVKLNREDLLRKQRTFDNGSIPHQIHLGELHAILRRQEDFYPFLKDNREKIEKILTFRIPYYVGPLARGNSRFAWMTRKSEETITPWNFEEVVDKGASAQSFIERMTNFDKNLPNEKVLPKHSLLYEYFTVYNELTKVKYVTEGMRKPAFLSGEQKKAIVDLLFKTNRKVTVKQLKEDYFKKIECFDSVEISGVEDRFNASLGTYHDLLKIIKDKDFLDNEENEDILEDIVLTLTLFEDREMIEERLKTYAHLFDDKVMKQLKRRRYTGWGRLSRKLINGIRDKQSGKTILDFLKSDGFANRNFMQLIHDDSLTFKEDIQKAQVSGQGDSLHEHIANLAGSPAIKKGILQTVKVVDELVKVMGRHKPENIVIEMARENQTTQKGQKNSRERMKRIEEGIKELGSQILKEHPVENTQLQNEKLYLYYLQNGRDMYVDQELDINRLSDYDVDHIVPQSFLKDDSIDNKVLTRSDKARGKSDNVPSEEVVKKMKNYWRQLLNAKLITQRKFDNLTKAERGGLSELDKAGFIKRQLVETRQITKHVAQILDSRMNTKYDENDKLIREVKVITLKSKLVSDFRKDFQFYKVREINNYHHAHDAYLNAVVGTALIKKYPKLESEFVYGDYKVYDVRKMIAKSEQEIGKATAKYFFYSNIMNFFKTEITLANGEIRKRPLIETNGETGEIVWDKGRDFATVRKVLSMPQVNIVKKTEVQTGGFSKESILPKRNSDKLIARKKDWDPKKYGGFDSPTVAYSVLVVAKVEKGKSKKLKSVKELLGITIMERSSFEKNPIDFLEAKGYKEVKKDLIIKLPKYSLFELENGRKRMLASAGELQKGNELALPSKYVNFLYLASHYEKLKGSPEDNEQKQLFVEQHKHYLDEIIEQISEFSKRVILADANLDKVLSAYNKHRDKPIREQAENIIHLFTLTNLGAPAAFKYFDTTIDRKRYTSTKEVLDATLIHQSITGLYETRIDLSQLGGDGGEAAAKGGGGSSGGMDPLQLLQPLEAEIKGTKLKAHWNSGATITCVPQAFLEEEVPIKNIWIKTIHGEKEQPVYYLTFKIQGRKVEAEVISSPYDYILVSPSDIPWLMKKPLQLTTLVPLQEYEERLLKQTMLTGSYKEKLQSLFLKYDALWQHWENQVGHRRIKPHHIATGTVNPRPQKQYPINPKAKASIQTVINDLLKQGVLIQQNSIMNTPVYPVPKPDGKWRMVLDYREVNKTIPLIAAQNQHSAGILSSIFRGKYKTTLDLSNGFWAHSITPESYWLTAFTWLGQQYCWTRLPQGFLNSPALFTADVVDLLKEVPNVQVYVDDIYISHDDPREHLEQLEKVFSLLLNAGYVVSLKKSEIAQHEVEFLGFNITKEGRGLTETFKQKLLNITPPRDLKQLQSILGLLNFARNFIPNFSELVKPLYNIIATANGKYITWTTDNSQQLQNIISMLNSAENLEERNPEVRLIMKVNTSPSAGYIRFYNEFAKRPIMYLNYVYTKAEVKFTNTEKLLTTIHKGLIKALDLGMGQEILVYSPIVSMTKIQKTPLPERKALPIRWITWMSYLEDPRIQFHYDKTLPELQQVPTVTDDIIAKIKHPSEFSMVFYTDGSAIKHPNVNKSHNAGMGIAQVQFKPEFTVINTWSIPLGDHTAQLAEVAAVEFACKKALKIDGPVLIVTDSFYVAESVNKELPYWQSNGFFNNKKKPLKHVSKWKSIADCIQLKPDIIIIHEKGHQPTASTFHTEGNNLADKLATQGSYVVNAGKRTADGSEFEKRTADGSEFESPKKKAKVE

SEQ ID NO: 512 - protein, 2171 aa, synthetic construct
MPAAKRVKLDGGDKKYSIGLDIGTNSVGWAVITDEYKVPSKKFKVLGNTDRHSIKKNLIGALLFDSGETAEATRLKRTARRRYTRRKNRICYLQEIFSNEMAKVDDSFFHRLEESFLVEEDKKHERHPIFGNIVDEVAYHEKYPTIYHLRKKLVDSTDKADLRLIYLALAHMIKFRGHFLIEGDLNPDNSDVDKLFIQLVQTYNQLFEENPINASGVDAKAILSARLSKSRRLENLIAQLPGEKKNGLFGNLIALSLGLTPNFKSNFDLAEDAKLQLSKDTYDDDLDNLLAQIGDQYADLFLAAKNLSDAILLSDILRVNTEITKAPLSASMIKRYDEHHQDLTLLKALVRQQLPEKYKEIFFDQSKNGYAGYIDGGASQEEFYKFIKPILEKMDGTEELLVKLNREDLLRKQRTFDNGSIPHQIHLGELHAILRRQEDFYPFLKDNREKIEKILTFRIPYYVGPLARGNSRFAWMTRKSEETITPWNFEEVVDKGASAQSFIERMTNFDKNLPNEKVLPKHSLLYEYFTVYNELTKVKYVTEGMRKPAFLSGEQKKAIVDLLFKTNRKVTVKQLKEDYFKKIECFDSVEISGVEDRFNASLGTYHDLLKIIKDKDFLDNEENEDILEDIVLTLTLFEDREMIEERLKTYAHLFDDKVMKQLKRRRYTGWGRLSRKLINGIRDKQSGKTILDFLKSDGFANRNFMQLIHDDSLTFKEDIQKAQVSGQGDSLHEHIANLAGSPAIKKGILQTVKVVDELVKVMGRHKPENIVIEMARENQTTQKGQKNSRERMKRIEEGIKELGSQILKEHPVENTQLQNEKLYLYYLQNGRDMYVDQELDINRLSDYDVDHIVPQSFLKDDSIDNKVLTRSDKARGKSDNVPSEEVVKKMKNYWRQLLNAKLITQRKFDNLTKAERGGLSELDKAGFIKRQLVETRQITKHVAQILDSRMNTKYDENDKLIREVKVITLKSKLVSDFRKDFQFYKVREINNYHHAHDAYLNAVVGTALIKKYPKLESEFVYGDYKVYDVRKMIAKSEQEIGKATAKYFFYSNIMNFFKTEITLANGEIRKRPLIETNGETGEIVWDKGRDFATVRKVLSMPQVNIVKKTEVQTGGFSKESILPKRNSDKLIARKKDWDPKKYGGFDSPTVAYSVLVVAKVEKGKSKKLKSVKELLGITIMERSSFEKNPIDFLEAKGYKEVKKDLIIKLPKYSLFELENGRKRMLASAGELQKGNELALPSKYVNFLYLASHYEKLKGSPEDNEQKQLFVEQHKHYLDEIIEQISEFSKRVILADANLDKVLSAYNKHRDKPIREQAENIIHLFTLTNLGAPAAFKYFDTTIDRKRYTSTKEVLDATLIHQSITGLYETRIDLSQLGGDGGGGGPAPGGMDPLQLLQPLEAEIKGTKLKAHWNSGATITCVPQAFLEEEVPIKNIWIKTIHGEKEQPVYYLTFKIQGRKVEAEVISSPYDYILVSPSDIPWLMKKPLQLTTLVPLQEYEERLLKQTMLTGSYKEKLQSLFLKYDALWQHWENQVGHRRIKPHHIATGTVNPRPQKQYPINPKAKASIQTVINDLLKQGVLIQQNSIMNTPVYPVPKPDGKWRMVLDYREVNKTIPLIAAQNQHSAGILSSIFRGKYKTTLDLSNGFWAHSITPESYWLTAFTWLGQQYCWTRLPQGFLNSPALFTADVVDLLKEVPNVQVYVDDIYISHDDPREHLEQLEKVFSLLLNAGYVVSLKKSEIAQHEVEFLGFNITKEGRGLTETFKQKLLNITPPRDLKQLQSILGLLNFARNFIPNFSELVKPLYNIIATANGKYITWTTDNSQQLQNIISMLNSAENLEERNPEVRLIMKVNTSPSAGYIRFYNEFAKRPIMYLNYVYTKAEVKFTNTEKLLTTIHKGLIKALDLGMGQEILVYSPIVSMTKIQKTPLPERKALPIRWITWMSYLEDPRIQFHYDKTLPELQQVPTVTDDIIAKIKHPSEFSMVFYTDGSAIKHPNVNKSHNAGMGIAQVQFKPEFTVINTWSIPLGDHTAQLAEVAAVEFACKKALKIDGPVLIVTDSFYVAESVNKELPYWQSNGFFNNKKKPLKHVSKWKSIADCIQLKPDIIIIHEKGHQPTASTFHTEGNNLADKLATQGSYVVNAGKRTADGSEFEKRTADGSEFESPKKKAKVE

SEQ ID NO: 513 - protein, 2176 aa, synthetic construct
MPAAKRVKLDGGDKKYSIGLDIGTNSVGWAVITDEYKVPSKKFKVLGNTDRHSIKKNLIGALLFDSGETAEATRLKRTARRRYTRRKNRICYLQEIFSNEMAKVDDSFFHRLEESFLVEEDKKHERHPIFGNIVDEVAYHEKYPTIYHLRKKLVDSTDKADLRLIYLALAHMIKFRGHFLIEGDLNPDNSDVDKLFIQLVQTYNQLFEENPINASGVDAKAILSARLSKSRRLENLIAQLPGEKKNGLFGNLIALSLGLTPNFKSNFDLAEDAKLQLSKDTYDDDLDNLLAQIGDQYADLFLAAKNLSDAILLSDILRVNTEITKAPLSASMIKRYDEHHQDLTLLKALVRQQLPEKYKEIFFDQSKNGYAGYIDGGASQEEFYKFIKPILEKMDGTEELLVKLNREDLLRKQRTFDNGSIPHQIHLGELHAILRRQEDFYPFLKDNREKIEKILTFRIPYYVGPLARGNSRFAWMTRKSEETITPWNFEEVVDKGASAQSFIERMTNFDKNLPNEKVLPKHSLLYEYFTVYNELTKVKYVTEGMRKPAFLSGEQKKAIVDLLFKTNRKVTVKQLKEDYFKKIECFDSVEISGVEDRFNASLGTYHDLLKIIKDKDFLDNEENEDILEDIVLTLTLFEDREMIEERLKTYAHLFDDKVMKQLKRRRYTGWGRLSRKLINGIRDKQSGKTILDFLKSDGFANRNFMQLIHDDSLTFKEDIQKAQVSGQGDSLHEHIANLAGSPAIKKGILQTVKVVDELVKVMGRHKPENIVIEMARENQTTQKGQKNSRERMKRIEEGIKELGSQILKEHPVENTQLQNEKLYLYYLQNGRDMYVDQELDINRLSDYDVDHIVPQSFLKDDSIDNKVLTRSDKARGKSDNVPSEEVVKKMKNYWRQLLNAKLITQRKFDNLTKAERGGLSELDKAGFIKRQLVETRQITKHVAQILDSRMNTKYDENDKLIREVKVITLKSKLVSDFRKDFQFYKVREINNYHHAHDAYLNAVVGTALIKKYPKLESEFVYGDYKVYDVRKMIAKSEQEIGKATAKYFFYSNIMNFFKTEITLANGEIRKRPLIETNGETGEIVWDKGRDFATVRKVLSMPQVNIVKKTEVQTGGFSKESILPKRNSDKLIARKKDWDPKKYGGFDSPTVAYSVLVVAKVEKGKSKKLKSVKELLGITIMERSSFEKNPIDFLEAKGYKEVKKDLIIKLPKYSLFELENGRKRMLASAGELQKGNELALPSKYVNFLYLASHYEKLKGSPEDNEQKQLFVEQHKHYLDEIIEQISEFSKRVILADANLDKVLSAYNKHRDKPIREQAENIIHLFTLTNLGAPAAFKYFDTTIDRKRYTSTKEVLDATLIHQSITGLYETRIDLSQLGGDGGEAAAKGGSGGGGGMDPLQLLQPLEAEIKGTKLKAHWNSGATITCVPQAFLEEEVPIKNIWIKTIHGEKEQPVYYLTFKIQGRKVEAEVISSPYDYILVSPSDIPWLMKKPLQLTTLVPLQEYEERLLKQTMLTGSYKEKLQSLFLKYDALWQHWENQVGHRRIKPHHIATGTVNPRPQKQYPINPKAKASIQTVINDLLKQGVLIQQNSIMNTPVYPVPKPDGKWRMVLDYREVNKTIPLIAAQNQHSAGILSSIFRGKYKTTLDLSNGFWAHSITPESYWLTAFTWLGQQYCWTRLPQGFLNSPALFTADVVDLLKEVPNVQVYVDDIYISHDDPREHLEQLEKVFSLLLNAGYVVSLKKSEIAQHEVEFLGFNITKEGRGLTETFKQKLLNITPPRDLKQLQSILGLLNFARNFIPNFSELVKPLYNIIATANGKYITWTTDNSQQLQNIISMLNSAENLEERNPEVRLIMKVNTSPSAGYIRFYNEFAKRPIMYLNYVYTKAEVKFTNTEKLLTTIHKGLIKALDLGMGQEILVYSPIVSMTKIQKTPLPERKALPIRWITWMSYLEDPRIQFHYDKTLPELQQVPTVTDDIIAKIKHPSEFSMVFYTDGSAIKHPNVNKSHNAGMGIAQVQFKPEFTVINTWSIPLGDHTAQLAEVAAVEFACKKALKIDGPVLIVTDSFYVAESVNKELPYWQSNGFFNNKKKPLKHVSKWKSIADCIQLKPDIIIIHEKGHQPTASTFHTEGNNLADKLATQGSYVVNAGKRTADGSEFEKRTADGSEFESPKKKAKVE

SEQ ID NO: 514 - protein, 2174 aa, synthetic construct
MPAAKRVKLDGGDKKYSIGLDIGTNSVGWAVITDEYKVPSKKFKVLGNTDRHSIKKNLIGALLFDSGETAEATRLKRTARRRYTRRKNRICYLQEIFSNEMAKVDDSFFHRLEESFLVEEDKKHERHPIFGNIVDEVAYHEKYPTIYHLRKKLVDSTDKADLRLIYLALAHMIKFRGHFLIEGDLNPDNSDVDKLFIQLVQTYNQLFEENPINASGVDAKAILSARLSKSRRLENLIAQLPGEKKNGLFGNLIALSLGLTPNFKSNFDLAEDAKLQLSKDTYDDDLDNLLAQIGDQYADLFLAAKNLSDAILLSDILRVNTEITKAPLSASMIKRYDEHHQDLTLLKALVRQQLPEKYKEIFFDQSKNGYAGYIDGGASQEEFYKFIKPILEKMDGTEELLVKLNREDLLRKQRTFDNGSIPHQIHLGELHAILRRQEDFYPFLKDNREKIEKILTFRIPYYVGPLARGNSRFAWMTRKSEETITPWNFEEVVDKGASAQSFIERMTNFDKNLPNEKVLPKHSLLYEYFTVYNELTKVKYVTEGMRKPAFLSGEQKKAIVDLLFKTNRKVTVKQLKEDYFKKIECFDSVEISGVEDRFNASLGTYHDLLKIIKDKDFLDNEENEDILEDIVLTLTLFEDREMIEERLKTYAHLFDDKVMKQLKRRRYTGWGRLSRKLINGIRDKQSGKTILDFLKSDGFANRNFMQLIHDDSLTFKEDIQKAQVSGQGDSLHEHIANLAGSPAIKKGILQTVKVVDELVKVMGRHKPENIVIEMARENQTTQKGQKNSRERMKRIEEGIKELGSQILKEHPVENTQLQNEKLYLYYLQNGRDMYVDQELDINRLSDYDVDHIVPQSFLKDDSIDNKVLTRSDKARGKSDNVPSEEVVKKMKNYWRQLLNAKLITQRKFDNLTKAERGGLSELDKAGFIKRQLVETRQITKHVAQILDSRMNTKYDENDKLIREVKVITLKSKLVSDFRKDFQFYKVREINNYHHAHDAYLNAVVGTALIKKYPKLESEFVYGDYKVYDVRKMIAKSEQEIGKATAKYFFYSNIMNFFKTEITLANGEIRKRPLIETNGETGEIVWDKGRDFATVRKVLSMPQVNIVKKTEVQTGGFSKESILPKRNSDKLIARKKDWDPKKYGGFDSPTVAYSVLVVAKVEKGKSKKLKSVKELLGITIMERSSFEKNPIDFLEAKGYKEVKKDLIIKLPKYSLFELENGRKRMLASAGELQKGNELALPSKYVNFLYLASHYEKLKGSPEDNEQKQLFVEQHKHYLDEIIEQISEFSKRVILADANLDKVLSAYNKHRDKPIREQAENIIHLFTLTNLGAPAAFKYFDTTIDRKRYTSTKEVLDATLIHQSITGLYETRIDLSQLGGDGGGGGPAPGGSGGMDPLQLLQPLEAEIKGTKLKAHWNSGATITCVPQAFLEEEVPIKNIWIKTIHGEKEQPVYYLTFKIQGRKVEAEVISSPYDYILVSPSDIPWLMKKPLQLTTLVPLQEYEERLLKQTMLTGSYKEKLQSLFLKYDALWQHWENQVGHRRIKPHHIATGTVNPRPQKQYPINPKAKASIQTVINDLLKQGVLIQQNSIMNTPVYPVPKPDGKWRMVLDYREVNKTIPLIAAQNQHSAGILSSIFRGKYKTTLDLSNGFWAHSITPESYWLTAFTWLGQQYCWTRLPQGFLNSPALFTADVVDLLKEVPNVQVYVDDIYISHDDPREHLEQLEKVFSLLLNAGYVVSLKKSEIAQHEVEFLGFNITKEGRGLTETFKQKLLNITPPRDLKQLQSILGLLNFARNFIPNFSELVKPLYNIIATANGKYITWTTDNSQQLQNIISMLNSAENLEERNPEVRLIMKVNTSPSAGYIRFYNEFAKRPIMYLNYVYTKAEVKFTNTEKLLTTIHKGLIKALDLGMGQEILVYSPIVSMTKIQKTPLPERKALPIRWITWMSYLEDPRIQFHYDKTLPELQQVPTVTDDIIAKIKHPSEFSMVFYTDGSAIKHPNVNKSHNAGMGIAQVQFKPEFTVINTWSIPLGDHTAQLAEVAAVEFACKKALKIDGPVLIVTDSFYVAESVNKELPYWQSNGFFNNKKKPLKHVSKWKSIADCIQLKPDIIIIHEKGHQPTASTFHTEGNNLADKLATQGSYVVNAGKRTADGSEFEKRTADGSEFESPKKKAKVE

SEQ ID NO: 515 - protein, 2174 aa, synthetic construct
MPAAKRVKLDGGDKKYSIGLDIGTNSVGWAVITDEYKVPSKKFKVLGNTDRHSIKKNLIGALLFDSGETAEATRLKRTARRRYTRRKNRICYLQEIFSNEMAKVDDSFFHRLEESFLVEEDKKHERHPIFGNIVDEVAYHEKYPTIYHLRKKLVDSTDKADLRLIYLALAHMIKFRGHFLIEGDLNPDNSDVDKLFIQLVQTYNQLFEENPINASGVDAKAILSARLSKSRRLENLIAQLPGEKKNGLFGNLIALSLGLTPNFKSNFDLAEDAKLQLSKDTYDDDLDNLLAQIGDQYADLFLAAKNLSDAILLSDILRVNTEITKAPLSASMIKRYDEHHQDLTLLKALVRQQLPEKYKEIFFDQSKNGYAGYIDGGASQEEFYKFIKPILEKMDGTEELLVKLNREDLLRKQRTFDNGSIPHQIHLGELHAILRRQEDFYPFLKDNREKIEKILTFRIPYYVGPLARGNSRFAWMTRKSEETITPWNFEEVVDKGASAQSFIERMTNFDKNLPNEKVLPKHSLLYEYFTVYNELTKVKYVTEGMRKPAFLSGEQKKAIVDLLFKTNRKVTVKQLKEDYFKKIECFDSVEISGVEDRFNASLGTYHDLLKIIKDKDFLDNEENEDILEDIVLTLTLFEDREMIEERLKTYAHLFDDKVMKQLKRRRYTGWGRLSRKLINGIRDKQSGKTILDFLKSDGFANRNFMQLIHDDSLTFKEDIQKAQVSGQGDSLHEHIANLAGSPAIKKGILQTVKVVDELVKVMGRHKPENIVIEMARENQTTQKGQKNSRERMKRIEEGIKELGSQILKEHPVENTQLQNEKLYLYYLQNGRDMYVDQELDINRLSDYDVDHIVPQSFLKDDSIDNKVLTRSDKARGKSDNVPSEEVVKKMKNYWRQLLNAKLITQRKFDNLTKAERGGLSELDKAGFIKRQLVETRQITKHVAQILDSRMNTKYDENDKLIREVKVITLKSKLVSDFRKDFQFYKVREINNYHHAHDAYLNAVVGTALIKKYPKLESEFVYGDYKVYDVRKMIAKSEQEIGKATAKYFFYSNIMNFFKTEITLANGEIRKRPLIETNGETGEIVWDKGRDFATVRKVLSMPQVNIVKKTEVQTGGFSKESILPKRNSDKLIARKKDWDPKKYGGFDSPTVAYSVLVVAKVEKGKSKKLKSVKELLGITIMERSSFEKNPIDFLEAKGYKEVKKDLIIKLPKYSLFELENGRKRMLASAGELQKGNELALPSKYVNFLYLASHYEKLKGSPEDNEQKQLFVEQHKHYLDEIIEQISEFSKRVILADANLDKVLSAYNKHRDKPIREQAENIIHLFTLTNLGAPAAFKYFDTTIDRKRYTSTKEVLDATLIHQSITGLYETRIDLSQLGGDGGGSSGSSGSSGGMDPLQLLQPLEAEIKGTKLKAHWNSGATITCVPQAFLEEEVPIKNIWIKTIHGEKEQPVYYLTFKIQGRKVEAEVISSPYDYILVSPSDIPWLMKKPLQLTTLVPLQEYEERLLKQTMLTGSYKEKLQSLFLKYDALWQHWENQVGHRRIKPHHIATGTVNPRPQKQYPINPKAKASIQTVINDLLKQGVLIQQNSIMNTPVYPVPKPDGKWRMVLDYREVNKTIPLIAAQNQHSAGILSSIFRGKYKTTLDLSNGFWAHSITPESYWLTAFTWLGQQYCWTRLPQGFLNSPALFTADVVDLLKEVPNVQVYVDDIYISHDDPREHLEQLEKVFSLLLNAGYVVSLKKSEIAQHEVEFLGFNITKEGRGLTETFKQKLLNITPPRDLKQLQSILGLLNFARNFIPNFSELVKPLYNIIATANGKYITWTTDNSQQLQNIISMLNSAENLEERNPEVRLIMKVNTSPSAGYIRFYNEFAKRPIMYLNYVYTKAEVKFTNTEKLLTTIHKGLIKALDLGMGQEILVYSPIVSMTKIQKTPLPERKALPIRWITWMSYLEDPRIQFHYDKTLPELQQVPTVTDDIIAKIKHPSEFSMVFYTDGSAIKHPNVNKSHNAGMGIAQVQFKPEFTVINTWSIPLGDHTAQLAEVAAVEFACKKALKIDGPVLIVTDSFYVAESVNKELPYWQSNGFFNNKKKPLKHVSKWKSIADCIQLKPDIIIIHEKGHQPTASTFHTEGNNLADKLATQGSYVVNAGKRTADGSEFEKRTADGSEFESPKKKAKVE

SEQ ID NO: 516 - protein, 2171 aa, synthetic construct
MPAAKRVKLDGGDKKYSIGLDIGTNSVGWAVITDEYKVPSKKFKVLGNTDRHSIKKNLIGALLFDSGETAEATRLKRTARRRYTRRKNRICYLQEIFSNEMAKVDDSFFHRLEESFLVEEDKKHERHPIFGNIVDEVAYHEKYPTIYHLRKKLVDSTDKADLRLIYLALAHMIKFRGHFLIEGDLNPDNSDVDKLFIQLVQTYNQLFEENPINASGVDAKAILSARLSKSRRLENLIAQLPGEKKNGLFGNLIALSLGLTPNFKSNFDLAEDAKLQLSKDTYDDDLDNLLAQIGDQYADLFLAAKNLSDAILLSDILRVNTEITKAPLSASMIKRYDEHHQDLTLLKALVRQQLPEKYKEIFFDQSKNGYAGYIDGGASQEEFYKFIKPILEKMDGTEELLVKLNREDLLRKQRTFDNGSIPHQIHLGELHAILRRQEDFYPFLKDNREKIEKILTFRIPYYVGPLARGNSRFAWMTRKSEETITPWNFEEVVDKGASAQSFIERMTNFDKNLPNEKVLPKHSLLYEYFTVYNELTKVKYVTEGMRKPAFLSGEQKKAIVDLLFKTNRKVTVKQLKEDYFKKIECFDSVEISGVEDRFNASLGTYHDLLKIIKDKDFLDNEENEDILEDIVLTLTLFEDREMIEERLKTYAHLFDDKVMKQLKRRRYTGWGRLSRKLINGIRDKQSGKTILDFLKSDGFANRNFMQLIHDDSLTFKEDIQKAQVSGQGDSLHEHIANLAGSPAIKKGILQTVKVVDELVKVMGRHKPENIVIEMARENQTTQKGQKNSRERMKRIEEGIKELGSQILKEHPVENTQLQNEKLYLYYLQNGRDMYVDQELDINRLSDYDVDHIVPQSFLKDDSIDNKVLTRSDKARGKSDNVPSEEVVKKMKNYWRQLLNAKLITQRKFDNLTKAERGGLSELDKAGFIKRQLVETRQITKHVAQILDSRMNTKYDENDKLIREVKVITLKSKLVSDFRKDFQFYKVREINNYHHAHDAYLNAVVGTALIKKYPKLESEFVYGDYKVYDVRKMIAKSEQEIGKATAKYFFYSNIMNFFKTEITLANGEIRKRPLIETNGETGEIVWDKGRDFATVRKVLSMPQVNIVKKTEVQTGGFSKESILPKRNSDKLIARKKDWDPKKYGGFDSPTVAYSVLVVAKVEKGKSKKLKSVKELLGITIMERSSFEKNPIDFLEAKGYKEVKKDLIIKLPKYSLFELENGRKRMLASAGELQKGNELALPSKYVNFLYLASHYEKLKGSPEDNEQKQLFVEQHKHYLDEIIEQISEFSKRVILADANLDKVLSAYNKHRDKPIREQAENIIHLFTLTNLGAPAAFKYFDTTIDRKRYTSTKEVLDATLIHQSITGLYETRIDLSQLGGDGGPAPGGGGGMDPLQLLQPLEAEIKGTKLKAHWNSGATITCVPQAFLEEEVPIKNIWIKTIHGEKEQPVYYLTFKIQGRKVEAEVISSPYDYILVSPSDIPWLMKKPLQLTTLVPLQEYEERLLKQTMLTGSYKEKLQSLFLKYDALWQHWENQVGHRRIKPHHIATGTVNPRPQKQYPINPKAKASIQTVINDLLKQGVLIQQNSIMNTPVYPVPKPDGKWRMVLDYREVNKTIPLIAAQNQHSAGILSSIFRGKYKTTLDLSNGFWAHSITPESYWLTAFTWLGQQYCWTRLPQGFLNSPALFTADVVDLLKEVPNVQVYVDDIYISHDDPREHLEQLEKVFSLLLNAGYVVSLKKSEIAQHEVEFLGFNITKEGRGLTETFKQKLLNITPPRDLKQLQSILGLLNFARNFIPNFSELVKPLYNIIATANGKYITWTTDNSQQLQNIISMLNSAENLEERNPEVRLIMKVNTSPSAGYIRFYNEFAKRPIMYLNYVYTKAEVKFTNTEKLLTTIHKGLIKALDLGMGQEILVYSPIVSMTKIQKTPLPERKALPIRWITWMSYLEDPRIQFHYDKTLPELQQVPTVTDDIIAKIKHPSEFSMVFYTDGSAIKHPNVNKSHNAGMGIAQVQFKPEFTVINTWSIPLGDHTAQLAEVAAVEFACKKALKIDGPVLIVTDSFYVAESVNKELPYWQSNGFFNNKKKPLKHVSKWKSIADCIQLKPDIIIIHEKGHQPTASTFHTEGNNLADKLATQGSYVVNAGKRTADGSEFEKRTADGSEFESPKKKAKVE

SEQ ID NO: 517 - protein, 2176 aa, synthetic construct
MPAAKRVKLDGGDKKYSIGLDIGTNSVGWAVITDEYKVPSKKFKVLGNTDRHSIKKNLIGALLFDSGETAEATRLKRTARRRYTRRKNRICYLQEIFSNEMAKVDDSFFHRLEESFLVEEDKKHERHPIFGNIVDEVAYHEKYPTIYHLRKKLVDSTDKADLRLIYLALAHMIKFRGHFLIEGDLNPDNSDVDKLFIQLVQTYNQLFEENPINASGVDAKAILSARLSKSRRLENLIAQLPGEKKNGLFGNLIALSLGLTPNFKSNFDLAEDAKLQLSKDTYDDDLDNLLAQIGDQYADLFLAAKNLSDAILLSDILRVNTEITKAPLSASMIKRYDEHHQDLTLLKALVRQQLPEKYKEIFFDQSKNGYAGYIDGGASQEEFYKFIKPILEKMDGTEELLVKLNREDLLRKQRTFDNGSIPHQIHLGELHAILRRQEDFYPFLKDNREKIEKILTFRIPYYVGPLARGNSRFAWMTRKSEETITPWNFEEVVDKGASAQSFIERMTNFDKNLPNEKVLPKHSLLYEYFTVYNELTKVKYVTEGMRKPAFLSGEQKKAIVDLLFKTNRKVTVKQLKEDYFKKIECFDSVEISGVEDRFNASLGTYHDLLKIIKDKDFLDNEENEDILEDIVLTLTLFEDREMIEERLKTYAHLFDDKVMKQLKRRRYTGWGRLSRKLINGIRDKQSGKTILDFLKSDGFANRNFMQLIHDDSLTFKEDIQKAQVSGQGDSLHEHIANLAGSPAIKKGILQTVKVVDELVKVMGRHKPENIVIEMARENQTTQKGQKNSRERMKRIEEGIKELGSQILKEHPVENTQLQNEKLYLYYLQNGRDMYVDQELDINRLSDYDVDHIVPQSFLKDDSIDNKVLTRSDKARGKSDNVPSEEVVKKMKNYWRQLLNAKLITQRKFDNLTKAERGGLSELDKAGFIKRQLVETRQITKHVAQILDSRMNTKYDENDKLIREVKVITLKSKLVSDFRKDFQFYKVREINNYHHAHDAYLNAVVGTALIKKYPKLESEFVYGDYKVYDVRKMIAKSEQEIGKATAKYFFYSNIMNFFKTEITLANGEIRKRPLIETNGETGEIVWDKGRDFATVRKVLSMPQVNIVKKTEVQTGGFSKESILPKRNSDKLIARKKDWDPKKYGGFDSPTVAYSVLVVAKVEKGKSKKLKSVKELLGITIMERSSFEKNPIDFLEAKGYKEVKKDLIIKLPKYSLFELENGRKRMLASAGELQKGNELALPSKYVNFLYLASHYEKLKGSPEDNEQKQLFVEQHKHYLDEIIEQISEFSKRVILADANLDKVLSAYNKHRDKPIREQAENIIHLFTLTNLGAPAAFKYFDTTIDRKRYTSTKEVLDATLIHQSITGLYETRIDLSQLGGDGGEAAAKGSSGGSGGMDPLQLLQPLEAEIKGTKLKAHWNSGATITCVPQAFLEEEVPIKNIWIKTIHGEKEQPVYYLTFKIQGRKVEAEVISSPYDYILVSPSDIPWLMKKPLQLTTLVPLQEYEERLLKQTMLTGSYKEKLQSLFLKYDALWQHWENQVGHRRIKPHHIATGTVNPRPQKQYPINPKAKASIQTVINDLLKQGVLIQQNSIMNTPVYPVPKPDGKWRMVLDYREVNKTIPLIAAQNQHSAGILSSIFRGKYKTTLDLSNGFWAHSITPESYWLTAFTWLGQQYCWTRLPQGFLNSPALFTADVVDLLKEVPNVQVYVDDIYISHDDPREHLEQLEKVFSLLLNAGYVVSLKKSEIAQHEVEFLGFNITKEGRGLTETFKQKLLNITPPRDLKQLQSILGLLNFARNFIPNFSELVKPLYNIIATANGKYITWTTDNSQQLQNIISMLNSAENLEERNPEVRLIMKVNTSPSAGYIRFYNEFAKRPIMYLNYVYTKAEVKFTNTEKLLTTIHKGLIKALDLGMGQEILVYSPIVSMTKIQKTPLPERKALPIRWITWMSYLEDPRIQFHYDKTLPELQQVPTVTDDIIAKIKHPSEFSMVFYTDGSAIKHPNVNKSHNAGMGIAQVQFKPEFTVINTWSIPLGDHTAQLAEVAAVEFACKKALKIDGPVLIVTDSFYVAESVNKELPYWQSNGFFNNKKKPLKHVSKWKSIADCIQLKPDIIIIHEKGHQPTASTFHTEGNNLADKLATQGSYVVNAGKRTADGSEFEKRTADGSEFESPKKKAKVE

SEQ ID NO: 518 - protein, 2174 aa, synthetic construct
MPAAKRVKLDGGDKKYSIGLDIGTNSVGWAVITDEYKVPSKKFKVLGNTDRHSIKKNLIGALLFDSGETAEATRLKRTARRRYTRRKNRICYLQEIFSNEMAKVDDSFFHRLEESFLVEEDKKHERHPIFGNIVDEVAYHEKYPTIYHLRKKLVDSTDKADLRLIYLALAHMIKFRGHFLIEGDLNPDNSDVDKLFIQLVQTYNQLFEENPINASGVDAKAILSARLSKSRRLENLIAQLPGEKKNGLFGNLIALSLGLTPNFKSNFDLAEDAKLQLSKDTYDDDLDNLLAQIGDQYADLFLAAKNLSDAILLSDILRVNTEITKAPLSASMIKRYDEHHQDLTLLKALVRQQLPEKYKEIFFDQSKNGYAGYIDGGASQEEFYKFIKPILEKMDGTEELLVKLNREDLLRKQRTFDNGSIPHQIHLGELHAILRRQEDFYPFLKDNREKIEKILTFRIPYYVGPLARGNSRFAWMTRKSEETITPWNFEEVVDKGASAQSFIERMTNFDKNLPNEKVLPKHSLLYEYFTVYNELTKVKYVTEGMRKPAFLSGEQKKAIVDLLFKTNRKVTVKQLKEDYFKKIECFDSVEISGVEDRFNASLGTYHDLLKIIKDKDFLDNEENEDILEDIVLTLTLFEDREMIEERLKTYAHLFDDKVMKQLKRRRYTGWGRLSRKLINGIRDKQSGKTILDFLKSDGFANRNFMQLIHDDSLTFKEDIQKAQVSGQGDSLHEHIANLAGSPAIKKGILQTVKVVDELVKVMGRHKPENIVIEMARENQTTQKGQKNSRERMKRIEEGIKELGSQILKEHPVENTQLQNEKLYLYYLQNGRDMYVDQELDINRLSDYDVDHIVPQSFLKDDSIDNKVLTRSDKARGKSDNVPSEEVVKKMKNYWRQLLNAKLITQRKFDNLTKAERGGLSELDKAGFIKRQLVETRQITKHVAQILDSRMNTKYDENDKLIREVKVITLKSKLVSDFRKDFQFYKVREINNYHHAHDAYLNAVVGTALIKKYPKLESEFVYGDYKVYDVRKMIAKSEQEIGKATAKYFFYSNIMNFFKTEITLANGEIRKRPLIETNGETGEIVWDKGRDFATVRKVLSMPQVNIVKKTEVQTGGFSKESILPKRNSDKLIARKKDWDPKKYGGFDSPTVAYSVLVVAKVEKGKSKKLKSVKELLGITIMERSSFEKNPIDFLEAKGYKEVKKDLIIKLPKYSLFELENGRKRMLASAGELQKGNELALPSKYVNFLYLASHYEKLKGSPEDNEQKQLFVEQHKHYLDEIIEQISEFSKRVILADANLDKVLSAYNKHRDKPIREQAENIIHLFTLTNLGAPAAFKYFDTTIDRKRYTSTKEVLDATLIHQSITGLYETRIDLSQLGGDGGGGSPAPGSSGGMDPLQLLQPLEAEIKGTKLKAHWNSGATITCVPQAFLEEEVPIKNIWIKTIHGEKEQPVYYLTFKIQGRKVEAEVISSPYDYILVSPSDIPWLMKKPLQLTTLVPLQEYEERLLKQTMLTGSYKEKLQSLFLKYDALWQHWENQVGHRRIKPHHIATGTVNPRPQKQYPINPKAKASIQTVINDLLKQGVLIQQNSIMNTPVYPVPKPDGKWRMVLDYREVNKTIPLIAAQNQHSAGILSSIFRGKYKTTLDLSNGFWAHSITPESYWLTAFTWLGQQYCWTRLPQGFLNSPALFTADVVDLLKEVPNVQVYVDDIYISHDDPREHLEQLEKVFSLLLNAGYVVSLKKSEIAQHEVEFLGFNITKEGRGLTETFKQKLLNITPPRDLKQLQSILGLLNFARNFIPNFSELVKPLYNIIATANGKYITWTTDNSQQLQNIISMLNSAENLEERNPEVRLIMKVNTSPSAGYIRFYNEFAKRPIMYLNYVYTKAEVKFTNTEKLLTTIHKGLIKALDLGMGQEILVYSPIVSMTKIQKTPLPERKALPIRWITWMSYLEDPRIQFHYDKTLPELQQVPTVTDDIIAKIKHPSEFSMVFYTDGSAIKHPNVNKSHNAGMGIAQVQFKPEFTVINTWSIPLGDHTAQLAEVAAVEFACKKALKIDGPVLIVTDSFYVAESVNKELPYWQSNGFFNNKKKPLKHVSKWKSIADCIQLKPDIIIIHEKGHQPTASTFHTEGNNLADKLATQGSYVVNAGKRTADGSEFEKRTADGSEFESPKKKAKVE

SEQ ID NO: 519 - protein, 2175 aa, synthetic construct
MPAAKRVKLDGGDKKYSIGLDIGTNSVGWAVITDEYKVPSKKFKVLGNTDRHSIKKNLIGALLFDSGETAEATRLKRTARRRYTRRKNRICYLQEIFSNEMAKVDDSFFHRLEESFLVEEDKKHERHPIFGNIVDEVAYHEKYPTIYHLRKKLVDSTDKADLRLIYLALAHMIKFRGHFLIEGDLNPDNSDVDKLFIQLVQTYNQLFEENPINASGVDAKAILSARLSKSRRLENLIAQLPGEKKNGLFGNLIALSLGLTPNFKSNFDLAEDAKLQLSKDTYDDDLDNLLAQIGDQYADLFLAAKNLSDAILLSDILRVNTEITKAPLSASMIKRYDEHHQDLTLLKALVRQQLPEKYKEIFFDQSKNGYAGYIDGGASQEEFYKFIKPILEKMDGTEELLVKLNREDLLRKQRTFDNGSIPHQIHLGELHAILRRQEDFYPFLKDNREKIEKILTFRIPYYVGPLARGNSRFAWMTRKSEETITPWNFEEVVDKGASAQSFIERMTNFDKNLPNEKVLPKHSLLYEYFTVYNELTKVKYVTEGMRKPAFLSGEQKKAIVDLLFKTNRKVTVKQLKEDYFKKIECFDSVEISGVEDRFNASLGTYHDLLKIIKDKDFLDNEENEDILEDIVLTLTLFEDREMIEERLKTYAHLFDDKVMKQLKRRRYTGWGRLSRKLINGIRDKQSGKTILDFLKSDGFANRNFMQLIHDDSLTFKEDIQKAQVSGQGDSLHEHIANLAGSPAIKKGILQTVKVVDELVKVMGRHKPENIVIEMARENQTTQKGQKNSRERMKRIEEGIKELGSQILKEHPVENTQLQNEKLYLYYLQNGRDMYVDQELDINRLSDYDVDHIVPQSFLKDDSIDNKVLTRSDKARGKSDNVPSEEVVKKMKNYWRQLLNAKLITQRKFDNLTKAERGGLSELDKAGFIKRQLVETRQITKHVAQILDSRMNTKYDENDKLIREVKVITLKSKLVSDFRKDFQFYKVREINNYHHAHDAYLNAVVGTALIKKYPKLESEFVYGDYKVYDVRKMIAKSEQEIGKATAKYFFYSNIMNFFKTEITLANGEIRKRPLIETNGETGEIVWDKGRDFATVRKVLSMPQVNIVKKTEVQTGGFSKESILPKRNSDKLIARKKDWDPKKYGGFDSPTVAYSVLVVAKVEKGKSKKLKSVKELLGITIMERSSFEKNPIDFLEAKGYKEVKKDLIIKLPKYSLFELENGRKRMLASAGELQKGNELALPSKYVNFLYLASHYEKLKGSPEDNEQKQLFVEQHKHYLDEIIEQISEFSKRVILADANLDKVLSAYNKHRDKPIREQAENIIHLFTLTNLGAPAAFKYFDTTIDRKRYTSTKEVLDATLIHQSITGLYETRIDLSQLGGDGGGGGGSGGGGSGGMDPLQLLQPLEAEIKGTKLKAHWNSGATITCVPQAFLEEEVPIKNIWIKTIHGEKEQPVYYLTFKIQGRKVEAEVISSPYDYILVSPSDIPWLMKKPLQLTTLVPLQEYEERLLKQTMLTGSYKEKLQSLFLKYDALWQHWENQVGHRRIKPHHIATGTVNPRPQKQYPINPKAKASIQTVINDLLKQGVLIQQNSIMNTPVYPVPKPDGKWRMVLDYREVNKTIPLIAAQNQHSAGILSSIFRGKYKTTLDLSNGFWAHSITPESYWLTAFTWLGQQYCWTRLPQGFLNSPALFTADVVDLLKEVPNVQVYVDDIYISHDDPREHLEQLEKVFSLLLNAGYVVSLKKSEIAQHEVEFLGFNITKEGRGLTETFKQKLLNITPPRDLKQLQSILGLLNFARNFIPNFSELVKPLYNIIATANGKYITWTTDNSQQLQNIISMLNSAENLEERNPEVRLIMKVNTSPSAGYIRFYNEFAKRPIMYLNYVYTKAEVKFTNTEKLLTTIHKGLIKALDLGMGQEILVYSPIVSMTKIQKTPLPERKALPIRWITWMSYLEDPRIQFHYDKTLPELQQVPTVTDDIIAKIKHPSEFSMVFYTDGSAIKHPNVNKSHNAGMGIAQVQFKPEFTVINTWSIPLGDHTAQLAEVAAVEFACKKALKIDGPVLIVTDSFYVAESVNKELPYWQSNGFFNNKKKPLKHVSKWKSIADCIQLKPDIIIIHEKGHQPTASTFHTEGNNLADKLATQGSYVVNAGKRTADGSEFEKRTADGSEFESPKKKAKVE

SEQ ID NO: 520 - protein, 2172 aa, synthetic construct
MPAAKRVKLDGGDKKYSIGLDIGTNSVGWAVITDEYKVPSKKFKVLGNTDRHSIKKNLIGALLFDSGETAEATRLKRTARRRYTRRKNRICYLQEIFSNEMAKVDDSFFHRLEESFLVEEDKKHERHPIFGNIVDEVAYHEKYPTIYHLRKKLVDSTDKADLRLIYLALAHMIKFRGHFLIEGDLNPDNSDVDKLFIQLVQTYNQLFEENPINASGVDAKAILSARLSKSRRLENLIAQLPGEKKNGLFGNLIALSLGLTPNFKSNFDLAEDAKLQLSKDTYDDDLDNLLAQIGDQYADLFLAAKNLSDAILLSDILRVNTEITKAPLSASMIKRYDEHHQDLTLLKALVRQQLPEKYKEIFFDQSKNGYAGYIDGGASQEEFYKFIKPILEKMDGTEELLVKLNREDLLRKQRTFDNGSIPHQIHLGELHAILRRQEDFYPFLKDNREKIEKILTFRIPYYVGPLARGNSRFAWMTRKSEETITPWNFEEVVDKGASAQSFIERMTNFDKNLPNEKVLPKHSLLYEYFTVYNELTKVKYVTEGMRKPAFLSGEQKKAIVDLLFKTNRKVTVKQLKEDYFKKIECFDSVEISGVEDRFNASLGTYHDLLKIIKDKDFLDNEENEDILEDIVLTLTLFEDREMIEERLKTYAHLFDDKVMKQLKRRRYTGWGRLSRKLINGIRDKQSGKTILDFLKSDGFANRNFMQLIHDDSLTFKEDIQKAQVSGQGDSLHEHIANLAGSPAIKKGILQTVKVVDELVKVMGRHKPENIVIEMARENQTTQKGQKNSRERMKRIEEGIKELGSQILKEHPVENTQLQNEKLYLYYLQNGRDMYVDQELDINRLSDYDVDHIVPQSFLKDDSIDNKVLTRSDKARGKSDNVPSEEVVKKMKNYWRQLLNAKLITQRKFDNLTKAERGGLSELDKAGFIKRQLVETRQITKHVAQILDSRMNTKYDENDKLIREVKVITLKSKLVSDFRKDFQFYKVREINNYHHAHDAYLNAVVGTALIKKYPKLESEFVYGDYKVYDVRKMIAKSEQEIGKATAKYFFYSNIMNFFKTEITLANGEIRKRPLIETNGETGEIVWDKGRDFATVRKVLSMPQVNIVKKTEVQTGGFSKESILPKRNSDKLIARKKDWDPKKYGGFDSPTVAYSVLVVAKVEKGKSKKLKSVKELLGITIMERSSFEKNPIDFLEAKGYKEVKKDLIIKLPKYSLFELENGRKRMLASAGELQKGNELALPSKYVNFLYLASHYEKLKGSPEDNEQKQLFVEQHKHYLDEIIEQISEFSKRVILADANLDKVLSAYNKHRDKPIREQAENIIHLFTLTNLGAPAAFKYFDTTIDRKRYTSTKEVLDATLIHQSITGLYETRIDLSQLGGDGGPAPAPAPGGMDPLQLLQPLEAEIKGTKLKAHWNSGATITCVPQAFLEEEVPIKNIWIKTIHGEKEQPVYYLTFKIQGRKVEAEVISSPYDYILVSPSDIPWLMKKPLQLTTLVPLQEYEERLLKQTMLTGSYKEKLQSLFLKYDALWQHWENQVGHRRIKPHHIATGTVNPRPQKQYPINPKAKASIQTVINDLLKQGVLIQQNSIMNTPVYPVPKPDGKWRMVLDYREVNKTIPLIAAQNQHSAGILSSIFRGKYKTTLDLSNGFWAHSITPESYWLTAFTWLGQQYCWTRLPQGFLNSPALFTADVVDLLKEVPNVQVYVDDIYISHDDPREHLEQLEKVFSLLLNAGYVVSLKKSEIAQHEVEFLGFNITKEGRGLTETFKQKLLNITPPRDLKQLQSILGLLNFARNFIPNFSELVKPLYNIIATANGKYITWTTDNSQQLQNIISMLNSAENLEERNPEVRLIMKVNTSPSAGYIRFYNEFAKRPIMYLNYVYTKAEVKFTNTEKLLTTIHKGLIKALDLGMGQEILVYSPIVSMTKIQKTPLPERKALPIRWITWMSYLEDPRIQFHYDKTLPELQQVPTVTDDIIAKIKHPSEFSMVFYTDGSAIKHPNVNKSHNAGMGIAQVQFKPEFTVINTWSIPLGDHTAQLAEVAAVEFACKKALKIDGPVLIVTDSFYVAESVNKELPYWQSNGFFNNKKKPLKHVSKWKSIADCIQLKPDIIIIHEKGHQPTASTFHTEGNNLADKLATQGSYVVNAGKRTADGSEFEKRTADGSEFESPKKKAKVE

SEQ ID NO: 521 - protein, 2174 aa, synthetic construct
MPAAKRVKLDGGDKKYSIGLDIGTNSVGWAVITDEYKVPSKKFKVLGNTDRHSIKKNLIGALLFDSGETAEATRLKRTARRRYTRRKNRICYLQEIFSNEMAKVDDSFFHRLEESFLVEEDKKHERHPIFGNIVDEVAYHEKYPTIYHLRKKLVDSTDKADLRLIYLALAHMIKFRGHFLIEGDLNPDNSDVDKLFIQLVQTYNQLFEENPINASGVDAKAILSARLSKSRRLENLIAQLPGEKKNGLFGNLIALSLGLTPNFKSNFDLAEDAKLQLSKDTYDDDLDNLLAQIGDQYADLFLAAKNLSDAILLSDILRVNTEITKAPLSASMIKRYDEHHQDLTLLKALVRQQLPEKYKEIFFDQSKNGYAGYIDGGASQEEFYKFIKPILEKMDGTEELLVKLNREDLLRKQRTFDNGSIPHQIHLGELHAILRRQEDFYPFLKDNREKIEKILTFRIPYYVGPLARGNSRFAWMTRKSEETITPWNFEEVVDKGASAQSFIERMTNFDKNLPNEKVLPKHSLLYEYFTVYNELTKVKYVTEGMRKPAFLSGEQKKAIVDLLFKTNRKVTVKQLKEDYFKKIECFDSVEISGVEDRFNASLGTYHDLLKIIKDKDFLDNEENEDILEDIVLTLTLFEDREMIEERLKTYAHLFDDKVMKQLKRRRYTGWGRLSRKLINGIRDKQSGKTILDFLKSDGFANRNFMQLIHDDSLTFKEDIQKAQVSGQGDSLHEHIANLAGSPAIKKGILQTVKVVDELVKVMGRHKPENIVIEMARENQTTQKGQKNSRERMKRIEEGIKELGSQILKEHPVENTQLQNEKLYLYYLQNGRDMYVDQELDINRLSDYDVDHIVPQSFLKDDSIDNKVLTRSDKARGKSDNVPSEEVVKKMKNYWRQLLNAKLITQRKFDNLTKAERGGLSELDKAGFIKRQLVETRQITKHVAQILDSRMNTKYDENDKLIREVKVITLKSKLVSDFRKDFQFYKVREINNYHHAHDAYLNAVVGTALIKKYPKLESEFVYGDYKVYDVRKMIAKSEQEIGKATAKYFFYSNIMNFFKTEITLANGEIRKRPLIETNGETGEIVWDKGRDFATVRKVLSMPQVNIVKKTEVQTGGFSKESILPKRNSDKLIARKKDWDPKKYGGFDSPTVAYSVLVVAKVEKGKSKKLKSVKELLGITIMERSSFEKNPIDFLEAKGYKEVKKDLIIKLPKYSLFELENGRKRMLASAGELQKGNELALPSKYVNFLYLASHYEKLKGSPEDNEQKQLFVEQHKHYLDEIIEQISEFSKRVILADANLDKVLSAYNKHRDKPIREQAENIIHLFTLTNLGAPAAFKYFDTTIDRKRYTSTKEVLDATLIHQSITGLYETRIDLSQLGGDGGGSSGGSGGGGGMDPLQLLQPLEAEIKGTKLKAHWNSGATITCVPQAFLEEEVPIKNIWIKTIHGEKEQPVYYLTFKIQGRKVEAEVISSPYDYILVSPSDIPWLMKKPLQLTTLVPLQEYEERLLKQTMLTGSYKEKLQSLFLKYDALWQHWENQVGHRRIKPHHIATGTVNPRPQKQYPINPKAKASIQTVINDLLKQGVLIQQNSIMNTPVYPVPKPDGKWRMVLDYREVNKTIPLIAAQNQHSAGILSSIFRGKYKTTLDLSNGFWAHSITPESYWLTAFTWLGQQYCWTRLPQGFLNSPALFTADVVDLLKEVPNVQVYVDDIYISHDDPREHLEQLEKVFSLLLNAGYVVSLKKSEIAQHEVEFLGFNITKEGRGLTETFKQKLLNITPPRDLKQLQSILGLLNFARNFIPNFSELVKPLYNIIATANGKYITWTTDNSQQLQNIISMLNSAENLEERNPEVRLIMKVNTSPSAGYIRFYNEFAKRPIMYLNYVYTKAEVKFTNTEKLLTTIHKGLIKALDLGMGQEILVYSPIVSMTKIQKTPLPERKALPIRWITWMSYLEDPRIQFHYDKTLPELQQVPTVTDDIIAKIKHPSEFSMVFYTDGSAIKHPNVNKSHNAGMGIAQVQFKPEFTVINTWSIPLGDHTAQLAEVAAVEFACKKALKIDGPVLIVTDSFYVAESVNKELPYWQSNGFFNNKKKPLKHVSKWKSIADCIQLKPDIIIIHEKGHQPTASTFHTEGNNLADKLATQGSYVVNAGKRTADGSEFEKRTADGSEFESPKKKAKVE

SEQ ID NO: 522 - protein, 2010 aa, synthetic construct
MPAAKRVKLDGGDKKYSIGLDIGTNSVGWAVITDEYKVPSKKFKVLGNTDRHSIKKNLIGALLFDSGETAEATRLKRTARRRYTRRKNRICYLQEIFSNEMAKVDDSFFHRLEESFLVEEDKKHERHPIFGNIVDEVAYHEKYPTIYHLRKKLVDSTDKADLRLIYLALAHMIKFRGHFLIEGDLNPDNSDVDKLFIQLVQTYNQLFEENPINASGVDAKAILSARLSKSRRLENLIAQLPGEKKNGLFGNLIALSLGLTPNFKSNFDLAEDAKLQLSKDTYDDDLDNLLAQIGDQYADLFLAAKNLSDAILLSDILRVNTEITKAPLSASMIKRYDEHHQDLTLLKALVRQQLPEKYKEIFFDQSKNGYAGYIDGGASQEEFYKFIKPILEKMDGTEELLVKLNREDLLRKQRTFDNGSIPHQIHLGELHAILRRQEDFYPFLKDNREKIEKILTFRIPYYVGPLARGNSRFAWMTRKSEETITPWNFEEVVDKGASAQSFIERMTNFDKNLPNEKVLPKHSLLYEYFTVYNELTKVKYVTEGMRKPAFLSGEQKKAIVDLLFKTNRKVTVKQLKEDYFKKIECFDSVEISGVEDRFNASLGTYHDLLKIIKDKDFLDNEENEDILEDIVLTLTLFEDREMIEERLKTYAHLFDDKVMKQLKRRRYTGWGRLSRKLINGIRDKQSGKTILDFLKSDGFANRNFMQLIHDDSLTFKEDIQKAQVSGQGDSLHEHIANLAGSPAIKKGILQTVKVVDELVKVMGRHKPENIVIEMARENQTTQKGQKNSRERMKRIEEGIKELGSQILKEHPVENTQLQNEKLYLYYLQNGRDMYVDQELDINRLSDYDVDHIVPQSFLKDDSIDNKVLTRSDKARGKSDNVPSEEVVKKMKNYWRQLLNAKLITQRKFDNLTKAERGGLSELDKAGFIKRQLVETRQITKHVAQILDSRMNTKYDENDKLIREVKVITLKSKLVSDFRKDFQFYKVREINNYHHAHDAYLNAVVGTALIKKYPKLESEFVYGDYKVYDVRKMIAKSEQEIGKATAKYFFYSNIMNFFKTEITLANGEIRKRPLIETNGETGEIVWDKGRDFATVRKVLSMPQVNIVKKTEVQTGGFSKESILPKRNSDKLIARKKDWDPKKYGGFDSPTVAYSVLVVAKVEKGKSKKLKSVKELLGITIMERSSFEKNPIDFLEAKGYKEVKKDLIIKLPKYSLFELENGRKRMLASAGELQKGNELALPSKYVNFLYLASHYEKLKGSPEDNEQKQLFVEQHKHYLDEIIEQISEFSKRVILADANLDKVLSAYNKHRDKPIREQAENIIHLFTLTNLGAPAAFKYFDTTIDRKRYTSTKEVLDATLIHQSITGLYETRIDLSQLGGDGGGGGGSGGGGSGGGGSGGGGSGGGVLDTPPSHIGLEHLPPPPEVPQFPLNLERLQALQDLVHRSLEAGYISPWDGPGNNPVFPVRKPNGAWRFVHDLRATNALTKPIPALSPGPPDLTAPPTHPPHIICLDLKDAFFQIPVEDRFRFYLSFTLPSPGGLQPHRRFAWRVLPQGFINSPALFQRALQEPLRQVSAAFSQSLLVSYMDDILYASPTEEQRSQCYQALAARLRDLGFQVASEKTSQTPSPVPFLGQMVHEQIVTYQSLPTLQISSPISLHQLQAVLGDLQWVSRGTPTTRRPLQLLYSSLKRHHDPRAIIQLSPEQLQGIAELRQALSHNARSRYNEQEPLLAYVHLTRAGSTLVLFQKGAQFPLAYFQTPLTDNQASPWGLLLLLGCQYLQTQALSSYAKPILKYYHNLPKTSLDNWIQSSEDPRVQELLQLWPQISSQGIQPPGPWKTLITRAEVFLTPQFSPDPIPAALCLFSDGATGRGAYCLWKDHLLDFQAVPAPESAQKGELAGLLAGLAAAPPEPVNIWVDSKYLYSLLRTWVLGAWLQPDPVPSYALLYKSLLRHPAIVVGHVRSHSSASHPIASLNNYVDQLAGKRTADGSEFEKRTADGSEFESPKKKAKVE

SEQ ID NO: 523 - protein, 1995 aa, synthetic construct
MPAAKRVKLDGGDKKYSIGLDIGTNSVGWAVITDEYKVPSKKFKVLGNTDRHSIKKNLIGALLFDSGETAEATRLKRTARRRYTRRKNRICYLQEIFSNEMAKVDDSFFHRLEESFLVEEDKKHERHPIFGNIVDEVAYHEKYPTIYHLRKKLVDSTDKADLRLIYLALAHMIKFRGHFLIEGDLNPDNSDVDKLFIQLVQTYNQLFEENPINASGVDAKAILSARLSKSRRLENLIAQLPGEKKNGLFGNLIALSLGLTPNFKSNFDLAEDAKLQLSKDTYDDDLDNLLAQIGDQYADLFLAAKNLSDAILLSDILRVNTEITKAPLSASMIKRYDEHHQDLTLLKALVRQQLPEKYKEIFFDQSKNGYAGYIDGGASQEEFYKFIKPILEKMDGTEELLVKLNREDLLRKQRTFDNGSIPHQIHLGELHAILRRQEDFYPFLKDNREKIEKILTFRIPYYVGPLARGNSRFAWMTRKSEETITPWNFEEVVDKGASAQSFIERMTNFDKNLPNEKVLPKHSLLYEYFTVYNELTKVKYVTEGMRKPAFLSGEQKKAIVDLLFKTNRKVTVKQLKEDYFKKIECFDSVEISGVEDRFNASLGTYHDLLKIIKDKDFLDNEENEDILEDIVLTLTLFEDREMIEERLKTYAHLFDDKVMKQLKRRRYTGWGRLSRKLINGIRDKQSGKTILDFLKSDGFANRNFMQLIHDDSLTFKEDIQKAQVSGQGDSLHEHIANLAGSPAIKKGILQTVKVVDELVKVMGRHKPENIVIEMARENQTTQKGQKNSRERMKRIEEGIKELGSQILKEHPVENTQLQNEKLYLYYLQNGRDMYVDQELDINRLSDYDVDHIVPQSFLKDDSIDNKVLTRSDKARGKSDNVPSEEVVKKMKNYWRQLLNAKLITQRKFDNLTKAERGGLSELDKAGFIKRQLVETRQITKHVAQILDSRMNTKYDENDKLIREVKVITLKSKLVSDFRKDFQFYKVREINNYHHAHDAYLNAVVGTALIKKYPKLESEFVYGDYKVYDVRKMIAKSEQEIGKATAKYFFYSNIMNFFKTEITLANGEIRKRPLIETNGETGEIVWDKGRDFATVRKVLSMPQVNIVKKTEVQTGGFSKESILPKRNSDKLIARKKDWDPKKYGGFDSPTVAYSVLVVAKVEKGKSKKLKSVKELLGITIMERSSFEKNPIDFLEAKGYKEVKKDLIIKLPKYSLFELENGRKRMLASAGELQKGNELALPSKYVNFLYLASHYEKLKGSPEDNEQKQLFVEQHKHYLDEIIEQISEFSKRVILADANLDKVLSAYNKHRDKPIREQAENIIHLFTLTNLGAPAAFKYFDTTIDRKRYTSTKEVLDATLIHQSITGLYETRIDLSQLGGDGGGGGGGGGGVLDTPPSHIGLEHLPPPPEVPQFPLNLERLQALQDLVHRSLEAGYISPWDGPGNNPVFPVRKPNGAWRFVHDLRATNALTKPIPALSPGPPDLTAPPTHPPHIICLDLKDAFFQIPVEDRFRFYLSFTLPSPGGLQPHRRFAWRVLPQGFINSPALFQRALQEPLRQVSAAFSQSLLVSYMDDILYASPTEEQRSQCYQALAARLRDLGFQVASEKTSQTPSPVPFLGQMVHEQIVTYQSLPTLQISSPISLHQLQAVLGDLQWVSRGTPTTRRPLQLLYSSLKRHHDPRAIIQLSPEQLQGIAELRQALSHNARSRYNEQEPLLAYVHLTRAGSTLVLFQKGAQFPLAYFQTPLTDNQASPWGLLLLLGCQYLQTQALSSYAKPILKYYHNLPKTSLDNWIQSSEDPRVQELLQLWPQISSQGIQPPGPWKTLITRAEVFLTPQFSPDPIPAALCLFSDGATGRGAYCLWKDHLLDFQAVPAPESAQKGELAGLLAGLAAAPPEPVNIWVDSKYLYSLLRTWVLGAWLQPDPVPSYALLYKSLLRHPAIVVGHVRSHSSASHPIASLNNYVDQLAGKRTADGSEFEKRTADGSEFESPKKKAKVE

SEQ ID NO: 524 - protein, 2122 aa, synthetic construct
MPAAKRVKLDGGDKKYSIGLDIGTNSVGWAVITDEYKVPSKKFKVLGNTDRHSIKKNLIGALLFDSGETAEATRLKRTARRRYTRRKNRICYLQEIFSNEMAKVDDSFFHRLEESFLVEEDKKHERHPIFGNIVDEVAYHEKYPTIYHLRKKLVDSTDKADLRLIYLALAHMIKFRGHFLIEGDLNPDNSDVDKLFIQLVQTYNQLFEENPINASGVDAKAILSARLSKSRRLENLIAQLPGEKKNGLFGNLIALSLGLTPNFKSNFDLAEDAKLQLSKDTYDDDLDNLLAQIGDQYADLFLAAKNLSDAILLSDILRVNTEITKAPLSASMIKRYDEHHQDLTLLKALVRQQLPEKYKEIFFDQSKNGYAGYIDGGASQEEFYKFIKPILEKMDGTEELLVKLNREDLLRKQRTFDNGSIPHQIHLGELHAILRRQEDFYPFLKDNREKIEKILTFRIPYYVGPLARGNSRFAWMTRKSEETITPWNFEEVVDKGASAQSFIERMTNFDKNLPNEKVLPKHSLLYEYFTVYNELTKVKYVTEGMRKPAFLSGEQKKAIVDLLFKTNRKVTVKQLKEDYFKKIECFDSVEISGVEDRFNASLGTYHDLLKIIKDKDFLDNEENEDILEDIVLTLTLFEDREMIEERLKTYAHLFDDKVMKQLKRRRYTGWGRLSRKLINGIRDKQSGKTILDFLKSDGFANRNFMQLIHDDSLTFKEDIQKAQVSGQGDSLHEHIANLAGSPAIKKGILQTVKVVDELVKVMGRHKPENIVIEMARENQTTQKGQKNSRERMKRIEEGIKELGSQILKEHPVENTQLQNEKLYLYYLQNGRDMYVDQELDINRLSDYDVDHIVPQSFLKDDSIDNKVLTRSDKARGKSDNVPSEEVVKKMKNYWRQLLNAKLITQRKFDNLTKAERGGLSELDKAGFIKRQLVETRQITKHVAQILDSRMNTKYDENDKLIREVKVITLKSKLVSDFRKDFQFYKVREINNYHHAHDAYLNAVVGTALIKKYPKLESEFVYGDYKVYDVRKMIAKSEQEIGKATAKYFFYSNIMNFFKTEITLANGEIRKRPLIETNGETGEIVWDKGRDFATVRKVLSMPQVNIVKKTEVQTGGFSKESILPKRNSDKLIARKKDWDPKKYGGFDSPTVAYSVLVVAKVEKGKSKKLKSVKELLGITIMERSSFEKNPIDFLEAKGYKEVKKDLIIKLPKYSLFELENGRKRMLASAGELQKGNELALPSKYVNFLYLASHYEKLKGSPEDNEQKQLFVEQHKHYLDEIIEQISEFSKRVILADANLDKVLSAYNKHRDKPIREQAENIIHLFTLTNLGAPAAFKYFDTTIDRKRYTSTKEVLDATLIHQSITGLYETRIDLSQLGGDGGAEAAAKEAAAKEAAAKEAAAKALEAEAAAKEAAAKEAAAKEAAAKAGGIPWLMKKPLQLTTLVPLQEYEERLLKQTMLTGSYKEKLQSLFLKYDALWQHWENQVGHRRIKPHHIATGTVNPRPQKQYPINPKAKASIQTVINDLLKQGVLIQQNSIMNTPVYPVPKPDGKWRMVLDYREVNKTIPLIAAQNQHSAGILSSIFRGKYKTTLDLSNGFWAHSITPESYWLTAFTWLGQQYCWTRLPQGFLNSPALFTADVVDLLKEVPNVQVYVDDIYISHDDPREHLEQLEKVFSLLLNAGYVVSLKKSEIAQHEVEFLGFNITKEGRGLTETFKQKLLNITPPRDLKQLQSILGLLNFARNFIPNFSELVKPLYNIIATANGKYITWTTDNSQQLQNIISMLNSAENLEERNPEVRLIMKVNTSPSAGYIRFYNEFAKRPIMYLNYVYTKAEVKFTNTEKLLTTIHKGLIKALDLGMGQEILVYSPIVSMTKIQKTPLPERKALPIRWITWMSYLEDPRIQFHYDKTLPELQQVPTVTDDIIAKIKHPSEFSMVFYTDGSAIKHPNVNKSHNAGMGIAQVQFKPEFTVINTWSIPLGDHTAQLAEVAAVEFACKKALKIDGPVLIVTDSFYVAESVNKELPYWQSNGFFNNKKKPLKHVSKWKSIADCIQLKPDIIIIHEKGHQPTASTFHTEGNNLADKLATQGSYVVNAGKRTADGSEFEKRTADGSEFESPKKKAKVE

SEQ ID NO: 525 - protein, 2096 aa, synthetic construct
MPAAKRVKLDGGDKKYSIGLDIGTNSVGWAVITDEYKVPSKKFKVLGNTDRHSIKKNLIGALLFDSGETAEATRLKRTARRRYTRRKNRICYLQEIFSNEMAKVDDSFFHRLEESFLVEEDKKHERHPIFGNIVDEVAYHEKYPTIYHLRKKLVDSTDKADLRLIYLALAHMIKFRGHFLIEGDLNPDNSDVDKLFIQLVQTYNQLFEENPINASGVDAKAILSARLSKSRRLENLIAQLPGEKKNGLFGNLIALSLGLTPNFKSNFDLAEDAKLQLSKDTYDDDLDNLLAQIGDQYADLFLAAKNLSDAILLSDILRVNTEITKAPLSASMIKRYDEHHQDLTLLKALVRQQLPEKYKEIFFDQSKNGYAGYIDGGASQEEFYKFIKPILEKMDGTEELLVKLNREDLLRKQRTFDNGSIPHQIHLGELHAILRRQEDFYPFLKDNREKIEKILTFRIPYYVGPLARGNSRFAWMTRKSEETITPWNFEEVVDKGASAQSFIERMTNFDKNLPNEKVLPKHSLLYEYFTVYNELTKVKYVTEGMRKPAFLSGEQKKAIVDLLFKTNRKVTVKQLKEDYFKKIECFDSVEISGVEDRFNASLGTYHDLLKIIKDKDFLDNEENEDILEDIVLTLTLFEDREMIEERLKTYAHLFDDKVMKQLKRRRYTGWGRLSRKLINGIRDKQSGKTILDFLKSDGFANRNFMQLIHDDSLTFKEDIQKAQVSGQGDSLHEHIANLAGSPAIKKGILQTVKVVDELVKVMGRHKPENIVIEMARENQTTQKGQKNSRERMKRIEEGIKELGSQILKEHPVENTQLQNEKLYLYYLQNGRDMYVDQELDINRLSDYDVDHIVPQSFLKDDSIDNKVLTRSDKARGKSDNVPSEEVVKKMKNYWRQLLNAKLITQRKFDNLTKAERGGLSELDKAGFIKRQLVETRQITKHVAQILDSRMNTKYDENDKLIREVKVITLKSKLVSDFRKDFQFYKVREINNYHHAHDAYLNAVVGTALIKKYPKLESEFVYGDYKVYDVRKMIAKSEQEIGKATAKYFFYSNIMNFFKTEITLANGEIRKRPLIETNGETGEIVWDKGRDFATVRKVLSMPQVNIVKKTEVQTGGFSKESILPKRNSDKLIARKKDWDPKKYGGFDSPTVAYSVLVVAKVEKGKSKKLKSVKELLGITIMERSSFEKNPIDFLEAKGYKEVKKDLIIKLPKYSLFELENGRKRMLASAGELQKGNELALPSKYVNFLYLASHYEKLKGSPEDNEQKQLFVEQHKHYLDEIIEQISEFSKRVILADANLDKVLSAYNKHRDKPIREQAENIIHLFTLTNLGAPAAFKYFDTTIDRKRYTSTKEVLDATLIHQSITGLYETRIDLSQLGGDGGEAAAKEAAAKEAAAKEAAAKGGIPWLMKKPLQLTTLVPLQEYEERLLKQTMLTGSYKEKLQSLFLKYDALWQHWENQVGHRRIKPHHIATGTVNPRPQKQYPINPKAKASIQTVINDLLKQGVLIQQNSIMNTPVYPVPKPDGKWRMVLDYREVNKTIPLIAAQNQHSAGILSSIFRGKYKTTLDLSNGFWAHSITPESYWLTAFTWLGQQYCWTRLPQGFLNSPALFTADVVDLLKEVPNVQVYVDDIYISHDDPREHLEQLEKVFSLLLNAGYVVSLKKSEIAQHEVEFLGFNITKEGRGLTETFKQKLLNITPPRDLKQLQSILGLLNFARNFIPNFSELVKPLYNIIATANGKYITWTTDNSQQLQNIISMLNSAENLEERNPEVRLIMKVNTSPSAGYIRFYNEFAKRPIMYLNYVYTKAEVKFTNTEKLLTTIHKGLIKALDLGMGQEILVYSPIVSMTKIQKTPLPERKALPIRWITWMSYLEDPRIQFHYDKTLPELQQVPTVTDDIIAKIKHPSEFSMVFYTDGSAIKHPNVNKSHNAGMGIAQVQFKPEFTVINTWSIPLGDHTAQLAEVAAVEFACKKALKIDGPVLIVTDSFYVAESVNKELPYWQSNGFFNNKKKPLKHVSKWKSIADCIQLKPDIIIIHEKGHQPTASTFHTEGNNLADKLATQGSYVVNAGKRTADGSEFEKRTADGSEFESPKKKAKVE

SEQ ID NO: 526 - protein, 2087 aa, synthetic construct
MPAAKRVKLDGGDKKYSIGLDIGTNSVGWAVITDEYKVPSKKFKVLGNTDRHSIKKNLIGALLFDSGETAEATRLKRTARRRYTRRKNRICYLQEIFSNEMAKVDDSFFHRLEESFLVEEDKKHERHPIFGNIVDEVAYHEKYPTIYHLRKKLVDSTDKADLRLIYLALAHMIKFRGHFLIEGDLNPDNSDVDKLFIQLVQTYNQLFEENPINASGVDAKAILSARLSKSRRLENLIAQLPGEKKNGLFGNLIALSLGLTPNFKSNFDLAEDAKLQLSKDTYDDDLDNLLAQIGDQYADLFLAAKNLSDAILLSDILRVNTEITKAPLSASMIKRYDEHHQDLTLLKALVRQQLPEKYKEIFFDQSKNGYAGYIDGGASQEEFYKFIKPILEKMDGTEELLVKLNREDLLRKQRTFDNGSIPHQIHLGELHAILRRQEDFYPFLKDNREKIEKILTFRIPYYVGPLARGNSRFAWMTRKSEETITPWNFEEVVDKGASAQSFIERMTNFDKNLPNEKVLPKHSLLYEYFTVYNELTKVKYVTEGMRKPAFLSGEQKKAIVDLLFKTNRKVTVKQLKEDYFKKIECFDSVEISGVEDRFNASLGTYHDLLKIIKDKDFLDNEENEDILEDIVLTLTLFEDREMIEERLKTYAHLFDDKVMKQLKRRRYTGWGRLSRKLINGIRDKQSGKTILDFLKSDGFANRNFMQLIHDDSLTFKEDIQKAQVSGQGDSLHEHIANLAGSPAIKKGILQTVKVVDELVKVMGRHKPENIVIEMARENQTTQKGQKNSRERMKRIEEGIKELGSQILKEHPVENTQLQNEKLYLYYLQNGRDMYVDQELDINRLSDYDVDHIVPQSFLKDDSIDNKVLTRSDKARGKSDNVPSEEVVKKMKNYWRQLLNAKLITQRKFDNLTKAERGGLSELDKAGFIKRQLVETRQITKHVAQILDSRMNTKYDENDKLIREVKVITLKSKLVSDFRKDFQFYKVREINNYHHAHDAYLNAVVGTALIKKYPKLESEFVYGDYKVYDVRKMIAKSEQEIGKATAKYFFYSNIMNFFKTEITLANGEIRKRPLIETNGETGEIVWDKGRDFATVRKVLSMPQVNIVKKTEVQTGGFSKESILPKRNSDKLIARKKDWDPKKYGGFDSPTVAYSVLVVAKVEKGKSKKLKSVKELLGITIMERSSFEKNPIDFLEAKGYKEVKKDLIIKLPKYSLFELENGRKRMLASAGELQKGNELALPSKYVNFLYLASHYEKLKGSPEDNEQKQLFVEQHKHYLDEIIEQISEFSKRVILADANLDKVLSAYNKHRDKPIREQAENIIHLFTLTNLGAPAAFKYFDTTIDRKRYTSTKEVLDATLIHQSITGLYETRIDLSQLGGDGGGGSEAAAKPAPGGIPWLMKKPLQLTTLVPLQEYEERLLKQTMLTGSYKEKLQSLFLKYDALWQHWENQVGHRRIKPHHIATGTVNPRPQKQYPINPKAKASIQTVINDLLKQGVLIQQNSIMNTPVYPVPKPDGKWRMVLDYREVNKTIPLIAAQNQHSAGILSSIFRGKYKTTLDLSNGFWAHSITPESYWLTAFTWLGQQYCWTRLPQGFLNSPALFTADVVDLLKEVPNVQVYVDDIYISHDDPREHLEQLEKVFSLLLNAGYVVSLKKSEIAQHEVEFLGFNITKEGRGLTETFKQKLLNITPPRDLKQLQSILGLLNFARNFIPNFSELVKPLYNIIATANGKYITWTTDNSQQLQNIISMLNSAENLEERNPEVRLIMKVNTSPSAGYIRFYNEFAKRPIMYLNYVYTKAEVKFTNTEKLLTTIHKGLIKALDLGMGQEILVYSPIVSMTKIQKTPLPERKALPIRWITWMSYLEDPRIQFHYDKTLPELQQVPTVTDDIIAKIKHPSEFSMVFYTDGSAIKHPNVNKSHNAGMGIAQVQFKPEFTVINTWSIPLGDHTAQLAEVAAVEFACKKALKIDGPVLIVTDSFYVAESVNKELPYWQSNGFFNNKKKPLKHVSKWKSIADCIQLKPDIIIIHEKGHQPTASTFHTEGNNLADKLATQGSYVVNAGKRTADGSEFEKRTADGSEFESPKKKAKVE

SEQ ID NO: 527 - protein, 2109 aa, synthetic construct
MPAAKRVKLDGGDKKYSIGLDIGTNSVGWAVITDEYKVPSKKFKVLGNTDRHSIKKNLIGALLFDSGETAEATRLKRTARRRYTRRKNRICYLQEIFSNEMAKVDDSFFHRLEESFLVEEDKKHERHPIFGNIVDEVAYHEKYPTIYHLRKKLVDSTDKADLRLIYLALAHMIKFRGHFLIEGDLNPDNSDVDKLFIQLVQTYNQLFEENPINASGVDAKAILSARLSKSRRLENLIAQLPGEKKNGLFGNLIALSLGLTPNFKSNFDLAEDAKLQLSKDTYDDDLDNLLAQIGDQYADLFLAAKNLSDAILLSDILRVNTEITKAPLSASMIKRYDEHHQDLTLLKALVRQQLPEKYKEIFFDQSKNGYAGYIDGGASQEEFYKFIKPILEKMDGTEELLVKLNREDLLRKQRTFDNGSIPHQIHLGELHAILRRQEDFYPFLKDNREKIEKILTFRIPYYVGPLARGNSRFAWMTRKSEETITPWNFEEVVDKGASAQSFIERMTNFDKNLPNEKVLPKHSLLYEYFTVYNELTKVKYVTEGMRKPAFLSGEQKKAIVDLLFKTNRKVTVKQLKEDYFKKIECFDSVEISGVEDRFNASLGTYHDLLKIIKDKDFLDNEENEDILEDIVLTLTLFEDREMIEERLKTYAHLFDDKVMKQLKRRRYTGWGRLSRKLINGIRDKQSGKTILDFLKSDGFANRNFMQLIHDDSLTFKEDIQKAQVSGQGDSLHEHIANLAGSPAIKKGILQTVKVVDELVKVMGRHKPENIVIEMARENQTTQKGQKNSRERMKRIEEGIKELGSQILKEHPVENTQLQNEKLYLYYLQNGRDMYVDQELDINRLSDYDVDHIVPQSFLKDDSIDNKVLTRSDKARGKSDNVPSEEVVKKMKNYWRQLLNAKLITQRKFDNLTKAERGGLSELDKAGFIKRQLVETRQITKHVAQILDSRMNTKYDENDKLIREVKVITLKSKLVSDFRKDFQFYKVREINNYHHAHDAYLNAVVGTALIKKYPKLESEFVYGDYKVYDVRKMIAKSEQEIGKATAKYFFYSNIMNFFKTEITLANGEIRKRPLIETNGETGEIVWDKGRDFATVRKVLSMPQVNIVKKTEVQTGGFSKESILPKRNSDKLIARKKDWDPKKYGGFDSPTVAYSVLVVAKVEKGKSKKLKSVKELLGITIMERSSFEKNPIDFLEAKGYKEVKKDLIIKLPKYSLFELENGRKRMLASAGELQKGNELALPSKYVNFLYLASHYEKLKGSPEDNEQKQLFVEQHKHYLDEIIEQISEFSKRVILADANLDKVLSAYNKHRDKPIREQAENIIHLFTLTNLGAPAAFKYFDTTIDRKRYTSTKEVLDATLIHQSITGLYETRIDLSQLGGDGGSGGSSGGSSGSETPGTSESATPESSGGSSGGSSGGIPWLMKKPLQLTTLVPLQEYEERLLKQTMLTGSYKEKLQSLFLKYDALWQHWENQVGHRRIKPHHIATGTVNPRPQKQYPINPKAKASIQTVINDLLKQGVLIQQNSIMNTPVYPVPKPDGKWRMVLDYREVNKTIPLIAAQNQHSAGILSSIFRGKYKTTLDLSNGFWAHSITPESYWLTAFTWLGQQYCWTRLPQGFLNSPALFTADVVDLLKEVPNVQVYVDDIYISHDDPREHLEQLEKVFSLLLNAGYVVSLKKSEIAQHEVEFLGFNITKEGRGLTETFKQKLLNITPPRDLKQLQSILGLLNFARNFIPNFSELVKPLYNIIATANGKYITWTTDNSQQLQNIISMLNSAENLEERNPEVRLIMKVNTSPSAGYIRFYNEFAKRPIMYLNYVYTKAEVKFTNTEKLLTTIHKGLIKALDLGMGQEILVYSPIVSMTKIQKTPLPERKALPIRWITWMSYLEDPRIQFHYDKTLPELQQVPTVTDDIIAKIKHPSEFSMVFYTDGSAIKHPNVNKSHNAGMGIAQVQFKPEFTVINTWSIPLGDHTAQLAEVAAVEFACKKALKIDGPVLIVTDSFYVAESVNKELPYWQSNGFFNNKKKPLKHVSKWKSIADCIQLKPDIIIIHEKGHQPTASTFHTEGNNLADKLATQGSYVVNAGKRTADGSEFEKRTADGSEFESPKKKAKVE

SEQ ID NO: 528 - protein, 2106 aa, synthetic construct
MPAAKRVKLDGGDKKYSIGLDIGTNSVGWAVITDEYKVPSKKFKVLGNTDRHSIKKNLIGALLFDSGETAEATRLKRTARRRYTRRKNRICYLQEIFSNEMAKVDDSFFHRLEESFLVEEDKKHERHPIFGNIVDEVAYHEKYPTIYHLRKKLVDSTDKADLRLIYLALAHMIKFRGHFLIEGDLNPDNSDVDKLFIQLVQTYNQLFEENPINASGVDAKAILSARLSKSRRLENLIAQLPGEKKNGLFGNLIALSLGLTPNFKSNFDLAEDAKLQLSKDTYDDDLDNLLAQIGDQYADLFLAAKNLSDAILLSDILRVNTEITKAPLSASMIKRYDEHHQDLTLLKALVRQQLPEKYKEIFFDQSKNGYAGYIDGGASQEEFYKFIKPILEKMDGTEELLVKLNREDLLRKQRTFDNGSIPHQIHLGELHAILRRQEDFYPFLKDNREKIEKILTFRIPYYVGPLARGNSRFAWMTRKSEETITPWNFEEVVDKGASAQSFIERMTNFDKNLPNEKVLPKHSLLYEYFTVYNELTKVKYVTEGMRKPAFLSGEQKKAIVDLLFKTNRKVTVKQLKEDYFKKIECFDSVEISGVEDRFNASLGTYHDLLKIIKDKDFLDNEENEDILEDIVLTLTLFEDREMIEERLKTYAHLFDDKVMKQLKRRRYTGWGRLSRKLINGIRDKQSGKTILDFLKSDGFANRNFMQLIHDDSLTFKEDIQKAQVSGQGDSLHEHIANLAGSPAIKKGILQTVKVVDELVKVMGRHKPENIVIEMARENQTTQKGQKNSRERMKRIEEGIKELGSQILKEHPVENTQLQNEKLYLYYLQNGRDMYVDQELDINRLSDYDVDHIVPQSFLKDDSIDNKVLTRSDKARGKSDNVPSEEVVKKMKNYWRQLLNAKLITQRKFDNLTKAERGGLSELDKAGFIKRQLVETRQITKHVAQILDSRMNTKYDENDKLIREVKVITLKSKLVSDFRKDFQFYKVREINNYHHAHDAYLNAVVGTALIKKYPKLESEFVYGDYKVYDVRKMIAKSEQEIGKATAKYFFYSNIMNFFKTEITLANGEIRKRPLIETNGETGEIVWDKGRDFATVRKVLSMPQVNIVKKTEVQTGGFSKESILPKRNSDKLIARKKDWDPKKYGGFDSPTVAYSVLVVAKVEKGKSKKLKSVKELLGITIMERSSFEKNPIDFLEAKGYKEVKKDLIIKLPKYSLFELENGRKRMLASAGELQKGNELALPSKYVNFLYLASHYEKLKGSPEDNEQKQLFVEQHKHYLDEIIEQISEFSKRVILADANLDKVLSAYNKHRDKPIREQAENIIHLFTLTNLGAPAAFKYFDTTIDRKRYTSTKEVLDATLIHQSITGLYETRIDLSQLGGDGGGGGGSGGGGSGGGGSGGGGSGGGGSGGGGSGGIPWLMKKPLQLTTLVPLQEYEERLLKQTMLTGSYKEKLQSLFLKYDALWQHWENQVGHRRIKPHHIATGTVNPRPQKQYPINPKAKASIQTVINDLLKQGVLIQQNSIMNTPVYPVPKPDGKWRMVLDYREVNKTIPLIAAQNQHSAGILSSIFRGKYKTTLDLSNGFWAHSITPESYWLTAFTWLGQQYCWTRLPQGFLNSPALFTADVVDLLKEVPNVQVYVDDIYISHDDPREHLEQLEKVFSLLLNAGYVVSLKKSEIAQHEVEFLGFNITKEGRGLTETFKQKLLNITPPRDLKQLQSILGLLNFARNFIPNFSELVKPLYNIIATANGKYITWTTDNSQQLQNIISMLNSAENLEERNPEVRLIMKVNTSPSAGYIRFYNEFAKRPIMYLNYVYTKAEVKFTNTEKLLTTIHKGLIKALDLGMGQEILVYSPIVSMTKIQKTPLPERKALPIRWITWMSYLEDPRIQFHYDKTLPELQQVPTVTDDIIAKIKHPSEFSMVFYTDGSAIKHPNVNKSHNAGMGIAQVQFKPEFTVINTWSIPLGDHTAQLAEVAAVEFACKKALKIDGPVLIVTDSFYVAESVNKELPYWQSNGFFNNKKKPLKHVSKWKSIADCIQLKPDIIIIHEKGHQPTASTFHTEGNNLADKLATQGSYVVNAGKRTADGSEFEKRTADGSEFESPKKKAKVE

SEQ ID NO: 529 - protein, 2082 aa, synthetic construct
MPAAKRVKLDGGDKKYSIGLDIGTNSVGWAVITDEYKVPSKKFKVLGNTDRHSIKKNLIGALLFDSGETAEATRLKRTARRRYTRRKNRICYLQEIFSNEMAKVDDSFFHRLEESFLVEEDKKHERHPIFGNIVDEVAYHEKYPTIYHLRKKLVDSTDKADLRLIYLALAHMIKFRGHFLIEGDLNPDNSDVDKLFIQLVQTYNQLFEENPINASGVDAKAILSARLSKSRRLENLIAQLPGEKKNGLFGNLIALSLGLTPNFKSNFDLAEDAKLQLSKDTYDDDLDNLLAQIGDQYADLFLAAKNLSDAILLSDILRVNTEITKAPLSASMIKRYDEHHQDLTLLKALVRQQLPEKYKEIFFDQSKNGYAGYIDGGASQEEFYKFIKPILEKMDGTEELLVKLNREDLLRKQRTFDNGSIPHQIHLGELHAILRRQEDFYPFLKDNREKIEKILTFRIPYYVGPLARGNSRFAWMTRKSEETITPWNFEEVVDKGASAQSFIERMTNFDKNLPNEKVLPKHSLLYEYFTVYNELTKVKYVTEGMRKPAFLSGEQKKAIVDLLFKTNRKVTVKQLKEDYFKKIECFDSVEISGVEDRFNASLGTYHDLLKIIKDKDFLDNEENEDILEDIVLTLTLFEDREMIEERLKTYAHLFDDKVMKQLKRRRYTGWGRLSRKLINGIRDKQSGKTILDFLKSDGFANRNFMQLIHDDSLTFKEDIQKAQVSGQGDSLHEHIANLAGSPAIKKGILQTVKVVDELVKVMGRHKPENIVIEMARENQTTQKGQKNSRERMKRIEEGIKELGSQILKEHPVENTQLQNEKLYLYYLQNGRDMYVDQELDINRLSDYDVDHIVPQSFLKDDSIDNKVLTRSDKARGKSDNVPSEEVVKKMKNYWRQLLNAKLITQRKFDNLTKAERGGLSELDKAGFIKRQLVETRQITKHVAQILDSRMNTKYDENDKLIREVKVITLKSKLVSDFRKDFQFYKVREINNYHHAHDAYLNAVVGTALIKKYPKLESEFVYGDYKVYDVRKMIAKSEQEIGKATAKYFFYSNIMNFFKTEITLANGEIRKRPLIETNGETGEIVWDKGRDFATVRKVLSMPQVNIVKKTEVQTGGFSKESILPKRNSDKLIARKKDWDPKKYGGFDSPTVAYSVLVVAKVEKGKSKKLKSVKELLGITIMERSSFEKNPIDFLEAKGYKEVKKDLIIKLPKYSLFELENGRKRMLASAGELQKGNELALPSKYVNFLYLASHYEKLKGSPEDNEQKQLFVEQHKHYLDEIIEQISEFSKRVILADANLDKVLSAYNKHRDKPIREQAENIIHLFTLTNLGAPAAFKYFDTTIDRKRYTSTKEVLDATLIHQSITGLYETRIDLSQLGGDGGGGGGGGGGIPWLMKKPLQLTTLVPLQEYEERLLKQTMLTGSYKEKLQSLFLKYDALWQHWENQVGHRRIKPHHIATGTVNPRPQKQYPINPKAKASIQTVINDLLKQGVLIQQNSIMNTPVYPVPKPDGKWRMVLDYREVNKTIPLIAAQNQHSAGILSSIFRGKYKTTLDLSNGFWAHSITPESYWLTAFTWLGQQYCWTRLPQGFLNSPALFTADVVDLLKEVPNVQVYVDDIYISHDDPREHLEQLEKVFSLLLNAGYVVSLKKSEIAQHEVEFLGFNITKEGRGLTETFKQKLLNITPPRDLKQLQSILGLLNFARNFIPNFSELVKPLYNIIATANGKYITWTTDNSQQLQNIISMLNSAENLEERNPEVRLIMKVNTSPSAGYIRFYNEFAKRPIMYLNYVYTKAEVKFTNTEKLLTTIHKGLIKALDLGMGQEILVYSPIVSMTKIQKTPLPERKALPIRWITWMSYLEDPRIQFHYDKTLPELQQVPTVTDDIIAKIKHPSEFSMVFYTDGSAIKHPNVNKSHNAGMGIAQVQFKPEFTVINTWSIPLGDHTAQLAEVAAVEFACKKALKIDGPVLIVTDSFYVAESVNKELPYWQSNGFFNNKKKPLKHVSKWKSIADCIQLKPDIIIIHEKGHQPTASTFHTEGNNLADKLATQGSYVVNAGKRTADGSEFEKRTADGSEFESPKKKAKVE

SEQ ID NO: 530 - protein, 2087 aa, synthetic construct
MPAAKRVKLDGGDKKYSIGLDIGTNSVGWAVITDEYKVPSKKFKVLGNTDRHSIKKNLIGALLFDSGETAEATRLKRTARRRYTRRKNRICYLQEIFSNEMAKVDDSFFHRLEESFLVEEDKKHERHPIFGNIVDEVAYHEKYPTIYHLRKKLVDSTDKADLRLIYLALAHMIKFRGHFLIEGDLNPDNSDVDKLFIQLVQTYNQLFEENPINASGVDAKAILSARLSKSRRLENLIAQLPGEKKNGLFGNLIALSLGLTPNFKSNFDLAEDAKLQLSKDTYDDDLDNLLAQIGDQYADLFLAAKNLSDAILLSDILRVNTEITKAPLSASMIKRYDEHHQDLTLLKALVRQQLPEKYKEIFFDQSKNGYAGYIDGGASQEEFYKFIKPILEKMDGTEELLVKLNREDLLRKQRTFDNGSIPHQIHLGELHAILRRQEDFYPFLKDNREKIEKILTFRIPYYVGPLARGNSRFAWMTRKSEETITPWNFEEVVDKGASAQSFIERMTNFDKNLPNEKVLPKHSLLYEYFTVYNELTKVKYVTEGMRKPAFLSGEQKKAIVDLLFKTNRKVTVKQLKEDYFKKIECFDSVEISGVEDRFNASLGTYHDLLKIIKDKDFLDNEENEDILEDIVLTLTLFEDREMIEERLKTYAHLFDDKVMKQLKRRRYTGWGRLSRKLINGIRDKQSGKTILDFLKSDGFANRNFMQLIHDDSLTFKEDIQKAQVSGQGDSLHEHIANLAGSPAIKKGILQTVKVVDELVKVMGRHKPENIVIEMARENQTTQKGQKNSRERMKRIEEGIKELGSQILKEHPVENTQLQNEKLYLYYLQNGRDMYVDQELDINRLSDYDVDHIVPQSFLKDDSIDNKVLTRSDKARGKSDNVPSEEVVKKMKNYWRQLLNAKLITQRKFDNLTKAERGGLSELDKAGFIKRQLVETRQITKHVAQILDSRMNTKYDENDKLIREVKVITLKSKLVSDFRKDFQFYKVREINNYHHAHDAYLNAVVGTALIKKYPKLESEFVYGDYKVYDVRKMIAKSEQEIGKATAKYFFYSNIMNFFKTEITLANGEIRKRPLIETNGETGEIVWDKGRDFATVRKVLSMPQVNIVKKTEVQTGGFSKESILPKRNSDKLIARKKDWDPKKYGGFDSPTVAYSVLVVAKVEKGKSKKLKSVKELLGITIMERSSFEKNPIDFLEAKGYKEVKKDLIIKLPKYSLFELENGRKRMLASAGELQKGNELALPSKYVNFLYLASHYEKLKGSPEDNEQKQLFVEQHKHYLDEIIEQISEFSKRVILADANLDKVLSAYNKHRDKPIREQAENIIHLFTLTNLGAPAAFKYFDTTIDRKRYTSTKEVLDATLIHQSITGLYETRIDLSQLGGDGGGSSGGGEAAAKGGIPWLMKKPLQLTTLVPLQEYEERLLKQTMLTGSYKEKLQSLFLKYDALWQHWENQVGHRRIKPHHIATGTVNPRPQKQYPINPKAKASIQTVINDLLKQGVLIQQNSIMNTPVYPVPKPDGKWRMVLDYREVNKTIPLIAAQNQHSAGILSSIFRGKYKTTLDLSNGFWAHSITPESYWLTAFTWLGQQYCWTRLPQGFLNSPALFTADVVDLLKEVPNVQVYVDDIYISHDDPREHLEQLEKVFSLLLNAGYVVSLKKSEIAQHEVEFLGFNITKEGRGLTETFKQKLLNITPPRDLKQLQSILGLLNFARNFIPNFSELVKPLYNIIATANGKYITWTTDNSQQLQNIISMLNSAENLEERNPEVRLIMKVNTSPSAGYIRFYNEFAKRPIMYLNYVYTKAEVKFTNTEKLLTTIHKGLIKALDLGMGQEILVYSPIVSMTKIQKTPLPERKALPIRWITWMSYLEDPRIQFHYDKTLPELQQVPTVTDDIIAKIKHPSEFSMVFYTDGSAIKHPNVNKSHNAGMGIAQVQFKPEFTVINTWSIPLGDHTAQLAEVAAVEFACKKALKIDGPVLIVTDSFYVAESVNKELPYWQSNGFFNNKKKPLKHVSKWKSIADCIQLKPDIIIIHEKGHQPTASTFHTEGNNLADKLATQGSYVVNAGKRTADGSEFEKRTADGSEFESPKKKAKVE

SEQ ID NO: 531 - protein, 2082 aa, synthetic construct
MPAAKRVKLDGGDKKYSIGLDIGTNSVGWAVITDEYKVPSKKFKVLGNTDRHSIKKNLIGALLFDSGETAEATRLKRTARRRYTRRKNRICYLQEIFSNEMAKVDDSFFHRLEESFLVEEDKKHERHPIFGNIVDEVAYHEKYPTIYHLRKKLVDSTDKADLRLIYLALAHMIKFRGHFLIEGDLNPDNSDVDKLFIQLVQTYNQLFEENPINASGVDAKAILSARLSKSRRLENLIAQLPGEKKNGLFGNLIALSLGLTPNFKSNFDLAEDAKLQLSKDTYDDDLDNLLAQIGDQYADLFLAAKNLSDAILLSDILRVNTEITKAPLSASMIKRYDEHHQDLTLLKALVRQQLPEKYKEIFFDQSKNGYAGYIDGGASQEEFYKFIKPILEKMDGTEELLVKLNREDLLRKQRTFDNGSIPHQIHLGELHAILRRQEDFYPFLKDNREKIEKILTFRIPYYVGPLARGNSRFAWMTRKSEETITPWNFEEVVDKGASAQSFIERMTNFDKNLPNEKVLPKHSLLYEYFTVYNELTKVKYVTEGMRKPAFLSGEQKKAIVDLLFKTNRKVTVKQLKEDYFKKIECFDSVEISGVEDRFNASLGTYHDLLKIIKDKDFLDNEENEDILEDIVLTLTLFEDREMIEERLKTYAHLFDDKVMKQLKRRRYTGWGRLSRKLINGIRDKQSGKTILDFLKSDGFANRNFMQLIHDDSLTFKEDIQKAQVSGQGDSLHEHIANLAGSPAIKKGILQTVKVVDELVKVMGRHKPENIVIEMARENQTTQKGQKNSRERMKRIEEGIKELGSQILKEHPVENTQLQNEKLYLYYLQNGRDMYVDQELDINRLSDYDVDHIVPQSFLKDDSIDNKVLTRSDKARGKSDNVPSEEVVKKMKNYWRQLLNAKLITQRKFDNLTKAERGGLSELDKAGFIKRQLVETRQITKHVAQILDSRMNTKYDENDKLIREVKVITLKSKLVSDFRKDFQFYKVREINNYHHAHDAYLNAVVGTALIKKYPKLESEFVYGDYKVYDVRKMIAKSEQEIGKATAKYFFYSNIMNFFKTEITLANGEIRKRPLIETNGETGEIVWDKGRDFATVRKVLSMPQVNIVKKTEVQTGGFSKESILPKRNSDKLIARKKDWDPKKYGGFDSPTVAYSVLVVAKVEKGKSKKLKSVKELLGITIMERSSFEKNPIDFLEAKGYKEVKKDLIIKLPKYSLFELENGRKRMLASAGELQKGNELALPSKYVNFLYLASHYEKLKGSPEDNEQKQLFVEQHKHYLDEIIEQISEFSKRVILADANLDKVLSAYNKHRDKPIREQAENIIHLFTLTNLGAPAAFKYFDTTIDRKRYTSTKEVLDATLIHQSITGLYETRIDLSQLGGDGGGGSGGSGGIPWLMKKPLQLTTLVPLQEYEERLLKQTMLTGSYKEKLQSLFLKYDALWQHWENQVGHRRIKPHHIATGTVNPRPQKQYPINPKAKASIQTVINDLLKQGVLIQQNSIMNTPVYPVPKPDGKWRMVLDYREVNKTIPLIAAQNQHSAGILSSIFRGKYKTTLDLSNGFWAHSITPESYWLTAFTWLGQQYCWTRLPQGFLNSPALFTADVVDLLKEVPNVQVYVDDIYISHDDPREHLEQLEKVFSLLLNAGYVVSLKKSEIAQHEVEFLGFNITKEGRGLTETFKQKLLNITPPRDLKQLQSILGLLNFARNFIPNFSELVKPLYNIIATANGKYITWTTDNSQQLQNIISMLNSAENLEERNPEVRLIMKVNTSPSAGYIRFYNEFAKRPIMYLNYVYTKAEVKFTNTEKLLTTIHKGLIKALDLGMGQEILVYSPIVSMTKIQKTPLPERKALPIRWITWMSYLEDPRIQFHYDKTLPELQQVPTVTDDIIAKIKHPSEFSMVFYTDGSAIKHPNVNKSHNAGMGIAQVQFKPEFTVINTWSIPLGDHTAQLAEVAAVEFACKKALKIDGPVLIVTDSFYVAESVNKELPYWQSNGFFNNKKKPLKHVSKWKSIADCIQLKPDIIIIHEKGHQPTASTFHTEGNNLADKLATQGSYVVNAGKRTADGSEFEKRTADGSEFESPKKKAKVE

SEQ ID NO: 532 - protein, 2085 aa, synthetic construct
MPAAKRVKLDGGDKKYSIGLDIGTNSVGWAVITDEYKVPSKKFKVLGNTDRHSIKKNLIGALLFDSGETAEATRLKRTARRRYTRRKNRICYLQEIFSNEMAKVDDSFFHRLEESFLVEEDKKHERHPIFGNIVDEVAYHEKYPTIYHLRKKLVDSTDKADLRLIYLALAHMIKFRGHFLIEGDLNPDNSDVDKLFIQLVQTYNQLFEENPINASGVDAKAILSARLSKSRRLENLIAQLPGEKKNGLFGNLIALSLGLTPNFKSNFDLAEDAKLQLSKDTYDDDLDNLLAQIGDQYADLFLAAKNLSDAILLSDILRVNTEITKAPLSASMIKRYDEHHQDLTLLKALVRQQLPEKYKEIFFDQSKNGYAGYIDGGASQEEFYKFIKPILEKMDGTEELLVKLNREDLLRKQRTFDNGSIPHQIHLGELHAILRRQEDFYPFLKDNREKIEKILTFRIPYYVGPLARGNSRFAWMTRKSEETITPWNFEEVVDKGASAQSFIERMTNFDKNLPNEKVLPKHSLLYEYFTVYNELTKVKYVTEGMRKPAFLSGEQKKAIVDLLFKTNRKVTVKQLKEDYFKKIECFDSVEISGVEDRFNASLGTYHDLLKIIKDKDFLDNEENEDILEDIVLTLTLFEDREMIEERLKTYAHLFDDKVMKQLKRRRYTGWGRLSRKLINGIRDKQSGKTILDFLKSDGFANRNFMQLIHDDSLTFKEDIQKAQVSGQGDSLHEHIANLAGSPAIKKGILQTVKVVDELVKVMGRHKPENIVIEMARENQTTQKGQKNSRERMKRIEEGIKELGSQILKEHPVENTQLQNEKLYLYYLQNGRDMYVDQELDINRLSDYDVDHIVPQSFLKDDSIDNKVLTRSDKARGKSDNVPSEEVVKKMKNYWRQLLNAKLITQRKFDNLTKAERGGLSELDKAGFIKRQLVETRQITKHVAQILDSRMNTKYDENDKLIREVKVITLKSKLVSDFRKDFQFYKVREINNYHHAHDAYLNAVVGTALIKKYPKLESEFVYGDYKVYDVRKMIAKSEQEIGKATAKYFFYSNIMNFFKTEITLANGEIRKRPLIETNGETGEIVWDKGRDFATVRKVLSMPQVNIVKKTEVQTGGFSKESILPKRNSDKLIARKKDWDPKKYGGFDSPTVAYSVLVVAKVEKGKSKKLKSVKELLGITIMERSSFEKNPIDFLEAKGYKEVKKDLIIKLPKYSLFELENGRKRMLASAGELQKGNELALPSKYVNFLYLASHYEKLKGSPEDNEQKQLFVEQHKHYLDEIIEQISEFSKRVILADANLDKVLSAYNKHRDKPIREQAENIIHLFTLTNLGAPAAFKYFDTTIDRKRYTSTKEVLDATLIHQSITGLYETRIDLSQLGGDGGPAPGGGGGSGGIPWLMKKPLQLTTLVPLQEYEERLLKQTMLTGSYKEKLQSLFLKYDALWQHWENQVGHRRIKPHHIATGTVNPRPQKQYPINPKAKASIQTVINDLLKQGVLIQQNSIMNTPVYPVPKPDGKWRMVLDYREVNKTIPLIAAQNQHSAGILSSIFRGKYKTTLDLSNGFWAHSITPESYWLTAFTWLGQQYCWTRLPQGFLNSPALFTADVVDLLKEVPNVQVYVDDIYISHDDPREHLEQLEKVFSLLLNAGYVVSLKKSEIAQHEVEFLGFNITKEGRGLTETFKQKLLNITPPRDLKQLQSILGLLNFARNFIPNFSELVKPLYNIIATANGKYITWTTDNSQQLQNIISMLNSAENLEERNPEVRLIMKVNTSPSAGYIRFYNEFAKRPIMYLNYVYTKAEVKFTNTEKLLTTIHKGLIKALDLGMGQEILVYSPIVSMTKIQKTPLPERKALPIRWITWMSYLEDPRIQFHYDKTLPELQQVPTVTDDIIAKIKHPSEFSMVFYTDGSAIKHPNVNKSHNAGMGIAQVQFKPEFTVINTWSIPLGDHTAQLAEVAAVEFACKKALKIDGPVLIVTDSFYVAESVNKELPYWQSNGFFNNKKKPLKHVSKWKSIADCIQLKPDIIIIHEKGHQPTASTFHTEGNNLADKLATQGSYVVNAGKRTADGSEFEKRTADGSEFESPKKKAKVE

SEQ ID NO: 533 - protein, 2087 aa, synthetic construct
MPAAKRVKLDGGDKKYSIGLDIGTNSVGWAVITDEYKVPSKKFKVLGNTDRHSIKKNLIGALLFDSGETAEATRLKRTARRRYTRRKNRICYLQEIFSNEMAKVDDSFFHRLEESFLVEEDKKHERHPIFGNIVDEVAYHEKYPTIYHLRKKLVDSTDKADLRLIYLALAHMIKFRGHFLIEGDLNPDNSDVDKLFIQLVQTYNQLFEENPINASGVDAKAILSARLSKSRRLENLIAQLPGEKKNGLFGNLIALSLGLTPNFKSNFDLAEDAKLQLSKDTYDDDLDNLLAQIGDQYADLFLAAKNLSDAILLSDILRVNTEITKAPLSASMIKRYDEHHQDLTLLKALVRQQLPEKYKEIFFDQSKNGYAGYIDGGASQEEFYKFIKPILEKMDGTEELLVKLNREDLLRKQRTFDNGSIPHQIHLGELHAILRRQEDFYPFLKDNREKIEKILTFRIPYYVGPLARGNSRFAWMTRKSEETITPWNFEEVVDKGASAQSFIERMTNFDKNLPNEKVLPKHSLLYEYFTVYNELTKVKYVTEGMRKPAFLSGEQKKAIVDLLFKTNRKVTVKQLKEDYFKKIECFDSVEISGVEDRFNASLGTYHDLLKIIKDKDFLDNEENEDILEDIVLTLTLFEDREMIEERLKTYAHLFDDKVMKQLKRRRYTGWGRLSRKLINGIRDKQSGKTILDFLKSDGFANRNFMQLIHDDSLTFKEDIQKAQVSGQGDSLHEHIANLAGSPAIKKGILQTVKVVDELVKVMGRHKPENIVIEMARENQTTQKGQKNSRERMKRIEEGIKELGSQILKEHPVENTQLQNEKLYLYYLQNGRDMYVDQELDINRLSDYDVDHIVPQSFLKDDSIDNKVLTRSDKARGKSDNVPSEEVVKKMKNYWRQLLNAKLITQRKFDNLTKAERGGLSELDKAGFIKRQLVETRQITKHVAQILDSRMNTKYDENDKLIREVKVITLKSKLVSDFRKDFQFYKVREINNYHHAHDAYLNAVVGTALIKKYPKLESEFVYGDYKVYDVRKMIAKSEQEIGKATAKYFFYSNIMNFFKTEITLANGEIRKRPLIETNGETGEIVWDKGRDFATVRKVLSMPQVNIVKKTEVQTGGFSKESILPKRNSDKLIARKKDWDPKKYGGFDSPTVAYSVLVVAKVEKGKSKKLKSVKELLGITIMERSSFEKNPIDFLEAKGYKEVKKDLIIKLPKYSLFELENGRKRMLASAGELQKGNELALPSKYVNFLYLASHYEKLKGSPEDNEQKQLFVEQHKHYLDEIIEQISEFSKRVILADANLDKVLSAYNKHRDKPIREQAENIIHLFTLTNLGAPAAFKYFDTTIDRKRYTSTKEVLDATLIHQSITGLYETRIDLSQLGGDGGGGSGGGEAAAKGGIPWLMKKPLQLTTLVPLQEYEERLLKQTMLTGSYKEKLQSLFLKYDALWQHWENQVGHRRIKPHHIATGTVNPRPQKQYPINPKAKASIQTVINDLLKQGVLIQQNSIMNTPVYPVPKPDGKWRMVLDYREVNKTIPLIAAQNQHSAGILSSIFRGKYKTTLDLSNGFWAHSITPESYWLTAFTWLGQQYCWTRLPQGFLNSPALFTADVVDLLKEVPNVQVYVDDIYISHDDPREHLEQLEKVFSLLLNAGYVVSLKKSEIAQHEVEFLGFNITKEGRGLTETFKQKLLNITPPRDLKQLQSILGLLNFARNFIPNFSELVKPLYNIIATANGKYITWTTDNSQQLQNIISMLNSAENLEERNPEVRLIMKVNTSPSAGYIRFYNEFAKRPIMYLNYVYTKAEVKFTNTEKLLTTIHKGLIKALDLGMGQEILVYSPIVSMTKIQKTPLPERKALPIRWITWMSYLEDPRIQFHYDKTLPELQQVPTVTDDIIAKIKHPSEFSMVFYTDGSAIKHPNVNKSHNAGMGIAQVQFKPEFTVINTWSIPLGDHTAQLAEVAAVEFACKKALKIDGPVLIVTDSFYVAESVNKELPYWQSNGFFNNKKKPLKHVSKWKSIADCIQLKPDIIIIHEKGHQPTASTFHTEGNNLADKLATQGSYVVNAGKRTADGSEFEKRTADGSEFESPKKKAKVE

SEQ ID NO: 534 - protein, 2079 aa, synthetic construct
MPAAKRVKLDGGDKKYSIGLDIGTNSVGWAVITDEYKVPSKKFKVLGNTDRHSIKKNLIGALLFDSGETAEATRLKRTARRRYTRRKNRICYLQEIFSNEMAKVDDSFFHRLEESFLVEEDKKHERHPIFGNIVDEVAYHEKYPTIYHLRKKLVDSTDKADLRLIYLALAHMIKFRGHFLIEGDLNPDNSDVDKLFIQLVQTYNQLFEENPINASGVDAKAILSARLSKSRRLENLIAQLPGEKKNGLFGNLIALSLGLTPNFKSNFDLAEDAKLQLSKDTYDDDLDNLLAQIGDQYADLFLAAKNLSDAILLSDILRVNTEITKAPLSASMIKRYDEHHQDLTLLKALVRQQLPEKYKEIFFDQSKNGYAGYIDGGASQEEFYKFIKPILEKMDGTEELLVKLNREDLLRKQRTFDNGSIPHQIHLGELHAILRRQEDFYPFLKDNREKIEKILTFRIPYYVGPLARGNSRFAWMTRKSEETITPWNFEEVVDKGASAQSFIERMTNFDKNLPNEKVLPKHSLLYEYFTVYNELTKVKYVTEGMRKPAFLSGEQKKAIVDLLFKTNRKVTVKQLKEDYFKKIECFDSVEISGVEDRFNASLGTYHDLLKIIKDKDFLDNEENEDILEDIVLTLTLFEDREMIEERLKTYAHLFDDKVMKQLKRRRYTGWGRLSRKLINGIRDKQSGKTILDFLKSDGFANRNFMQLIHDDSLTFKEDIQKAQVSGQGDSLHEHIANLAGSPAIKKGILQTVKVVDELVKVMGRHKPENIVIEMARENQTTQKGQKNSRERMKRIEEGIKELGSQILKEHPVENTQLQNEKLYLYYLQNGRDMYVDQELDINRLSDYDVDHIVPQSFLKDDSIDNKVLTRSDKARGKSDNVPSEEVVKKMKNYWRQLLNAKLITQRKFDNLTKAERGGLSELDKAGFIKRQLVETRQITKHVAQILDSRMNTKYDENDKLIREVKVITLKSKLVSDFRKDFQFYKVREINNYHHAHDAYLNAVVGTALIKKYPKLESEFVYGDYKVYDVRKMIAKSEQEIGKATAKYFFYSNIMNFFKTEITLANGEIRKRPLIETNGETGEIVWDKGRDFATVRKVLSMPQVNIVKKTEVQTGGFSKESILPKRNSDKLIARKKDWDPKKYGGFDSPTVAYSVLVVAKVEKGKSKKLKSVKELLGITIMERSSFEKNPIDFLEAKGYKEVKKDLIIKLPKYSLFELENGRKRMLASAGELQKGNELALPSKYVNFLYLASHYEKLKGSPEDNEQKQLFVEQHKHYLDEIIEQISEFSKRVILADANLDKVLSAYNKHRDKPIREQAENIIHLFTLTNLGAPAAFKYFDTTIDRKRYTSTKEVLDATLIHQSITGLYETRIDLSQLGGDGGGSSGGIPWLMKKPLQLTTLVPLQEYEERLLKQTMLTGSYKEKLQSLFLKYDALWQHWENQVGHRRIKPHHIATGTVNPRPQKQYPINPKAKASIQTVINDLLKQGVLIQQNSIMNTPVYPVPKPDGKWRMVLDYREVNKTIPLIAAQNQHSAGILSSIFRGKYKTTLDLSNGFWAHSITPESYWLTAFTWLGQQYCWTRLPQGFLNSPALFNADVVDLLKEVPNVQVYVDDIYISHDDPREHLEQLEKVFSLLLNAGYVVSLKKSEIAQHEVEFLGFNITKEGRGLTETFKQKLLNITPPRDLKQLQSILGLLNFARNFIPNFSELVKPLYNIIATAPGKYITWTTDNSQQLQNIISMLNSAENLEERNPEVRLIMKVNTSPSAGYIRFYNEFAKRPIMYLNYVYTKAEVKFTNTEKLLTTIHKGLIKALDLGMGQEILVYSPIVSMTKIQKTPLPERKALPIRWITWMSYLEDPRIQFHYDKTLPELQQVPTVTDDIIAKIKHPSEFSMVFYTDGSAIKHPNVNKSHNAGMGIAQVQFKPEFTVINTWSIPLGDHTAQLAEVAAVEFACKKALKIDGPVLIVTDSFYVAESVNKELPYWQSNGFFNNKKKPLKHVSKWKSIADCIQLKPDIIIIHEKGHQPTASTFHTEGNNLADKLATQGSYVVNAGKRTADGSEFEKRTADGSEFESPKKKAKVE

SEQ ID NO: 535 - protein, 2082 aa, synthetic construct
MPAAKRVKLDGGDKKYSIGLDIGTNSVGWAVITDEYKVPSKKFKVLGNTDRHSIKKNLIGALLFDSGETAEATRLKRTARRRYTRRKNRICYLQEIFSNEMAKVDDSFFHRLEESFLVEEDKKHERHPIFGNIVDEVAYHEKYPTIYHLRKKLVDSTDKADLRLIYLALAHMIKFRGHFLIEGDLNPDNSDVDKLFIQLVQTYNQLFEENPINASGVDAKAILSARLSKSRRLENLIAQLPGEKKNGLFGNLIALSLGLTPNFKSNFDLAEDAKLQLSKDTYDDDLDNLLAQIGDQYADLFLAAKNLSDAILLSDILRVNTEITKAPLSASMIKRYDEHHQDLTLLKALVRQQLPEKYKEIFFDQSKNGYAGYIDGGASQEEFYKFIKPILEKMDGTEELLVKLNREDLLRKQRTFDNGSIPHQIHLGELHAILRRQEDFYPFLKDNREKIEKILTFRIPYYVGPLARGNSRFAWMTRKSEETITPWNFEEVVDKGASAQSFIERMTNFDKNLPNEKVLPKHSLLYEYFTVYNELTKVKYVTEGMRKPAFLSGEQKKAIVDLLFKTNRKVTVKQLKEDYFKKIECFDSVEISGVEDRFNASLGTYHDLLKIIKDKDFLDNEENEDILEDIVLTLTLFEDREMIEERLKTYAHLFDDKVMKQLKRRRYTGWGRLSRKLINGIRDKQSGKTILDFLKSDGFANRNFMQLIHDDSLTFKEDIQKAQVSGQGDSLHEHIANLAGSPAIKKGILQTVKVVDELVKVMGRHKPENIVIEMARENQTTQKGQKNSRERMKRIEEGIKELGSQILKEHPVENTQLQNEKLYLYYLQNGRDMYVDQELDINRLSDYDVDHIVPQSFLKDDSIDNKVLTRSDKARGKSDNVPSEEVVKKMKNYWRQLLNAKLITQRKFDNLTKAERGGLSELDKAGFIKRQLVETRQITKHVAQILDSRMNTKYDENDKLIREVKVITLKSKLVSDFRKDFQFYKVREINNYHHAHDAYLNAVVGTALIKKYPKLESEFVYGDYKVYDVRKMIAKSEQEIGKATAKYFFYSNIMNFFKTEITLANGEIRKRPLIETNGETGEIVWDKGRDFATVRKVLSMPQVNIVKKTEVQTGGFSKESILPKRNSDKLIARKKDWDPKKYGGFDSPTVAYSVLVVAKVEKGKSKKLKSVKELLGITIMERSSFEKNPIDFLEAKGYKEVKKDLIIKLPKYSLFELENGRKRMLASAGELQKGNELALPSKYVNFLYLASHYEKLKGSPEDNEQKQLFVEQHKHYLDEIIEQISEFSKRVILADANLDKVLSAYNKHRDKPIREQAENIIHLFTLTNLGAPAAFKYFDTTIDRKRYTSTKEVLDATLIHQSITGLYETRIDLSQLGGDGGPAPGSSGGIPWLMKKPLQLTTLVPLQEYEERLLKQTMLTGSYKEKLQSLFLKYDALWQHWENQVGHRRIKPHHIATGTVNPRPQKQYPINPKAKASIQTVINDLLKQGVLIQQNSIMNTPVYPVPKPDGKWRMVLDYREVNKTIPLIAAQNQHSAGILSSIFRGKYKTTLDLSNGFWAHSITPESYWLTAFTWLGQQYCWTRLPQGFLNSPALFNADVVDLLKEVPNVQVYVDDIYISHDDPREHLEQLEKVFSLLLNAGYVVSLKKSEIAQHEVEFLGFNITKEGRGLTETFKQKLLNITPPRDLKQLQSILGLLNFARNFIPNFSELVKPLYNIIATAPGKYITWTTDNSQQLQNIISMLNSAENLEERNPEVRLIMKVNTSPSAGYIRFYNEFAKRPIMYLNYVYTKAEVKFTNTEKLLTTIHKGLIKALDLGMGQEILVYSPIVSMTKIQKTPLPERKALPIRWITWMSYLEDPRIQFHYDKTLPELQQVPTVTDDIIAKIKHPSEFSMVFYTDGSAIKHPNVNKSHNAGMGIAQVQFKPEFTVINTWSIPLGDHTAQLAEVAAVEFACKKALKIDGPVLIVTDSFYVAESVNKELPYWQSNGFFNNKKKPLKHVSKWKSIADCIQLKPDIIIIHEKGHQPTASTFHTEGNNLADKLATQGSYVVNAGKRTADGSEFEKRTADGSEFESPKKKAKVE

SEQ ID NO: 536 - protein, 2087 aa, synthetic construct
MPAAKRVKLDGGDKKYSIGLDIGTNSVGWAVITDEYKVPSKKFKVLGNTDRHSIKKNLIGALLFDSGETAEATRLKRTARRRYTRRKNRICYLQEIFSNEMAKVDDSFFHRLEESFLVEEDKKHERHPIFGNIVDEVAYHEKYPTIYHLRKKLVDSTDKADLRLIYLALAHMIKFRGHFLIEGDLNPDNSDVDKLFIQLVQTYNQLFEENPINASGVDAKAILSARLSKSRRLENLIAQLPGEKKNGLFGNLIALSLGLTPNFKSNFDLAEDAKLQLSKDTYDDDLDNLLAQIGDQYADLFLAAKNLSDAILLSDILRVNTEITKAPLSASMIKRYDEHHQDLTLLKALVRQQLPEKYKEIFFDQSKNGYAGYIDGGASQEEFYKFIKPILEKMDGTEELLVKLNREDLLRKQRTFDNGSIPHQIHLGELHAILRRQEDFYPFLKDNREKIEKILTFRIPYYVGPLARGNSRFAWMTRKSEETITPWNFEEVVDKGASAQSFIERMTNFDKNLPNEKVLPKHSLLYEYFTVYNELTKVKYVTEGMRKPAFLSGEQKKAIVDLLFKTNRKVTVKQLKEDYFKKIECFDSVEISGVEDRFNASLGTYHDLLKIIKDKDFLDNEENEDILEDIVLTLTLFEDREMIEERLKTYAHLFDDKVMKQLKRRRYTGWGRLSRKLINGIRDKQSGKTILDFLKSDGFANRNFMQLIHDDSLTFKEDIQKAQVSGQGDSLHEHIANLAGSPAIKKGILQTVKVVDELVKVMGRHKPENIVIEMARENQTTQKGQKNSRERMKRIEEGIKELGSQILKEHPVENTQLQNEKLYLYYLQNGRDMYVDQELDINRLSDYDVDHIVPQSFLKDDSIDNKVLTRSDKARGKSDNVPSEEVVKKMKNYWRQLLNAKLITQRKFDNLTKAERGGLSELDKAGFIKRQLVETRQITKHVAQILDSRMNTKYDENDKLIREVKVITLKSKLVSDFRKDFQFYKVREINNYHHAHDAYLNAVVGTALIKKYPKLESEFVYGDYKVYDVRKMIAKSEQEIGKATAKYFFYSNIMNFFKTEITLANGEIRKRPLIETNGETGEIVWDKGRDFATVRKVLSMPQVNIVKKTEVQTGGFSKESILPKRNSDKLIARKKDWDPKKYGGFDSPTVAYSVLVVAKVEKGKSKKLKSVKELLGITIMERSSFEKNPIDFLEAKGYKEVKKDLIIKLPKYSLFELENGRKRMLASAGELQKGNELALPSKYVNFLYLASHYEKLKGSPEDNEQKQLFVEQHKHYLDEIIEQISEFSKRVILADANLDKVLSAYNKHRDKPIREQAENIIHLFTLTNLGAPAAFKYFDTTIDRKRYTSTKEVLDATLIHQSITGLYETRIDLSQLGGDGGGSSGGSEAAAKGGIPWLMKKPLQLTTLVPLQEYEERLLKQTMLTGSYKEKLQSLFLKYDALWQHWENQVGHRRIKPHHIATGTVNPRPQKQYPINPKAKASIQTVINDLLKQGVLIQQNSIMNTPVYPVPKPDGKWRMVLDYREVNKTIPLIAAQNQHSAGILSSIFRGKYKTTLDLSNGFWAHSITPESYWLTAFTWLGQQYCWTRLPQGFLNSPALFNADVVDLLKEVPNVQVYVDDIYISHDDPREHLEQLEKVFSLLLNAGYVVSLKKSEIAQHEVEFLGFNITKEGRGLTETFKQKLLNITPPRDLKQLQSILGLLNFARNFIPNFSELVKPLYNIIATAPGKYITWTTDNSQQLQNIISMLNSAENLEERNPEVRLIMKVNTSPSAGYIRFYNEFAKRPIMYLNYVYTKAEVKFTNTEKLLTTIHKGLIKALDLGMGQEILVYSPIVSMTKIQKTPLPERKALPIRWITWMSYLEDPRIQFHYDKTLPELQQVPTVTDDIIAKIKHPSEFSMVFYTDGSAIKHPNVNKSHNAGMGIAQVQFKPEFTVINTWSIPLGDHTAQLAEVAAVEFACKKALKIDGPVLIVTDSFYVAESVNKELPYWQSNGFFNNKKKPLKHVSKWKSIADCIQLKPDIIIIHEKGHQPTASTFHTEGNNLADKLATQGSYVVNAGKRTADGSEFEKRTADGSEFESPKKKAKVE

SEQ ID NO: 537 - protein, 2087 aa, synthetic construct
MPAAKRVKLDGGDKKYSIGLDIGTNSVGWAVITDEYKVPSKKFKVLGNTDRHSIKKNLIGALLFDSGETAEATRLKRTARRRYTRRKNRICYLQEIFSNEMAKVDDSFFHRLEESFLVEEDKKHERHPIFGNIVDEVAYHEKYPTIYHLRKKLVDSTDKADLRLIYLALAHMIKFRGHFLIEGDLNPDNSDVDKLFIQLVQTYNQLFEENPINASGVDAKAILSARLSKSRRLENLIAQLPGEKKNGLFGNLIALSLGLTPNFKSNFDLAEDAKLQLSKDTYDDDLDNLLAQIGDQYADLFLAAKNLSDAILLSDILRVNTEITKAPLSASMIKRYDEHHQDLTLLKALVRQQLPEKYKEIFFDQSKNGYAGYIDGGASQEEFYKFIKPILEKMDGTEELLVKLNREDLLRKQRTFDNGSIPHQIHLGELHAILRRQEDFYPFLKDNREKIEKILTFRIPYYVGPLARGNSRFAWMTRKSEETITPWNFEEVVDKGASAQSFIERMTNFDKNLPNEKVLPKHSLLYEYFTVYNELTKVKYVTEGMRKPAFLSGEQKKAIVDLLFKTNRKVTVKQLKEDYFKKIECFDSVEISGVEDRFNASLGTYHDLLKIIKDKDFLDNEENEDILEDIVLTLTLFEDREMIEERLKTYAHLFDDKVMKQLKRRRYTGWGRLSRKLINGIRDKQSGKTILDFLKSDGFANRNFMQLIHDDSLTFKEDIQKAQVSGQGDSLHEHIANLAGSPAIKKGILQTVKVVDELVKVMGRHKPENIVIEMARENQTTQKGQKNSRERMKRIEEGIKELGSQILKEHPVENTQLQNEKLYLYYLQNGRDMYVDQELDINRLSDYDVDHIVPQSFLKDDSIDNKVLTRSDKARGKSDNVPSEEVVKKMKNYWRQLLNAKLITQRKFDNLTKAERGGLSELDKAGFIKRQLVETRQITKHVAQILDSRMNTKYDENDKLIREVKVITLKSKLVSDFRKDFQFYKVREINNYHHAHDAYLNAVVGTALIKKYPKLESEFVYGDYKVYDVRKMIAKSEQEIGKATAKYFFYSNIMNFFKTEITLANGEIRKRPLIETNGETGEIVWDKGRDFATVRKVLSMPQVNIVKKTEVQTGGFSKESILPKRNSDKLIARKKDWDPKKYGGFDSPTVAYSVLVVAKVEKGKSKKLKSVKELLGITIMERSSFEKNPIDFLEAKGYKEVKKDLIIKLPKYSLFELENGRKRMLASAGELQKGNELALPSKYVNFLYLASHYEKLKGSPEDNEQKQLFVEQHKHYLDEIIEQISEFSKRVILADANLDKVLSAYNKHRDKPIREQAENIIHLFTLTNLGAPAAFKYFDTTIDRKRYTSTKEVLDATLIHQSITGLYETRIDLSQLGGDGGGSSPAPEAAAKGGIPWLMKKPLQLTTLVPLQEYEERLLKQTMLTGSYKEKLQSLFLKYDALWQHWENQVGHRRIKPHHIATGTVNPRPQKQYPINPKAKASIQTVINDLLKQGVLIQQNSIMNTPVYPVPKPDGKWRMVLDYREVNKTIPLIAAQNQHSAGILSSIFRGKYKTTLDLSNGFWAHSITPESYWLTAFTWLGQQYCWTRLPQGFLNSPALFNADVVDLLKEVPNVQVYVDDIYISHDDPREHLEQLEKVFSLLLNAGYVVSLKKSEIAQHEVEFLGFNITKEGRGLTETFKQKLLNITPPRDLKQLQSILGLLNFARNFIPNFSELVKPLYNIIATAPGKYITWTTDNSQQLQNIISMLNSAENLEERNPEVRLIMKVNTSPSAGYIRFYNEFAKRPIMYLNYVYTKAEVKFTNTEKLLTTIHKGLIKALDLGMGQEILVYSPIVSMTKIQKTPLPERKALPIRWITWMSYLEDPRIQFHYDKTLPELQQVPTVTDDIIAKIKHPSEFSMVFYTDGSAIKHPNVNKSHNAGMGIAQVQFKPEFTVINTWSIPLGDHTAQLAEVAAVEFACKKALKIDGPVLIVTDSFYVAESVNKELPYWQSNGFFNNKKKPLKHVSKWKSIADCIQLKPDIIIIHEKGHQPTASTFHTEGNNLADKLATQGSYVVNAGKRTADGSEFEKRTADGSEFESPKKKAKVE

SEQ ID NO: 538 - protein, 2087 aa, synthetic construct
MPAAKRVKLDGGDKKYSIGLDIGTNSVGWAVITDEYKVPSKKFKVLGNTDRHSIKKNLIGALLFDSGETAEATRLKRTARRRYTRRKNRICYLQEIFSNEMAKVDDSFFHRLEESFLVEEDKKHERHPIFGNIVDEVAYHEKYPTIYHLRKKLVDSTDKADLRLIYLALAHMIKFRGHFLIEGDLNPDNSDVDKLFIQLVQTYNQLFEENPINASGVDAKAILSARLSKSRRLENLIAQLPGEKKNGLFGNLIALSLGLTPNFKSNFDLAEDAKLQLSKDTYDDDLDNLLAQIGDQYADLFLAAKNLSDAILLSDILRVNTEITKAPLSASMIKRYDEHHQDLTLLKALVRQQLPEKYKEIFFDQSKNGYAGYIDGGASQEEFYKFIKPILEKMDGTEELLVKLNREDLLRKQRTFDNGSIPHQIHLGELHAILRRQEDFYPFLKDNREKIEKILTFRIPYYVGPLARGNSRFAWMTRKSEETITPWNFEEVVDKGASAQSFIERMTNFDKNLPNEKVLPKHSLLYEYFTVYNELTKVKYVTEGMRKPAFLSGEQKKAIVDLLFKTNRKVTVKQLKEDYFKKIECFDSVEISGVEDRFNASLGTYHDLLKIIKDKDFLDNEENEDILEDIVLTLTLFEDREMIEERLKTYAHLFDDKVMKQLKRRRYTGWGRLSRKLINGIRDKQSGKTILDFLKSDGFANRNFMQLIHDDSLTFKEDIQKAQVSGQGDSLHEHIANLAGSPAIKKGILQTVKVVDELVKVMGRHKPENIVIEMARENQTTQKGQKNSRERMKRIEEGIKELGSQILKEHPVENTQLQNEKLYLYYLQNGRDMYVDQELDINRLSDYDVDHIVPQSFLKDDSIDNKVLTRSDKARGKSDNVPSEEVVKKMKNYWRQLLNAKLITQRKFDNLTKAERGGLSELDKAGFIKRQLVETRQITKHVAQILDSRMNTKYDENDKLIREVKVITLKSKLVSDFRKDFQFYKVREINNYHHAHDAYLNAVVGTALIKKYPKLESEFVYGDYKVYDVRKMIAKSEQEIGKATAKYFFYSNIMNFFKTEITLANGEIRKRPLIETNGETGEIVWDKGRDFATVRKVLSMPQVNIVKKTEVQTGGFSKESILPKRNSDKLIARKKDWDPKKYGGFDSPTVAYSVLVVAKVEKGKSKKLKSVKELLGITIMERSSFEKNPIDFLEAKGYKEVKKDLIIKLPKYSLFELENGRKRMLASAGELQKGNELALPSKYVNFLYLASHYEKLKGSPEDNEQKQLFVEQHKHYLDEIIEQISEFSKRVILADANLDKVLSAYNKHRDKPIREQAENIIHLFTLTNLGAPAAFKYFDTTIDRKRYTSTKEVLDATLIHQSITGLYETRIDLSQLGGDGGPAPEAAAKGGSGGIPWLMKKPLQLTTLVPLQEYEERLLKQTMLTGSYKEKLQSLFLKYDALWQHWENQVGHRRIKPHHIATGTVNPRPQKQYPINPKAKASIQTVINDLLKQGVLIQQNSIMNTPVYPVPKPDGKWRMVLDYREVNKTIPLIAAQNQHSAGILSSIFRGKYKTTLDLSNGFWAHSITPESYWLTAFTWLGQQYCWTRLPQGFLNSPALFNADVVDLLKEVPNVQVYVDDIYISHDDPREHLEQLEKVFSLLLNAGYVVSLKKSEIAQHEVEFLGFNITKEGRGLTETFKQKLLNITPPRDLKQLQSILGLLNFARNFIPNFSELVKPLYNIIATAPGKYITWTTDNSQQLQNIISMLNSAENLEERNPEVRLIMKVNTSPSAGYIRFYNEFAKRPIMYLNYVYTKAEVKFTNTEKLLTTIHKGLIKALDLGMGQEILVYSPIVSMTKIQKTPLPERKALPIRWITWMSYLEDPRIQFHYDKTLPELQQVPTVTDDIIAKIKHPSEFSMVFYTDGSAIKHPNVNKSHNAGMGIAQVQFKPEFTVINTWSIPLGDHTAQLAEVAAVEFACKKALKIDGPVLIVTDSFYVAESVNKELPYWQSNGFFNNKKKPLKHVSKWKSIADCIQLKPDIIIIHEKGHQPTASTFHTEGNNLADKLATQGSYVVNAGKRTADGSEFEKRTADGSEFESPKKKAKVE

SEQ ID NO: 539 - protein, 2096 aa, synthetic construct
MPAAKRVKLDGGDKKYSIGLDIGTNSVGWAVITDEYKVPSKKFKVLGNTDRHSIKKNLIGALLFDSGETAEATRLKRTARRRYTRRKNRICYLQEIFSNEMAKVDDSFFHRLEESFLVEEDKKHERHPIFGNIVDEVAYHEKYPTIYHLRKKLVDSTDKADLRLIYLALAHMIKFRGHFLIEGDLNPDNSDVDKLFIQLVQTYNQLFEENPINASGVDAKAILSARLSKSRRLENLIAQLPGEKKNGLFGNLIALSLGLTPNFKSNFDLAEDAKLQLSKDTYDDDLDNLLAQIGDQYADLFLAAKNLSDAILLSDILRVNTEITKAPLSASMIKRYDEHHQDLTLLKALVRQQLPEKYKEIFFDQSKNGYAGYIDGGASQEEFYKFIKPILEKMDGTEELLVKLNREDLLRKQRTFDNGSIPHQIHLGELHAILRRQEDFYPFLKDNREKIEKILTFRIPYYVGPLARGNSRFAWMTRKSEETITPWNFEEVVDKGASAQSFIERMTNFDKNLPNEKVLPKHSLLYEYFTVYNELTKVKYVTEGMRKPAFLSGEQKKAIVDLLFKTNRKVTVKQLKEDYFKKIECFDSVEISGVEDRFNASLGTYHDLLKIIKDKDFLDNEENEDILEDIVLTLTLFEDREMIEERLKTYAHLFDDKVMKQLKRRRYTGWGRLSRKLINGIRDKQSGKTILDFLKSDGFANRNFMQLIHDDSLTFKEDIQKAQVSGQGDSLHEHIANLAGSPAIKKGILQTVKVVDELVKVMGRHKPENIVIEMARENQTTQKGQKNSRERMKRIEEGIKELGSQILKEHPVENTQLQNEKLYLYYLQNGRDMYVDQELDINRLSDYDVDHIVPQSFLKDDSIDNKVLTRSDKARGKSDNVPSEEVVKKMKNYWRQLLNAKLITQRKFDNLTKAERGGLSELDKAGFIKRQLVETRQITKHVAQILDSRMNTKYDENDKLIREVKVITLKSKLVSDFRKDFQFYKVREINNYHHAHDAYLNAVVGTALIKKYPKLESEFVYGDYKVYDVRKMIAKSEQEIGKATAKYFFYSNIMNFFKTEITLANGEIRKRPLIETNGETGEIVWDKGRDFATVRKVLSMPQVNIVKKTEVQTGGFSKESILPKRNSDKLIARKKDWDPKKYGGFDSPTVAYSVLVVAKVEKGKSKKLKSVKELLGITIMERSSFEKNPIDFLEAKGYKEVKKDLIIKLPKYSLFELENGRKRMLASAGELQKGNELALPSKYVNFLYLASHYEKLKGSPEDNEQKQLFVEQHKHYLDEIIEQISEFSKRVILADANLDKVLSAYNKHRDKPIREQAENIIHLFTLTNLGAPAAFKYFDTTIDRKRYTSTKEVLDATLIHQSITGLYETRIDLSQLGGDGGEAAAKEAAAKEAAAKEAAAKGGIPWLMKKPLQLTTLVPLQEYEERLLKQTMLTGSYKEKLQSLFLKYDALWQHWENQVGHRRIKPHHIATGTVNPRPQKQYPINPKAKASIQTVINDLLKQGVLIQQNSIMNTPVYPVPKPDGKWRMVLDYREVNKTIPLIAAQNQHSAGILSSIFRGKYKTTLDLSNGFWAHSITPESYWLTAFTWLGQQYCWTRLPQGFLNSPALFNADVVDLLKEVPNVQVYVDDIYISHDDPREHLEQLEKVFSLLLNAGYVVSLKKSEIAQHEVEFLGFNITKEGRGLTETFKQKLLNITPPRDLKQLQSILGLLNFARNFIPNFSELVKPLYNIIATAPGKYITWTTDNSQQLQNIISMLNSAENLEERNPEVRLIMKVNTSPSAGYIRFYNEFAKRPIMYLNYVYTKAEVKFTNTEKLLTTIHKGLIKALDLGMGQEILVYSPIVSMTKIQKTPLPERKALPIRWITWMSYLEDPRIQFHYDKTLPELQQVPTVTDDIIAKIKHPSEFSMVFYTDGSAIKHPNVNKSHNAGMGIAQVQFKPEFTVINTWSIPLGDHTAQLAEVAAVEFACKKALKIDGPVLIVTDSFYVAESVNKELPYWQSNGFFNNKKKPLKHVSKWKSIADCIQLKPDIIIIHEKGHQPTASTFHTEGNNLADKLATQGSYVVNAGKRTADGSEFEKRTADGSEFESPKKKAKVE

SEQ ID NO: 540 - protein, 2085 aa, synthetic construct
MPAAKRVKLDGGDKKYSIGLDIGTNSVGWAVITDEYKVPSKKFKVLGNTDRHSIKKNLIGALLFDSGETAEATRLKRTARRRYTRRKNRICYLQEIFSNEMAKVDDSFFHRLEESFLVEEDKKHERHPIFGNIVDEVAYHEKYPTIYHLRKKLVDSTDKADLRLIYLALAHMIKFRGHFLIEGDLNPDNSDVDKLFIQLVQTYNQLFEENPINASGVDAKAILSARLSKSRRLENLIAQLPGEKKNGLFGNLIALSLGLTPNFKSNFDLAEDAKLQLSKDTYDDDLDNLLAQIGDQYADLFLAAKNLSDAILLSDILRVNTEITKAPLSASMIKRYDEHHQDLTLLKALVRQQLPEKYKEIFFDQSKNGYAGYIDGGASQEEFYKFIKPILEKMDGTEELLVKLNREDLLRKQRTFDNGSIPHQIHLGELHAILRRQEDFYPFLKDNREKIEKILTFRIPYYVGPLARGNSRFAWMTRKSEETITPWNFEEVVDKGASAQSFIERMTNFDKNLPNEKVLPKHSLLYEYFTVYNELTKVKYVTEGMRKPAFLSGEQKKAIVDLLFKTNRKVTVKQLKEDYFKKIECFDSVEISGVEDRFNASLGTYHDLLKIIKDKDFLDNEENEDILEDIVLTLTLFEDREMIEERLKTYAHLFDDKVMKQLKRRRYTGWGRLSRKLINGIRDKQSGKTILDFLKSDGFANRNFMQLIHDDSLTFKEDIQKAQVSGQGDSLHEHIANLAGSPAIKKGILQTVKVVDELVKVMGRHKPENIVIEMARENQTTQKGQKNSRERMKRIEEGIKELGSQILKEHPVENTQLQNEKLYLYYLQNGRDMYVDQELDINRLSDYDVDHIVPQSFLKDDSIDNKVLTRSDKARGKSDNVPSEEVVKKMKNYWRQLLNAKLITQRKFDNLTKAERGGLSELDKAGFIKRQLVETRQITKHVAQILDSRMNTKYDENDKLIREVKVITLKSKLVSDFRKDFQFYKVREINNYHHAHDAYLNAVVGTALIKKYPKLESEFVYGDYKVYDVRKMIAKSEQEIGKATAKYFFYSNIMNFFKTEITLANGEIRKRPLIETNGETGEIVWDKGRDFATVRKVLSMPQVNIVKKTEVQTGGFSKESILPKRNSDKLIARKKDWDPKKYGGFDSPTVAYSVLVVAKVEKGKSKKLKSVKELLGITIMERSSFEKNPIDFLEAKGYKEVKKDLIIKLPKYSLFELENGRKRMLASAGELQKGNELALPSKYVNFLYLASHYEKLKGSPEDNEQKQLFVEQHKHYLDEIIEQISEFSKRVILADANLDKVLSAYNKHRDKPIREQAENIIHLFTLTNLGAPAAFKYFDTTIDRKRYTSTKEVLDATLIHQSITGLYETRIDLSQLGGDGGGGSPAPGSSGGIPWLMKKPLQLTTLVPLQEYEERLLKQTMLTGSYKEKLQSLFLKYDALWQHWENQVGHRRIKPHHIATGTVNPRPQKQYPINPKAKASIQTVINDLLKQGVLIQQNSIMNTPVYPVPKPDGKWRMVLDYREVNKTIPLIAAQNQHSAGILSSIFRGKYKTTLDLSNGFWAHSITPESYWLTAFTWLGQQYCWTRLPQGFLNSPALFNADVVDLLKEVPNVQVYVDDIYISHDDPREHLEQLEKVFSLLLNAGYVVSLKKSEIAQHEVEFLGFNITKEGRGLTETFKQKLLNITPPRDLKQLQSILGLLNFARNFIPNFSELVKPLYNIIATAPGKYITWTTDNSQQLQNIISMLNSAENLEERNPEVRLIMKVNTSPSAGYIRFYNEFAKRPIMYLNYVYTKAEVKFTNTEKLLTTIHKGLIKALDLGMGQEILVYSPIVSMTKIQKTPLPERKALPIRWITWMSYLEDPRIQFHYDKTLPELQQVPTVTDDIIAKIKHPSEFSMVFYTDGSAIKHPNVNKSHNAGMGIAQVQFKPEFTVINTWSIPLGDHTAQLAEVAAVEFACKKALKIDGPVLIVTDSFYVAESVNKELPYWQSNGFFNNKKKPLKHVSKWKSIADCIQLKPDIIIIHEKGHQPTASTFHTEGNNLADKLATQGSYVVNAGKRTADGSEFEKRTADGSEFESPKKKAKVE

SEQ ID NO: 541 - protein, 2091 aa, synthetic construct
MPAAKRVKLDGGDKKYSIGLDIGTNSVGWAVITDEYKVPSKKFKVLGNTDRHSIKKNLIGALLFDSGETAEATRLKRTARRRYTRRKNRICYLQEIFSNEMAKVDDSFFHRLEESFLVEEDKKHERHPIFGNIVDEVAYHEKYPTIYHLRKKLVDSTDKADLRLIYLALAHMIKFRGHFLIEGDLNPDNSDVDKLFIQLVQTYNQLFEENPINASGVDAKAILSARLSKSRRLENLIAQLPGEKKNGLFGNLIALSLGLTPNFKSNFDLAEDAKLQLSKDTYDDDLDNLLAQIGDQYADLFLAAKNLSDAILLSDILRVNTEITKAPLSASMIKRYDEHHQDLTLLKALVRQQLPEKYKEIFFDQSKNGYAGYIDGGASQEEFYKFIKPILEKMDGTEELLVKLNREDLLRKQRTFDNGSIPHQIHLGELHAILRRQEDFYPFLKDNREKIEKILTFRIPYYVGPLARGNSRFAWMTRKSEETITPWNFEEVVDKGASAQSFIERMTNFDKNLPNEKVLPKHSLLYEYFTVYNELTKVKYVTEGMRKPAFLSGEQKKAIVDLLFKTNRKVTVKQLKEDYFKKIECFDSVEISGVEDRFNASLGTYHDLLKIIKDKDFLDNEENEDILEDIVLTLTLFEDREMIEERLKTYAHLFDDKVMKQLKRRRYTGWGRLSRKLINGIRDKQSGKTILDFLKSDGFANRNFMQLIHDDSLTFKEDIQKAQVSGQGDSLHEHIANLAGSPAIKKGILQTVKVVDELVKVMGRHKPENIVIEMARENQTTQKGQKNSRERMKRIEEGIKELGSQILKEHPVENTQLQNEKLYLYYLQNGRDMYVDQELDINRLSDYDVDHIVPQSFLKDDSIDNKVLTRSDKARGKSDNVPSEEVVKKMKNYWRQLLNAKLITQRKFDNLTKAERGGLSELDKAGFIKRQLVETRQITKHVAQILDSRMNTKYDENDKLIREVKVITLKSKLVSDFRKDFQFYKVREINNYHHAHDAYLNAVVGTALIKKYPKLESEFVYGDYKVYDVRKMIAKSEQEIGKATAKYFFYSNIMNFFKTEITLANGEIRKRPLIETNGETGEIVWDKGRDFATVRKVLSMPQVNIVKKTEVQTGGFSKESILPKRNSDKLIARKKDWDPKKYGGFDSPTVAYSVLVVAKVEKGKSKKLKSVKELLGITIMERSSFEKNPIDFLEAKGYKEVKKDLIIKLPKYSLFELENGRKRMLASAGELQKGNELALPSKYVNFLYLASHYEKLKGSPEDNEQKQLFVEQHKHYLDEIIEQISEFSKRVILADANLDKVLSAYNKHRDKPIREQAENIIHLFTLTNLGAPAAFKYFDTTIDRKRYTSTKEVLDATLIHQSITGLYETRIDLSQLGGDGGEAAAKGGGGSEAAAKGGIPWLMKKPLQLTTLVPLQEYEERLLKQTMLTGSYKEKLQSLFLKYDALWQHWENQVGHRRIKPHHIATGTVNPRPQKQYPINPKAKASIQTVINDLLKQGVLIQQNSIMNTPVYPVPKPDGKWRMVLDYREVNKTIPLIAAQNQHSAGILSSIFRGKYKTTLDLSNGFWAHSITPESYWLTAFTWLGQQYCWTRLPQGFLNSPALFNADVVDLLKEVPNVQVYVDDIYISHDDPREHLEQLEKVFSLLLNAGYVVSLKKSEIAQHEVEFLGFNITKEGRGLTETFKQKLLNITPPRDLKQLQSILGLLNFARNFIPNFSELVKPLYNIIATAPGKYITWTTDNSQQLQNIISMLNSAENLEERNPEVRLIMKVNTSPSAGYIRFYNEFAKRPIMYLNYVYTKAEVKFTNTEKLLTTIHKGLIKALDLGMGQEILVYSPIVSMTKIQKTPLPERKALPIRWITWMSYLEDPRIQFHYDKTLPELQQVPTVTDDIIAKIKHPSEFSMVFYTDGSAIKHPNVNKSHNAGMGIAQVQFKPEFTVINTWSIPLGDHTAQLAEVAAVEFACKKALKIDGPVLIVTDSFYVAESVNKELPYWQSNGFFNNKKKPLKHVSKWKSIADCIQLKPDIIIIHEKGHQPTASTFHTEGNNLADKLATQGSYVVNAGKRTADGSEFEKRTADGSEFESPKKKAKVE

SEQ ID NO: 542 - protein, 2085 aa, synthetic construct
MPAAKRVKLDGGDKKYSIGLDIGTNSVGWAVITDEYKVPSKKFKVLGNTDRHSIKKNLIGALLFDSGETAEATRLKRTARRRYTRRKNRICYLQEIFSNEMAKVDDSFFHRLEESFLVEEDKKHERHPIFGNIVDEVAYHEKYPTIYHLRKKLVDSTDKADLRLIYLALAHMIKFRGHFLIEGDLNPDNSDVDKLFIQLVQTYNQLFEENPINASGVDAKAILSARLSKSRRLENLIAQLPGEKKNGLFGNLIALSLGLTPNFKSNFDLAEDAKLQLSKDTYDDDLDNLLAQIGDQYADLFLAAKNLSDAILLSDILRVNTEITKAPLSASMIKRYDEHHQDLTLLKALVRQQLPEKYKEIFFDQSKNGYAGYIDGGASQEEFYKFIKPILEKMDGTEELLVKLNREDLLRKQRTFDNGSIPHQIHLGELHAILRRQEDFYPFLKDNREKIEKILTFRIPYYVGPLARGNSRFAWMTRKSEETITPWNFEEVVDKGASAQSFIERMTNFDKNLPNEKVLPKHSLLYEYFTVYNELTKVKYVTEGMRKPAFLSGEQKKAIVDLLFKTNRKVTVKQLKEDYFKKIECFDSVEISGVEDRFNASLGTYHDLLKIIKDKDFLDNEENEDILEDIVLTLTLFEDREMIEERLKTYAHLFDDKVMKQLKRRRYTGWGRLSRKLINGIRDKQSGKTILDFLKSDGFANRNFMQLIHDDSLTFKEDIQKAQVSGQGDSLHEHIANLAGSPAIKKGILQTVKVVDELVKVMGRHKPENIVIEMARENQTTQKGQKNSRERMKRIEEGIKELGSQILKEHPVENTQLQNEKLYLYYLQNGRDMYVDQELDINRLSDYDVDHIVPQSFLKDDSIDNKVLTRSDKARGKSDNVPSEEVVKKMKNYWRQLLNAKLITQRKFDNLTKAERGGLSELDKAGFIKRQLVETRQITKHVAQILDSRMNTKYDENDKLIREVKVITLKSKLVSDFRKDFQFYKVREINNYHHAHDAYLNAVVGTALIKKYPKLESEFVYGDYKVYDVRKMIAKSEQEIGKATAKYFFYSNIMNFFKTEITLANGEIRKRPLIETNGETGEIVWDKGRDFATVRKVLSMPQVNIVKKTEVQTGGFSKESILPKRNSDKLIARKKDWDPKKYGGFDSPTVAYSVLVVAKVEKGKSKKLKSVKELLGITIMERSSFEKNPIDFLEAKGYKEVKKDLIIKLPKYSLFELENGRKRMLASAGELQKGNELALPSKYVNFLYLASHYEKLKGSPEDNEQKQLFVEQHKHYLDEIIEQISEFSKRVILADANLDKVLSAYNKHRDKPIREQAENIIHLFTLTNLGAPAAFKYFDTTIDRKRYTSTKEVLDATLIHQSITGLYETRIDLSQLGGDGGPAPGGGGGSGGIPWLMKKPLQLTTLVPLQEYEERLLKQTMLTGSYKEKLQSLFLKYDALWQHWENQVGHRRIKPHHIATGTVNPRPQKQYPINPKAKASIQTVINDLLKQGVLIQQNSIMNTPVYPVPKPDGKWRMVLDYREVNKTIPLIAAQNQHSAGILSSIFRGKYKTTLDLSNGFWAHSITPESYWLTAFTWLGQQYCWTRLPQGFLNSPALFNADVVDLLKEVPNVQVYVDDIYISHDDPREHLEQLEKVFSLLLNAGYVVSLKKSEIAQHEVEFLGFNITKEGRGLTETFKQKLLNITPPRDLKQLQSILGLLNFARNFIPNFSELVKPLYNIIATAPGKYITWTTDNSQQLQNIISMLNSAENLEERNPEVRLIMKVNTSPSAGYIRFYNEFAKRPIMYLNYVYTKAEVKFTNTEKLLTTIHKGLIKALDLGMGQEILVYSPIVSMTKIQKTPLPERKALPIRWITWMSYLEDPRIQFHYDKTLPELQQVPTVTDDIIAKIKHPSEFSMVFYTDGSAIKHPNVNKSHNAGMGIAQVQFKPEFTVINTWSIPLGDHTAQLAEVAAVEFACKKALKIDGPVLIVTDSFYVAESVNKELPYWQSNGFFNNKKKPLKHVSKWKSIADCIQLKPDIIIIHEKGHQPTASTFHTEGNNLADKLATQGSYVVNAGKRTADGSEFEKRTADGSEFESPKKKAKVE

SEQ ID NO: 543 - protein, 2087 aa, synthetic construct
MPAAKRVKLDGGDKKYSIGLDIGTNSVGWAVITDEYKVPSKKFKVLGNTDRHSIKKNLIGALLFDSGETAEATRLKRTARRRYTRRKNRICYLQEIFSNEMAKVDDSFFHRLEESFLVEEDKKHERHPIFGNIVDEVAYHEKYPTIYHLRKKLVDSTDKADLRLIYLALAHMIKFRGHFLIEGDLNPDNSDVDKLFIQLVQTYNQLFEENPINASGVDAKAILSARLSKSRRLENLIAQLPGEKKNGLFGNLIALSLGLTPNFKSNFDLAEDAKLQLSKDTYDDDLDNLLAQIGDQYADLFLAAKNLSDAILLSDILRVNTEITKAPLSASMIKRYDEHHQDLTLLKALVRQQLPEKYKEIFFDQSKNGYAGYIDGGASQEEFYKFIKPILEKMDGTEELLVKLNREDLLRKQRTFDNGSIPHQIHLGELHAILRRQEDFYPFLKDNREKIEKILTFRIPYYVGPLARGNSRFAWMTRKSEETITPWNFEEVVDKGASAQSFIERMTNFDKNLPNEKVLPKHSLLYEYFTVYNELTKVKYVTEGMRKPAFLSGEQKKAIVDLLFKTNRKVTVKQLKEDYFKKIECFDSVEISGVEDRFNASLGTYHDLLKIIKDKDFLDNEENEDILEDIVLTLTLFEDREMIEERLKTYAHLFDDKVMKQLKRRRYTGWGRLSRKLINGIRDKQSGKTILDFLKSDGFANRNFMQLIHDDSLTFKEDIQKAQVSGQGDSLHEHIANLAGSPAIKKGILQTVKVVDELVKVMGRHKPENIVIEMARENQTTQKGQKNSRERMKRIEEGIKELGSQILKEHPVENTQLQNEKLYLYYLQNGRDMYVDQELDINRLSDYDVDHIVPQSFLKDDSIDNKVLTRSDKARGKSDNVPSEEVVKKMKNYWRQLLNAKLITQRKFDNLTKAERGGLSELDKAGFIKRQLVETRQITKHVAQILDSRMNTKYDENDKLIREVKVITLKSKLVSDFRKDFQFYKVREINNYHHAHDAYLNAVVGTALIKKYPKLESEFVYGDYKVYDVRKMIAKSEQEIGKATAKYFFYSNIMNFFKTEITLANGEIRKRPLIETNGETGEIVWDKGRDFATVRKVLSMPQVNIVKKTEVQTGGFSKESILPKRNSDKLIARKKDWDPKKYGGFDSPTVAYSVLVVAKVEKGKSKKLKSVKELLGITIMERSSFEKNPIDFLEAKGYKEVKKDLIIKLPKYSLFELENGRKRMLASAGELQKGNELALPSKYVNFLYLASHYEKLKGSPEDNEQKQLFVEQHKHYLDEIIEQISEFSKRVILADANLDKVLSAYNKHRDKPIREQAENIIHLFTLTNLGAPAAFKYFDTTIDRKRYTSTKEVLDATLIHQSITGLYETRIDLSQLGGDGGGGSEAAAKGGGGGIPWLMKKPLQLTTLVPLQEYEERLLKQTMLTGSYKEKLQSLFLKYDALWQHWENQVGHRRIKPHHIATGTVNPRPQKQYPINPKAKASIQTVINDLLKQGVLIQQNSIMNTPVYPVPKPDGKWRMVLDYREVNKTIPLIAAQNQHSAGILSSIFRGKYKTTLDLSNGFWAHSITPESYWLTAFTWLGQQYCWTRLPQGFLNSPALFNADVVDLLKEVPNVQVYVDDIYISHDDPREHLEQLEKVFSLLLNAGYVVSLKKSEIAQHEVEFLGFNITKEGRGLTETFKQKLLNITPPRDLKQLQSILGLLNFARNFIPNFSELVKPLYNIIATAPGKYITWTTDNSQQLQNIISMLNSAENLEERNPEVRLIMKVNTSPSAGYIRFYNEFAKRPIMYLNYVYTKAEVKFTNTEKLLTTIHKGLIKALDLGMGQEILVYSPIVSMTKIQKTPLPERKALPIRWITWMSYLEDPRIQFHYDKTLPELQQVPTVTDDIIAKIKHPSEFSMVFYTDGSAIKHPNVNKSHNAGMGIAQVQFKPEFTVINTWSIPLGDHTAQLAEVAAVEFACKKALKIDGPVLIVTDSFYVAESVNKELPYWQSNGFFNNKKKPLKHVSKWKSIADCIQLKPDIIIIHEKGHQPTASTFHTEGNNLADKLATQGSYVVNAGKRTADGSEFEKRTADGSEFESPKKKAKVE

SEQ ID NO: 544 - protein, 2082 aa, synthetic construct
MPAAKRVKLDGGDKKYSIGLDIGTNSVGWAVITDEYKVPSKKFKVLGNTDRHSIKKNLIGALLFDSGETAEATRLKRTARRRYTRRKNRICYLQEIFSNEMAKVDDSFFHRLEESFLVEEDKKHERHPIFGNIVDEVAYHEKYPTIYHLRKKLVDSTDKADLRLIYLALAHMIKFRGHFLIEGDLNPDNSDVDKLFIQLVQTYNQLFEENPINASGVDAKAILSARLSKSRRLENLIAQLPGEKKNGLFGNLIALSLGLTPNFKSNFDLAEDAKLQLSKDTYDDDLDNLLAQIGDQYADLFLAAKNLSDAILLSDILRVNTEITKAPLSASMIKRYDEHHQDLTLLKALVRQQLPEKYKEIFFDQSKNGYAGYIDGGASQEEFYKFIKPILEKMDGTEELLVKLNREDLLRKQRTFDNGSIPHQIHLGELHAILRRQEDFYPFLKDNREKIEKILTFRIPYYVGPLARGNSRFAWMTRKSEETITPWNFEEVVDKGASAQSFIERMTNFDKNLPNEKVLPKHSLLYEYFTVYNELTKVKYVTEGMRKPAFLSGEQKKAIVDLLFKTNRKVTVKQLKEDYFKKIECFDSVEISGVEDRFNASLGTYHDLLKIIKDKDFLDNEENEDILEDIVLTLTLFEDREMIEERLKTYAHLFDDKVMKQLKRRRYTGWGRLSRKLINGIRDKQSGKTILDFLKSDGFANRNFMQLIHDDSLTFKEDIQKAQVSGQGDSLHEHIANLAGSPAIKKGILQTVKVVDELVKVMGRHKPENIVIEMARENQTTQKGQKNSRERMKRIEEGIKELGSQILKEHPVENTQLQNEKLYLYYLQNGRDMYVDQELDINRLSDYDVDHIVPQSFLKDDSIDNKVLTRSDKARGKSDNVPSEEVVKKMKNYWRQLLNAKLITQRKFDNLTKAERGGLSELDKAGFIKRQLVETRQITKHVAQILDSRMNTKYDENDKLIREVKVITLKSKLVSDFRKDFQFYKVREINNYHHAHDAYLNAVVGTALIKKYPKLESEFVYGDYKVYDVRKMIAKSEQEIGKATAKYFFYSNIMNFFKTEITLANGEIRKRPLIETNGETGEIVWDKGRDFATVRKVLSMPQVNIVKKTEVQTGGFSKESILPKRNSDKLIARKKDWDPKKYGGFDSPTVAYSVLVVAKVEKGKSKKLKSVKELLGITIMERSSFEKNPIDFLEAKGYKEVKKDLIIKLPKYSLFELENGRKRMLASAGELQKGNELALPSKYVNFLYLASHYEKLKGSPEDNEQKQLFVEQHKHYLDEIIEQISEFSKRVILADANLDKVLSAYNKHRDKPIREQAENIIHLFTLTNLGAPAAFKYFDTTIDRKRYTSTKEVLDATLIHQSITGLYETRIDLSQLGGDGGGSSGGGGGIPWLMKKPLQLTTLVPLQEYEERLLKQTMLTGSYKEKLQSLFLKYDALWQHWENQVGHRRIKPHHIATGTVNPRPQKQYPINPKAKASIQTVINDLLKQGVLIQQNSIMNTPVYPVPKPDGKWRMVLDYREVNKTIPLIAAQNQHSAGILSSIFRGKYKTTLDLSNGFWAHSITPESYWLTAFTWLGQQYCWTRLPQGFLNSPALFNADVVDLLKEVPNVQVYVDDIYISHDDPREHLEQLEKVFSLLLNAGYVVSLKKSEIAQHEVEFLGFNITKEGRGLTETFKQKLLNITPPRDLKQLQSILGLLNFARNFIPNFSELVKPLYNIIATAPGKYITWTTDNSQQLQNIISMLNSAENLEERNPEVRLIMKVNTSPSAGYIRFYNEFAKRPIMYLNYVYTKAEVKFTNTEKLLTTIHKGLIKALDLGMGQEILVYSPIVSMTKIQKTPLPERKALPIRWITWMSYLEDPRIQFHYDKTLPELQQVPTVTDDIIAKIKHPSEFSMVFYTDGSAIKHPNVNKSHNAGMGIAQVQFKPEFTVINTWSIPLGDHTAQLAEVAAVEFACKKALKIDGPVLIVTDSFYVAESVNKELPYWQSNGFFNNKKKPLKHVSKWKSIADCIQLKPDIIIIHEKGHQPTASTFHTEGNNLADKLATQGSYVVNAGKRTADGSEFEKRTADGSEFESPKKKAKVE

SEQ ID NO: 545 - protein, 2085 aa, synthetic construct
MPAAKRVKLDGGDKKYSIGLDIGTNSVGWAVITDEYKVPSKKFKVLGNTDRHSIKKNLIGALLFDSGETAEATRLKRTARRRYTRRKNRICYLQEIFSNEMAKVDDSFFHRLEESFLVEEDKKHERHPIFGNIVDEVAYHEKYPTIYHLRKKLVDSTDKADLRLIYLALAHMIKFRGHFLIEGDLNPDNSDVDKLFIQLVQTYNQLFEENPINASGVDAKAILSARLSKSRRLENLIAQLPGEKKNGLFGNLIALSLGLTPNFKSNFDLAEDAKLQLSKDTYDDDLDNLLAQIGDQYADLFLAAKNLSDAILLSDILRVNTEITKAPLSASMIKRYDEHHQDLTLLKALVRQQLPEKYKEIFFDQSKNGYAGYIDGGASQEEFYKFIKPILEKMDGTEELLVKLNREDLLRKQRTFDNGSIPHQIHLGELHAILRRQEDFYPFLKDNREKIEKILTFRIPYYVGPLARGNSRFAWMTRKSEETITPWNFEEVVDKGASAQSFIERMTNFDKNLPNEKVLPKHSLLYEYFTVYNELTKVKYVTEGMRKPAFLSGEQKKAIVDLLFKTNRKVTVKQLKEDYFKKIECFDSVEISGVEDRFNASLGTYHDLLKIIKDKDFLDNEENEDILEDIVLTLTLFEDREMIEERLKTYAHLFDDKVMKQLKRRRYTGWGRLSRKLINGIRDKQSGKTILDFLKSDGFANRNFMQLIHDDSLTFKEDIQKAQVSGQGDSLHEHIANLAGSPAIKKGILQTVKVVDELVKVMGRHKPENIVIEMARENQTTQKGQKNSRERMKRIEEGIKELGSQILKEHPVENTQLQNEKLYLYYLQNGRDMYVDQELDINRLSDYDVDHIVPQSFLKDDSIDNKVLTRSDKARGKSDNVPSEEVVKKMKNYWRQLLNAKLITQRKFDNLTKAERGGLSELDKAGFIKRQLVETRQITKHVAQILDSRMNTKYDENDKLIREVKVITLKSKLVSDFRKDFQFYKVREINNYHHAHDAYLNAVVGTALIKKYPKLESEFVYGDYKVYDVRKMIAKSEQEIGKATAKYFFYSNIMNFFKTEITLANGEIRKRPLIETNGETGEIVWDKGRDFATVRKVLSMPQVNIVKKTEVQTGGFSKESILPKRNSDKLIARKKDWDPKKYGGFDSPTVAYSVLVVAKVEKGKSKKLKSVKELLGITIMERSSFEKNPIDFLEAKGYKEVKKDLIIKLPKYSLFELENGRKRMLASAGELQKGNELALPSKYVNFLYLASHYEKLKGSPEDNEQKQLFVEQHKHYLDEIIEQISEFSKRVILADANLDKVLSAYNKHRDKPIREQAENIIHLFTLTNLGAPAAFKYFDTTIDRKRYTSTKEVLDATLIHQSITGLYETRIDLSQLGGDGGGSSGGSPAPGGIPWLMKKPLQLTTLVPLQEYEERLLKQTMLTGSYKEKLQSLFLKYDALWQHWENQVGHRRIKPHHIATGTVNPRPQKQYPINPKAKASIQTVINDLLKQGVLIQQNSIMNTPVYPVPKPDGKWRMVLDYREVNKTIPLIAAQNQHSAGILSSIFRGKYKTTLDLSNGFWAHSITPESYWLTAFTWLGQQYCWTRLPQGFLNSPALFNADVVDLLKEVPNVQVYVDDIYISHDDPREHLEQLEKVFSLLLNAGYVVSLKKSEIAQHEVEFLGFNITKEGRGLTETFKQKLLNITPPRDLKQLQSILGLLNFARNFIPNFSELVKPLYNIIATAPGKYITWTTDNSQQLQNIISMLNSAENLEERNPEVRLIMKVNTSPSAGYIRFYNEFAKRPIMYLNYVYTKAEVKFTNTEKLLTTIHKGLIKALDLGMGQEILVYSPIVSMTKIQKTPLPERKALPIRWITWMSYLEDPRIQFHYDKTLPELQQVPTVTDDIIAKIKHPSEFSMVFYTDGSAIKHPNVNKSHNAGMGIAQVQFKPEFTVINTWSIPLGDHTAQLAEVAAVEFACKKALKIDGPVLIVTDSFYVAESVNKELPYWQSNGFFNNKKKPLKHVSKWKSIADCIQLKPDIIIIHEKGHQPTASTFHTEGNNLADKLATQGSYVVNAGKRTADGSEFEKRTADGSEFESPKKKAKVE

SEQ ID NO: 546 - protein, 2085 aa, synthetic construct
MPAAKRVKLDGGDKKYSIGLDIGTNSVGWAVITDEYKVPSKKFKVLGNTDRHSIKKNLIGALLFDSGETAEATRLKRTARRRYTRRKNRICYLQEIFSNEMAKVDDSFFHRLEESFLVEEDKKHERHPIFGNIVDEVAYHEKYPTIYHLRKKLVDSTDKADLRLIYLALAHMIKFRGHFLIEGDLNPDNSDVDKLFIQLVQTYNQLFEENPINASGVDAKAILSARLSKSRRLENLIAQLPGEKKNGLFGNLIALSLGLTPNFKSNFDLAEDAKLQLSKDTYDDDLDNLLAQIGDQYADLFLAAKNLSDAILLSDILRVNTEITKAPLSASMIKRYDEHHQDLTLLKALVRQQLPEKYKEIFFDQSKNGYAGYIDGGASQEEFYKFIKPILEKMDGTEELLVKLNREDLLRKQRTFDNGSIPHQIHLGELHAILRRQEDFYPFLKDNREKIEKILTFRIPYYVGPLARGNSRFAWMTRKSEETITPWNFEEVVDKGASAQSFIERMTNFDKNLPNEKVLPKHSLLYEYFTVYNELTKVKYVTEGMRKPAFLSGEQKKAIVDLLFKTNRKVTVKQLKEDYFKKIECFDSVEISGVEDRFNASLGTYHDLLKIIKDKDFLDNEENEDILEDIVLTLTLFEDREMIEERLKTYAHLFDDKVMKQLKRRRYTGWGRLSRKLINGIRDKQSGKTILDFLKSDGFANRNFMQLIHDDSLTFKEDIQKAQVSGQGDSLHEHIANLAGSPAIKKGILQTVKVVDELVKVMGRHKPENIVIEMARENQTTQKGQKNSRERMKRIEEGIKELGSQILKEHPVENTQLQNEKLYLYYLQNGRDMYVDQELDINRLSDYDVDHIVPQSFLKDDSIDNKVLTRSDKARGKSDNVPSEEVVKKMKNYWRQLLNAKLITQRKFDNLTKAERGGLSELDKAGFIKRQLVETRQITKHVAQILDSRMNTKYDENDKLIREVKVITLKSKLVSDFRKDFQFYKVREINNYHHAHDAYLNAVVGTALIKKYPKLESEFVYGDYKVYDVRKMIAKSEQEIGKATAKYFFYSNIMNFFKTEITLANGEIRKRPLIETNGETGEIVWDKGRDFATVRKVLSMPQVNIVKKTEVQTGGFSKESILPKRNSDKLIARKKDWDPKKYGGFDSPTVAYSVLVVAKVEKGKSKKLKSVKELLGITIMERSSFEKNPIDFLEAKGYKEVKKDLIIKLPKYSLFELENGRKRMLASAGELQKGNELALPSKYVNFLYLASHYEKLKGSPEDNEQKQLFVEQHKHYLDEIIEQISEFSKRVILADANLDKVLSAYNKHRDKPIREQAENIIHLFTLTNLGAPAAFKYFDTTIDRKRYTSTKEVLDATLIHQSITGLYETRIDLSQLGGDGGPAPGSSGGGGGIPWLMKKPLQLTTLVPLQEYEERLLKQTMLTGSYKEKLQSLFLKYDALWQHWENQVGHRRIKPHHIATGTVNPRPQKQYPINPKAKASIQTVINDLLKQGVLIQQNSIMNTPVYPVPKPDGKWRMVLDYREVNKTIPLIAAQNQHSAGILSSIFRGKYKTTLDLSNGFWAHSITPESYWLTAFTWLGQQYCWTRLPQGFLNSPALFNADVVDLLKEVPNVQVYVDDIYISHDDPREHLEQLEKVFSLLLNAGYVVSLKKSEIAQHEVEFLGFNITKEGRGLTETFKQKLLNITPPRDLKQLQSILGLLNFARNFIPNFSELVKPLYNIIATAPGKYITWTTDNSQQLQNIISMLNSAENLEERNPEVRLIMKVNTSPSAGYIRFYNEFAKRPIMYLNYVYTKAEVKFTNTEKLLTTIHKGLIKALDLGMGQEILVYSPIVSMTKIQKTPLPERKALPIRWITWMSYLEDPRIQFHYDKTLPELQQVPTVTDDIIAKIKHPSEFSMVFYTDGSAIKHPNVNKSHNAGMGIAQVQFKPEFTVINTWSIPLGDHTAQLAEVAAVEFACKKALKIDGPVLIVTDSFYVAESVNKELPYWQSNGFFNNKKKPLKHVSKWKSIADCIQLKPDIIIIHEKGHQPTASTFHTEGNNLADKLATQGSYVVNAGKRTADGSEFEKRTADGSEFESPKKKAKVE

SEQ ID NO: 547 - protein, 2085 aa, synthetic construct
MPAAKRVKLDGGDKKYSIGLDIGTNSVGWAVITDEYKVPSKKFKVLGNTDRHSIKKNLIGALLFDSGETAEATRLKRTARRRYTRRKNRICYLQEIFSNEMAKVDDSFFHRLEESFLVEEDKKHERHPIFGNIVDEVAYHEKYPTIYHLRKKLVDSTDKADLRLIYLALAHMIKFRGHFLIEGDLNPDNSDVDKLFIQLVQTYNQLFEENPINASGVDAKAILSARLSKSRRLENLIAQLPGEKKNGLFGNLIALSLGLTPNFKSNFDLAEDAKLQLSKDTYDDDLDNLLAQIGDQYADLFLAAKNLSDAILLSDILRVNTEITKAPLSASMIKRYDEHHQDLTLLKALVRQQLPEKYKEIFFDQSKNGYAGYIDGGASQEEFYKFIKPILEKMDGTEELLVKLNREDLLRKQRTFDNGSIPHQIHLGELHAILRRQEDFYPFLKDNREKIEKILTFRIPYYVGPLARGNSRFAWMTRKSEETITPWNFEEVVDKGASAQSFIERMTNFDKNLPNEKVLPKHSLLYEYFTVYNELTKVKYVTEGMRKPAFLSGEQKKAIVDLLFKTNRKVTVKQLKEDYFKKIECFDSVEISGVEDRFNASLGTYHDLLKIIKDKDFLDNEENEDILEDIVLTLTLFEDREMIEERLKTYAHLFDDKVMKQLKRRRYTGWGRLSRKLINGIRDKQSGKTILDFLKSDGFANRNFMQLIHDDSLTFKEDIQKAQVSGQGDSLHEHIANLAGSPAIKKGILQTVKVVDELVKVMGRHKPENIVIEMARENQTTQKGQKNSRERMKRIEEGIKELGSQILKEHPVENTQLQNEKLYLYYLQNGRDMYVDQELDINRLSDYDVDHIVPQSFLKDDSIDNKVLTRSDKARGKSDNVPSEEVVKKMKNYWRQLLNAKLITQRKFDNLTKAERGGLSELDKAGFIKRQLVETRQITKHVAQILDSRMNTKYDENDKLIREVKVITLKSKLVSDFRKDFQFYKVREINNYHHAHDAYLNAVVGTALIKKYPKLESEFVYGDYKVYDVRKMIAKSEQEIGKATAKYFFYSNIMNFFKTEITLANGEIRKRPLIETNGETGEIVWDKGRDFATVRKVLSMPQVNIVKKTEVQTGGFSKESILPKRNSDKLIARKKDWDPKKYGGFDSPTVAYSVLVVAKVEKGKSKKLKSVKELLGITIMERSSFEKNPIDFLEAKGYKEVKKDLIIKLPKYSLFELENGRKRMLASAGELQKGNELALPSKYVNFLYLASHYEKLKGSPEDNEQKQLFVEQHKHYLDEIIEQISEFSKRVILADANLDKVLSAYNKHRDKPIREQAENIIHLFTLTNLGAPAAFKYFDTTIDRKRYTSTKEVLDATLIHQSITGLYETRIDLSQLGGDGGGSSGGGPAPGGIPWLMKKPLQLTTLVPLQEYEERLLKQTMLTGSYKEKLQSLFLKYDALWQHWENQVGHRRIKPHHIATGTVNPRPQKQYPINPKAKASIQTVINDLLKQGVLIQQNSIMNTPVYPVPKPDGKWRMVLDYREVNKTIPLIAAQNQHSAGILSSIFRGKYKTTLDLSNGFWAHSITPESYWLTAFTWLGQQYCWTRLPQGFLNSPALFNADVVDLLKEVPNVQVYVDDIYISHDDPREHLEQLEKVFSLLLNAGYVVSLKKSEIAQHEVEFLGFNITKEGRGLTETFKQKLLNITPPRDLKQLQSILGLLNFARNFIPNFSELVKPLYNIIATAPGKYITWTTDNSQQLQNIISMLNSAENLEERNPEVRLIMKVNTSPSAGYIRFYNEFAKRPIMYLNYVYTKAEVKFTNTEKLLTTIHKGLIKALDLGMGQEILVYSPIVSMTKIQKTPLPERKALPIRWITWMSYLEDPRIQFHYDKTLPELQQVPTVTDDIIAKIKHPSEFSMVFYTDGSAIKHPNVNKSHNAGMGIAQVQFKPEFTVINTWSIPLGDHTAQLAEVAAVEFACKKALKIDGPVLIVTDSFYVAESVNKELPYWQSNGFFNNKKKPLKHVSKWKSIADCIQLKPDIIIIHEKGHQPTASTFHTEGNNLADKLATQGSYVVNAGKRTADGSEFEKRTADGSEFESPKKKAKVE

SEQ ID NO: 548 - protein, 2087 aa, synthetic construct
MPAAKRVKLDGGDKKYSIGLDIGTNSVGWAVITDEYKVPSKKFKVLGNTDRHSIKKNLIGALLFDSGETAEATRLKRTARRRYTRRKNRICYLQEIFSNEMAKVDDSFFHRLEESFLVEEDKKHERHPIFGNIVDEVAYHEKYPTIYHLRKKLVDSTDKADLRLIYLALAHMIKFRGHFLIEGDLNPDNSDVDKLFIQLVQTYNQLFEENPINASGVDAKAILSARLSKSRRLENLIAQLPGEKKNGLFGNLIALSLGLTPNFKSNFDLAEDAKLQLSKDTYDDDLDNLLAQIGDQYADLFLAAKNLSDAILLSDILRVNTEITKAPLSASMIKRYDEHHQDLTLLKALVRQQLPEKYKEIFFDQSKNGYAGYIDGGASQEEFYKFIKPILEKMDGTEELLVKLNREDLLRKQRTFDNGSIPHQIHLGELHAILRRQEDFYPFLKDNREKIEKILTFRIPYYVGPLARGNSRFAWMTRKSEETITPWNFEEVVDKGASAQSFIERMTNFDKNLPNEKVLPKHSLLYEYFTVYNELTKVKYVTEGMRKPAFLSGEQKKAIVDLLFKTNRKVTVKQLKEDYFKKIECFDSVEISGVEDRFNASLGTYHDLLKIIKDKDFLDNEENEDILEDIVLTLTLFEDREMIEERLKTYAHLFDDKVMKQLKRRRYTGWGRLSRKLINGIRDKQSGKTILDFLKSDGFANRNFMQLIHDDSLTFKEDIQKAQVSGQGDSLHEHIANLAGSPAIKKGILQTVKVVDELVKVMGRHKPENIVIEMARENQTTQKGQKNSRERMKRIEEGIKELGSQILKEHPVENTQLQNEKLYLYYLQNGRDMYVDQELDINRLSDYDVDHIVPQSFLKDDSIDNKVLTRSDKARGKSDNVPSEEVVKKMKNYWRQLLNAKLITQRKFDNLTKAERGGLSELDKAGFIKRQLVETRQITKHVAQILDSRMNTKYDENDKLIREVKVITLKSKLVSDFRKDFQFYKVREINNYHHAHDAYLNAVVGTALIKKYPKLESEFVYGDYKVYDVRKMIAKSEQEIGKATAKYFFYSNIMNFFKTEITLANGEIRKRPLIETNGETGEIVWDKGRDFATVRKVLSMPQVNIVKKTEVQTGGFSKESILPKRNSDKLIARKKDWDPKKYGGFDSPTVAYSVLVVAKVEKGKSKKLKSVKELLGITIMERSSFEKNPIDFLEAKGYKEVKKDLIIKLPKYSLFELENGRKRMLASAGELQKGNELALPSKYVNFLYLASHYEKLKGSPEDNEQKQLFVEQHKHYLDEIIEQISEFSKRVILADANLDKVLSAYNKHRDKPIREQAENIIHLFTLTNLGAPAAFKYFDTTIDRKRYTSTKEVLDATLIHQSITGLYETRIDLSQLGGDGGGGSEAAAKPAPGGIPWLMKKPLQLTTLVPLQEYEERLLKQTMLTGSYKEKLQSLFLKYDALWQHWENQVGHRRIKPHHIATGTVNPRPQKQYPINPKAKASIQTVINDLLKQGVLIQQNSIMNTPVYPVPKPDGKWRMVLDYREVNKTIPLIAAQNQHSAGILSSIFRGKYKTTLDLSNGFWAHSITPESYWLTAFTWLGQQYCWTRLPQGFLNSPALFNADVVDLLKEVPNVQVYVDDIYISHDDPREHLEQLEKVFSLLLNAGYVVSLKKSEIAQHEVEFLGFNITKEGRGLTETFKQKLLNITPPRDLKQLQSILGLLNFARNFIPNFSELVKPLYNIIATAPGKYITWTTDNSQQLQNIISMLNSAENLEERNPEVRLIMKVNTSPSAGYIRFYNEFAKRPIMYLNYVYTKAEVKFTNTEKLLTTIHKGLIKALDLGMGQEILVYSPIVSMTKIQKTPLPERKALPIRWITWMSYLEDPRIQFHYDKTLPELQQVPTVTDDIIAKIKHPSEFSMVFYTDGSAIKHPNVNKSHNAGMGIAQVQFKPEFTVINTWSIPLGDHTAQLAEVAAVEFACKKALKIDGPVLIVTDSFYVAESVNKELPYWQSNGFFNNKKKPLKHVSKWKSIADCIQLKPDIIIIHEKGHQPTASTFHTEGNNLADKLATQGSYVVNAGKRTADGSEFEKRTADGSEFESPKKKAKVE

SEQ ID NO: 549 - protein, 2087 aa, synthetic construct
MPAAKRVKLDGGDKKYSIGLDIGTNSVGWAVITDEYKVPSKKFKVLGNTDRHSIKKNLIGALLFDSGETAEATRLKRTARRRYTRRKNRICYLQEIFSNEMAKVDDSFFHRLEESFLVEEDKKHERHPIFGNIVDEVAYHEKYPTIYHLRKKLVDSTDKADLRLIYLALAHMIKFRGHFLIEGDLNPDNSDVDKLFIQLVQTYNQLFEENPINASGVDAKAILSARLSKSRRLENLIAQLPGEKKNGLFGNLIALSLGLTPNFKSNFDLAEDAKLQLSKDTYDDDLDNLLAQIGDQYADLFLAAKNLSDAILLSDILRVNTEITKAPLSASMIKRYDEHHQDLTLLKALVRQQLPEKYKEIFFDQSKNGYAGYIDGGASQEEFYKFIKPILEKMDGTEELLVKLNREDLLRKQRTFDNGSIPHQIHLGELHAILRRQEDFYPFLKDNREKIEKILTFRIPYYVGPLARGNSRFAWMTRKSEETITPWNFEEVVDKGASAQSFIERMTNFDKNLPNEKVLPKHSLLYEYFTVYNELTKVKYVTEGMRKPAFLSGEQKKAIVDLLFKTNRKVTVKQLKEDYFKKIECFDSVEISGVEDRFNASLGTYHDLLKIIKDKDFLDNEENEDILEDIVLTLTLFEDREMIEERLKTYAHLFDDKVMKQLKRRRYTGWGRLSRKLINGIRDKQSGKTILDFLKSDGFANRNFMQLIHDDSLTFKEDIQKAQVSGQGDSLHEHIANLAGSPAIKKGILQTVKVVDELVKVMGRHKPENIVIEMARENQTTQKGQKNSRERMKRIEEGIKELGSQILKEHPVENTQLQNEKLYLYYLQNGRDMYVDQELDINRLSDYDVDHIVPQSFLKDDSIDNKVLTRSDKARGKSDNVPSEEVVKKMKNYWRQLLNAKLITQRKFDNLTKAERGGLSELDKAGFIKRQLVETRQITKHVAQILDSRMNTKYDENDKLIREVKVITLKSKLVSDFRKDFQFYKVREINNYHHAHDAYLNAVVGTALIKKYPKLESEFVYGDYKVYDVRKMIAKSEQEIGKATAKYFFYSNIMNFFKTEITLANGEIRKRPLIETNGETGEIVWDKGRDFATVRKVLSMPQVNIVKKTEVQTGGFSKESILPKRNSDKLIARKKDWDPKKYGGFDSPTVAYSVLVVAKVEKGKSKKLKSVKELLGITIMERSSFEKNPIDFLEAKGYKEVKKDLIIKLPKYSLFELENGRKRMLASAGELQKGNELALPSKYVNFLYLASHYEKLKGSPEDNEQKQLFVEQHKHYLDEIIEQISEFSKRVILADANLDKVLSAYNKHRDKPIREQAENIIHLFTLTNLGAPAAFKYFDTTIDRKRYTSTKEVLDATLIHQSITGLYETRIDLSQLGGDGGGGGPAPEAAAKGGIPWLMKKPLQLTTLVPLQEYEERLLKQTMLTGSYKEKLQSLFLKYDALWQHWENQVGHRRIKPHHIATGTVNPRPQKQYPINPKAKASIQTVINDLLKQGVLIQQNSIMNTPVYPVPKPDGKWRMVLDYREVNKTIPLIAAQNQHSAGILSSIFRGKYKTTLDLSNGFWAHSITPESYWLTAFTWLGQQYCWTRLPQGFLNSPALFNADVVDLLKEVPNVQVYVDDIYISHDDPREHLEQLEKVFSLLLNAGYVVSLKKSEIAQHEVEFLGFNITKEGRGLTETFKQKLLNITPPRDLKQLQSILGLLNFARNFIPNFSELVKPLYNIIATAPGKYITWTTDNSQQLQNIISMLNSAENLEERNPEVRLIMKVNTSPSAGYIRFYNEFAKRPIMYLNYVYTKAEVKFTNTEKLLTTIHKGLIKALDLGMGQEILVYSPIVSMTKIQKTPLPERKALPIRWITWMSYLEDPRIQFHYDKTLPELQQVPTVTDDIIAKIKHPSEFSMVFYTDGSAIKHPNVNKSHNAGMGIAQVQFKPEFTVINTWSIPLGDHTAQLAEVAAVEFACKKALKIDGPVLIVTDSFYVAESVNKELPYWQSNGFFNNKKKPLKHVSKWKSIADCIQLKPDIIIIHEKGHQPTASTFHTEGNNLADKLATQGSYVVNAGKRTADGSEFEKRTADGSEFESPKKKAKVE

SEQ ID NO: 550 - protein, 2106 aa, synthetic construct
MPAAKRVKLDGGDKKYSIGLDIGTNSVGWAVITDEYKVPSKKFKVLGNTDRHSIKKNLIGALLFDSGETAEATRLKRTARRRYTRRKNRICYLQEIFSNEMAKVDDSFFHRLEESFLVEEDKKHERHPIFGNIVDEVAYHEKYPTIYHLRKKLVDSTDKADLRLIYLALAHMIKFRGHFLIEGDLNPDNSDVDKLFIQLVQTYNQLFEENPINASGVDAKAILSARLSKSRRLENLIAQLPGEKKNGLFGNLIALSLGLTPNFKSNFDLAEDAKLQLSKDTYDDDLDNLLAQIGDQYADLFLAAKNLSDAILLSDILRVNTEITKAPLSASMIKRYDEHHQDLTLLKALVRQQLPEKYKEIFFDQSKNGYAGYIDGGASQEEFYKFIKPILEKMDGTEELLVKLNREDLLRKQRTFDNGSIPHQIHLGELHAILRRQEDFYPFLKDNREKIEKILTFRIPYYVGPLARGNSRFAWMTRKSEETITPWNFEEVVDKGASAQSFIERMTNFDKNLPNEKVLPKHSLLYEYFTVYNELTKVKYVTEGMRKPAFLSGEQKKAIVDLLFKTNRKVTVKQLKEDYFKKIECFDSVEISGVEDRFNASLGTYHDLLKIIKDKDFLDNEENEDILEDIVLTLTLFEDREMIEERLKTYAHLFDDKVMKQLKRRRYTGWGRLSRKLINGIRDKQSGKTILDFLKSDGFANRNFMQLIHDDSLTFKEDIQKAQVSGQGDSLHEHIANLAGSPAIKKGILQTVKVVDELVKVMGRHKPENIVIEMARENQTTQKGQKNSRERMKRIEEGIKELGSQILKEHPVENTQLQNEKLYLYYLQNGRDMYVDQELDINRLSDYDVDHIVPQSFLKDDSIDNKVLTRSDKARGKSDNVPSEEVVKKMKNYWRQLLNAKLITQRKFDNLTKAERGGLSELDKAGFIKRQLVETRQITKHVAQILDSRMNTKYDENDKLIREVKVITLKSKLVSDFRKDFQFYKVREINNYHHAHDAYLNAVVGTALIKKYPKLESEFVYGDYKVYDVRKMIAKSEQEIGKATAKYFFYSNIMNFFKTEITLANGEIRKRPLIETNGETGEIVWDKGRDFATVRKVLSMPQVNIVKKTEVQTGGFSKESILPKRNSDKLIARKKDWDPKKYGGFDSPTVAYSVLVVAKVEKGKSKKLKSVKELLGITIMERSSFEKNPIDFLEAKGYKEVKKDLIIKLPKYSLFELENGRKRMLASAGELQKGNELALPSKYVNFLYLASHYEKLKGSPEDNEQKQLFVEQHKHYLDEIIEQISEFSKRVILADANLDKVLSAYNKHRDKPIREQAENIIHLFTLTNLGAPAAFKYFDTTIDRKRYTSTKEVLDATLIHQSITGLYETRIDLSQLGGDGGEAAAKEAAAKEAAAKEAAAKEAAAKEAAAKGGIPWLMKKPLQLTTLVPLQEYEERLLKQTMLTGSYKEKLQSLFLKYDALWQHWENQVGHRRIKPHHIATGTVNPRPQKQYPINPKAKASIQTVINDLLKQGVLIQQNSIMNTPVYPVPKPDGKWRMVLDYREVNKTIPLIAAQNQHSAGILSSIFRGKYKTTLDLSNGFWAHSITPESYWLTAFTWLGQQYCWTRLPQGFLNSPALFNADVVDLLKEVPNVQVYVDDIYISHDDPREHLEQLEKVFSLLLNAGYVVSLKKSEIAQHEVEFLGFNITKEGRGLTETFKQKLLNITPPRDLKQLQSILGKLNFARNFIPNFSELVKPLYNIIATAPGKYITWTTDNSQQLQNIISMLNSAENLEERNPEVRLIMKVNTSPSAGYIRFYNEFAKRPIMYLNYVYTKAEVKFTNTEKLLTTIHKGLIKALDLGMGQEILVYSPIVSMTKIQKTPLPERKALPIRWITWMSYLEDPRIQFHYDKTLPELQQVPTVTDDIIAKIKHPSEFSMVFYTDGSAIKHPNVNKSHNAGMGIAQVQFKPEFTVINTWSIPLGDHTAQLAEVAAVEFACKKALKIDGPVLIVTDSFYVAESVNKELPYWQSNGFFNNKKKPLKHVSKWKSIADCIQLKPDIIIIHEKGHQPTASTFHTEGNNLADKLATQGSYVVNAGKRTADGSEFEKRTADGSEFESPKKKAKVE

SEQ ID NO: 551 - protein, 2079 aa, synthetic construct
MPAAKRVKLDGGDKKYSIGLDIGTNSVGWAVITDEYKVPSKKFKVLGNTDRHSIKKNLIGALLFDSGETAEATRLKRTARRRYTRRKNRICYLQEIFSNEMAKVDDSFFHRLEESFLVEEDKKHERHPIFGNIVDEVAYHEKYPTIYHLRKKLVDSTDKADLRLIYLALAHMIKFRGHFLIEGDLNPDNSDVDKLFIQLVQTYNQLFEENPINASGVDAKAILSARLSKSRRLENLIAQLPGEKKNGLFGNLIALSLGLTPNFKSNFDLAEDAKLQLSKDTYDDDLDNLLAQIGDQYADLFLAAKNLSDAILLSDILRVNTEITKAPLSASMIKRYDEHHQDLTLLKALVRQQLPEKYKEIFFDQSKNGYAGYIDGGASQEEFYKFIKPILEKMDGTEELLVKLNREDLLRKQRTFDNGSIPHQIHLGELHAILRRQEDFYPFLKDNREKIEKILTFRIPYYVGPLARGNSRFAWMTRKSEETITPWNFEEVVDKGASAQSFIERMTNFDKNLPNEKVLPKHSLLYEYFTVYNELTKVKYVTEGMRKPAFLSGEQKKAIVDLLFKTNRKVTVKQLKEDYFKKIECFDSVEISGVEDRFNASLGTYHDLLKIIKDKDFLDNEENEDILEDIVLTLTLFEDREMIEERLKTYAHLFDDKVMKQLKRRRYTGWGRLSRKLINGIRDKQSGKTILDFLKSDGFANRNFMQLIHDDSLTFKEDIQKAQVSGQGDSLHEHIANLAGSPAIKKGILQTVKVVDELVKVMGRHKPENIVIEMARENQTTQKGQKNSRERMKRIEEGIKELGSQILKEHPVENTQLQNEKLYLYYLQNGRDMYVDQELDINRLSDYDVDHIVPQSFLKDDSIDNKVLTRSDKARGKSDNVPSEEVVKKMKNYWRQLLNAKLITQRKFDNLTKAERGGLSELDKAGFIKRQLVETRQITKHVAQILDSRMNTKYDENDKLIREVKVITLKSKLVSDFRKDFQFYKVREINNYHHAHDAYLNAVVGTALIKKYPKLESEFVYGDYKVYDVRKMIAKSEQEIGKATAKYFFYSNIMNFFKTEITLANGEIRKRPLIETNGETGEIVWDKGRDFATVRKVLSMPQVNIVKKTEVQTGGFSKESILPKRNSDKLIARKKDWDPKKYGGFDSPTVAYSVLVVAKVEKGKSKKLKSVKELLGITIMERSSFEKNPIDFLEAKGYKEVKKDLIIKLPKYSLFELENGRKRMLASAGELQKGNELALPSKYVNFLYLASHYEKLKGSPEDNEQKQLFVEQHKHYLDEIIEQISEFSKRVILADANLDKVLSAYNKHRDKPIREQAENIIHLFTLTNLGAPAAFKYFDTTIDRKRYTSTKEVLDATLIHQSITGLYETRIDLSQLGGDGGGSSGGIPWLMKKPLQLTTLVPLQEYEERLLKQTMLTGSYKEKLQSLFLKYDALWQHWENQVGHRRIKPHHIATGTVNPRPQKQYPINPKAKASIQTVINDLLKQGVLIQQNSIMNTPVYPVPKPDGKWRMVLDYREVNKTIPLIAAQNQHSAGILSSIFRGKYKTTLDLSNGFWAHSITPESYWLTAFTWLGQQYCWTRLPQGFLNSPALFNADVVDLLKEVPNVQVYVDDIYISHDDPREHLEQLEKVFSLLLNAGYVVSLKKSEIAQHEVEFLGFNITKEGRGLTETFKQKLLNITPPRDLKQLQSILGKLNFARNFIPNFSELVKPLYNIIATAPGKYITWTTDNSQQLQNIISMLNSAENLEERNPEVRLIMKVNTSPSAGYIRFYNEFAKRPIMYLNYVYTKAEVKFTNTEKLLTTIHKGLIKALDLGMGQEILVYSPIVSMTKIQKTPLPERKALPIRWITWMSYLEDPRIQFHYDKTLPELQQVPTVTDDIIAKIKHPSEFSMVFYTDGSAIKHPNVNKSHNAGMGIAQVQFKPEFTVINTWSIPLGDHTAQLAEVAAVEFACKKALKIDGPVLIVTDSFYVAESVNKELPYWQSNGFFNNKKKPLKHVSKWKSIADCIQLKPDIIIIHEKGHQPTASTFHTEGNNLADKLATQGSYVVNAGKRTADGSEFEKRTADGSEFESPKKKAKVE

SEQ ID NO: 552 - protein, 2079 aa, synthetic construct
MPAAKRVKLDGGDKKYSIGLDIGTNSVGWAVITDEYKVPSKKFKVLGNTDRHSIKKNLIGALLFDSGETAEATRLKRTARRRYTRRKNRICYLQEIFSNEMAKVDDSFFHRLEESFLVEEDKKHERHPIFGNIVDEVAYHEKYPTIYHLRKKLVDSTDKADLRLIYLALAHMIKFRGHFLIEGDLNPDNSDVDKLFIQLVQTYNQLFEENPINASGVDAKAILSARLSKSRRLENLIAQLPGEKKNGLFGNLIALSLGLTPNFKSNFDLAEDAKLQLSKDTYDDDLDNLLAQIGDQYADLFLAAKNLSDAILLSDILRVNTEITKAPLSASMIKRYDEHHQDLTLLKALVRQQLPEKYKEIFFDQSKNGYAGYIDGGASQEEFYKFIKPILEKMDGTEELLVKLNREDLLRKQRTFDNGSIPHQIHLGELHAILRRQEDFYPFLKDNREKIEKILTFRIPYYVGPLARGNSRFAWMTRKSEETITPWNFEEVVDKGASAQSFIERMTNFDKNLPNEKVLPKHSLLYEYFTVYNELTKVKYVTEGMRKPAFLSGEQKKAIVDLLFKTNRKVTVKQLKEDYFKKIECFDSVEISGVEDRFNASLGTYHDLLKIIKDKDFLDNEENEDILEDIVLTLTLFEDREMIEERLKTYAHLFDDKVMKQLKRRRYTGWGRLSRKLINGIRDKQSGKTILDFLKSDGFANRNFMQLIHDDSLTFKEDIQKAQVSGQGDSLHEHIANLAGSPAIKKGILQTVKVVDELVKVMGRHKPENIVIEMARENQTTQKGQKNSRERMKRIEEGIKELGSQILKEHPVENTQLQNEKLYLYYLQNGRDMYVDQELDINRLSDYDVDHIVPQSFLKDDSIDNKVLTRSDKARGKSDNVPSEEVVKKMKNYWRQLLNAKLITQRKFDNLTKAERGGLSELDKAGFIKRQLVETRQITKHVAQILDSRMNTKYDENDKLIREVKVITLKSKLVSDFRKDFQFYKVREINNYHHAHDAYLNAVVGTALIKKYPKLESEFVYGDYKVYDVRKMIAKSEQEIGKATAKYFFYSNIMNFFKTEITLANGEIRKRPLIETNGETGEIVWDKGRDFATVRKVLSMPQVNIVKKTEVQTGGFSKESILPKRNSDKLIARKKDWDPKKYGGFDSPTVAYSVLVVAKVEKGKSKKLKSVKELLGITIMERSSFEKNPIDFLEAKGYKEVKKDLIIKLPKYSLFELENGRKRMLASAGELQKGNELALPSKYVNFLYLASHYEKLKGSPEDNEQKQLFVEQHKHYLDEIIEQISEFSKRVILADANLDKVLSAYNKHRDKPIREQAENIIHLFTLTNLGAPAAFKYFDTTIDRKRYTSTKEVLDATLIHQSITGLYETRIDLSQLGGDGGGGSGGIPWLMKKPLQLTTLVPLQEYEERLLKQTMLTGSYKEKLQSLFLKYDALWQHWENQVGHRRIKPHHIATGTVNPRPQKQYPINPKAKASIQTVINDLLKQGVLIQQNSIMNTPVYPVPKPDGKWRMVLDYREVNKTIPLIAAQNQHSAGILSSIFRGKYKTTLDLSNGFWAHSITPESYWLTAFTWLGQQYCWTRLPQGFLNSPALFNADVVDLLKEVPNVQVYVDDIYISHDDPREHLEQLEKVFSLLLNAGYVVSLKKSEIAQHEVEFLGFNITKEGRGLTETFKQKLLNITPPRDLKQLQSILGKLNFARNFIPNFSELVKPLYNIIATAPGKYITWTTDNSQQLQNIISMLNSAENLEERNPEVRLIMKVNTSPSAGYIRFYNEFAKRPIMYLNYVYTKAEVKFTNTEKLLTTIHKGLIKALDLGMGQEILVYSPIVSMTKIQKTPLPERKALPIRWITWMSYLEDPRIQFHYDKTLPELQQVPTVTDDIIAKIKHPSEFSMVFYTDGSAIKHPNVNKSHNAGMGIAQVQFKPEFTVINTWSIPLGDHTAQLAEVAAVEFACKKALKIDGPVLIVTDSFYVAESVNKELPYWQSNGFFNNKKKPLKHVSKWKSIADCIQLKPDIIIIHEKGHQPTASTFHTEGNNLADKLATQGSYVVNAGKRTADGSEFEKRTADGSEFESPKKKAKVE

SEQ ID NO: 553 - protein, 2087 aa, synthetic construct
MPAAKRVKLDGGDKKYSIGLDIGTNSVGWAVITDEYKVPSKKFKVLGNTDRHSIKKNLIGALLFDSGETAEATRLKRTARRRYTRRKNRICYLQEIFSNEMAKVDDSFFHRLEESFLVEEDKKHERHPIFGNIVDEVAYHEKYPTIYHLRKKLVDSTDKADLRLIYLALAHMIKFRGHFLIEGDLNPDNSDVDKLFIQLVQTYNQLFEENPINASGVDAKAILSARLSKSRRLENLIAQLPGEKKNGLFGNLIALSLGLTPNFKSNFDLAEDAKLQLSKDTYDDDLDNLLAQIGDQYADLFLAAKNLSDAILLSDILRVNTEITKAPLSASMIKRYDEHHQDLTLLKALVRQQLPEKYKEIFFDQSKNGYAGYIDGGASQEEFYKFIKPILEKMDGTEELLVKLNREDLLRKQRTFDNGSIPHQIHLGELHAILRRQEDFYPFLKDNREKIEKILTFRIPYYVGPLARGNSRFAWMTRKSEETITPWNFEEVVDKGASAQSFIERMTNFDKNLPNEKVLPKHSLLYEYFTVYNELTKVKYVTEGMRKPAFLSGEQKKAIVDLLFKTNRKVTVKQLKEDYFKKIECFDSVEISGVEDRFNASLGTYHDLLKIIKDKDFLDNEENEDILEDIVLTLTLFEDREMIEERLKTYAHLFDDKVMKQLKRRRYTGWGRLSRKLINGIRDKQSGKTILDFLKSDGFANRNFMQLIHDDSLTFKEDIQKAQVSGQGDSLHEHIANLAGSPAIKKGILQTVKVVDELVKVMGRHKPENIVIEMARENQTTQKGQKNSRERMKRIEEGIKELGSQILKEHPVENTQLQNEKLYLYYLQNGRDMYVDQELDINRLSDYDVDHIVPQSFLKDDSIDNKVLTRSDKARGKSDNVPSEEVVKKMKNYWRQLLNAKLITQRKFDNLTKAERGGLSELDKAGFIKRQLVETRQITKHVAQILDSRMNTKYDENDKLIREVKVITLKSKLVSDFRKDFQFYKVREINNYHHAHDAYLNAVVGTALIKKYPKLESEFVYGDYKVYDVRKMIAKSEQEIGKATAKYFFYSNIMNFFKTEITLANGEIRKRPLIETNGETGEIVWDKGRDFATVRKVLSMPQVNIVKKTEVQTGGFSKESILPKRNSDKLIARKKDWDPKKYGGFDSPTVAYSVLVVAKVEKGKSKKLKSVKELLGITIMERSSFEKNPIDFLEAKGYKEVKKDLIIKLPKYSLFELENGRKRMLASAGELQKGNELALPSKYVNFLYLASHYEKLKGSPEDNEQKQLFVEQHKHYLDEIIEQISEFSKRVILADANLDKVLSAYNKHRDKPIREQAENIIHLFTLTNLGAPAAFKYFDTTIDRKRYTSTKEVLDATLIHQSITGLYETRIDLSQLGGDGGGSSEAAAKPAPGGIPWLMKKPLQLTTLVPLQEYEERLLKQTMLTGSYKEKLQSLFLKYDALWQHWENQVGHRRIKPHHIATGTVNPRPQKQYPINPKAKASIQTVINDLLKQGVLIQQNSIMNTPVYPVPKPDGKWRMVLDYREVNKTIPLIAAQNQHSAGILSSIFRGKYKTTLDLSNGFWAHSITPESYWLTAFTWLGQQYCWTRLPQGFLNSPALFNADVVDLLKEVPNVQVYVDDIYISHDDPREHLEQLEKVFSLLLNAGYVVSLKKSEIAQHEVEFLGFNITKEGRGLTETFKQKLLNITPPRDLKQLQSILGKLNFARNFIPNFSELVKPLYNIIATAPGKYITWTTDNSQQLQNIISMLNSAENLEERNPEVRLIMKVNTSPSAGYIRFYNEFAKRPIMYLNYVYTKAEVKFTNTEKLLTTIHKGLIKALDLGMGQEILVYSPIVSMTKIQKTPLPERKALPIRWITWMSYLEDPRIQFHYDKTLPELQQVPTVTDDIIAKIKHPSEFSMVFYTDGSAIKHPNVNKSHNAGMGIAQVQFKPEFTVINTWSIPLGDHTAQLAEVAAVEFACKKALKIDGPVLIVTDSFYVAESVNKELPYWQSNGFFNNKKKPLKHVSKWKSIADCIQLKPDIIIIHEKGHQPTASTFHTEGNNLADKLATQGSYVVNAGKRTADGSEFEKRTADGSEFESPKKKAKVE

SEQ ID NO: 554 - protein, 2081 aa, synthetic construct
MPAAKRVKLDGGDKKYSIGLDIGTNSVGWAVITDEYKVPSKKFKVLGNTDRHSIKKNLIGALLFDSGETAEATRLKRTARRRYTRRKNRICYLQEIFSNEMAKVDDSFFHRLEESFLVEEDKKHERHPIFGNIVDEVAYHEKYPTIYHLRKKLVDSTDKADLRLIYLALAHMIKFRGHFLIEGDLNPDNSDVDKLFIQLVQTYNQLFEENPINASGVDAKAILSARLSKSRRLENLIAQLPGEKKNGLFGNLIALSLGLTPNFKSNFDLAEDAKLQLSKDTYDDDLDNLLAQIGDQYADLFLAAKNLSDAILLSDILRVNTEITKAPLSASMIKRYDEHHQDLTLLKALVRQQLPEKYKEIFFDQSKNGYAGYIDGGASQEEFYKFIKPILEKMDGTEELLVKLNREDLLRKQRTFDNGSIPHQIHLGELHAILRRQEDFYPFLKDNREKIEKILTFRIPYYVGPLARGNSRFAWMTRKSEETITPWNFEEVVDKGASAQSFIERMTNFDKNLPNEKVLPKHSLLYEYFTVYNELTKVKYVTEGMRKPAFLSGEQKKAIVDLLFKTNRKVTVKQLKEDYFKKIECFDSVEISGVEDRFNASLGTYHDLLKIIKDKDFLDNEENEDILEDIVLTLTLFEDREMIEERLKTYAHLFDDKVMKQLKRRRYTGWGRLSRKLINGIRDKQSGKTILDFLKSDGFANRNFMQLIHDDSLTFKEDIQKAQVSGQGDSLHEHIANLAGSPAIKKGILQTVKVVDELVKVMGRHKPENIVIEMARENQTTQKGQKNSRERMKRIEEGIKELGSQILKEHPVENTQLQNEKLYLYYLQNGRDMYVDQELDINRLSDYDVDHIVPQSFLKDDSIDNKVLTRSDKARGKSDNVPSEEVVKKMKNYWRQLLNAKLITQRKFDNLTKAERGGLSELDKAGFIKRQLVETRQITKHVAQILDSRMNTKYDENDKLIREVKVITLKSKLVSDFRKDFQFYKVREINNYHHAHDAYLNAVVGTALIKKYPKLESEFVYGDYKVYDVRKMIAKSEQEIGKATAKYFFYSNIMNFFKTEITLANGEIRKRPLIETNGETGEIVWDKGRDFATVRKVLSMPQVNIVKKTEVQTGGFSKESILPKRNSDKLIARKKDWDPKKYGGFDSPTVAYSVLVVAKVEKGKSKKLKSVKELLGITIMERSSFEKNPIDFLEAKGYKEVKKDLIIKLPKYSLFELENGRKRMLASAGELQKGNELALPSKYVNFLYLASHYEKLKGSPEDNEQKQLFVEQHKHYLDEIIEQISEFSKRVILADANLDKVLSAYNKHRDKPIREQAENIIHLFTLTNLGAPAAFKYFDTTIDRKRYTSTKEVLDATLIHQSITGLYETRIDLSQLGGDGGEAAAKGGIPWLMKKPLQLTTLVPLQEYEERLLKQTMLTGSYKEKLQSLFLKYDALWQHWENQVGHRRIKPHHIATGTVNPRPQKQYPINPKAKASIQTVINDLLKQGVLIQQNSIMNTPVYPVPKPDGKWRMVLDYREVNKTIPLIAAQNQHSAGILSSIFRGKYKTTLDLSNGFWAHSITPESYWLTAFTWLGQQYCWTRLPQGFLNSPALFNADVVDLLKEVPNVQVYVDDIYISHDDPREHLEQLEKVFSLLLNAGYVVSLKKSEIAQHEVEFLGFNITKEGRGLTETFKQKLLNITPPRDLKQLQSILGKLNFARNFIPNFSELVKPLYNIIATAPGKYITWTTDNSQQLQNIISMLNSAENLEERNPEVRLIMKVNTSPSAGYIRFYNEFAKRPIMYLNYVYTKAEVKFTNTEKLLTTIHKGLIKALDLGMGQEILVYSPIVSMTKIQKTPLPERKALPIRWITWMSYLEDPRIQFHYDKTLPELQQVPTVTDDIIAKIKHPSEFSMVFYTDGSAIKHPNVNKSHNAGMGIAQVQFKPEFTVINTWSIPLGDHTAQLAEVAAVEFACKKALKIDGPVLIVTDSFYVAESVNKELPYWQSNGFFNNKKKPLKHVSKWKSIADCIQLKPDIIIIHEKGHQPTASTFHTEGNNLADKLATQGSYVVNAGKRTADGSEFEKRTADGSEFESPKKKAKVE

SEQ ID NO: 555 - protein, 2087 aa, synthetic construct
MPAAKRVKLDGGDKKYSIGLDIGTNSVGWAVITDEYKVPSKKFKVLGNTDRHSIKKNLIGALLFDSGETAEATRLKRTARRRYTRRKNRICYLQEIFSNEMAKVDDSFFHRLEESFLVEEDKKHERHPIFGNIVDEVAYHEKYPTIYHLRKKLVDSTDKADLRLIYLALAHMIKFRGHFLIEGDLNPDNSDVDKLFIQLVQTYNQLFEENPINASGVDAKAILSARLSKSRRLENLIAQLPGEKKNGLFGNLIALSLGLTPNFKSNFDLAEDAKLQLSKDTYDDDLDNLLAQIGDQYADLFLAAKNLSDAILLSDILRVNTEITKAPLSASMIKRYDEHHQDLTLLKALVRQQLPEKYKEIFFDQSKNGYAGYIDGGASQEEFYKFIKPILEKMDGTEELLVKLNREDLLRKQRTFDNGSIPHQIHLGELHAILRRQEDFYPFLKDNREKIEKILTFRIPYYVGPLARGNSRFAWMTRKSEETITPWNFEEVVDKGASAQSFIERMTNFDKNLPNEKVLPKHSLLYEYFTVYNELTKVKYVTEGMRKPAFLSGEQKKAIVDLLFKTNRKVTVKQLKEDYFKKIECFDSVEISGVEDRFNASLGTYHDLLKIIKDKDFLDNEENEDILEDIVLTLTLFEDREMIEERLKTYAHLFDDKVMKQLKRRRYTGWGRLSRKLINGIRDKQSGKTILDFLKSDGFANRNFMQLIHDDSLTFKEDIQKAQVSGQGDSLHEHIANLAGSPAIKKGILQTVKVVDELVKVMGRHKPENIVIEMARENQTTQKGQKNSRERMKRIEEGIKELGSQILKEHPVENTQLQNEKLYLYYLQNGRDMYVDQELDINRLSDYDVDHIVPQSFLKDDSIDNKVLTRSDKARGKSDNVPSEEVVKKMKNYWRQLLNAKLITQRKFDNLTKAERGGLSELDKAGFIKRQLVETRQITKHVAQILDSRMNTKYDENDKLIREVKVITLKSKLVSDFRKDFQFYKVREINNYHHAHDAYLNAVVGTALIKKYPKLESEFVYGDYKVYDVRKMIAKSEQEIGKATAKYFFYSNIMNFFKTEITLANGEIRKRPLIETNGETGEIVWDKGRDFATVRKVLSMPQVNIVKKTEVQTGGFSKESILPKRNSDKLIARKKDWDPKKYGGFDSPTVAYSVLVVAKVEKGKSKKLKSVKELLGITIMERSSFEKNPIDFLEAKGYKEVKKDLIIKLPKYSLFELENGRKRMLASAGELQKGNELALPSKYVNFLYLASHYEKLKGSPEDNEQKQLFVEQHKHYLDEIIEQISEFSKRVILADANLDKVLSAYNKHRDKPIREQAENIIHLFTLTNLGAPAAFKYFDTTIDRKRYTSTKEVLDATLIHQSITGLYETRIDLSQLGGDGGEAAAKGGSGGGGGIPWLMKKPLQLTTLVPLQEYEERLLKQTMLTGSYKEKLQSLFLKYDALWQHWENQVGHRRIKPHHIATGTVNPRPQKQYPINPKAKASIQTVINDLLKQGVLIQQNSIMNTPVYPVPKPDGKWRMVLDYREVNKTIPLIAAQNQHSAGILSSIFRGKYKTTLDLSNGFWAHSITPESYWLTAFTWLGQQYCWTRLPQGFLNSPALFNADVVDLLKEVPNVQVYVDDIYISHDDPREHLEQLEKVFSLLLNAGYVVSLKKSEIAQHEVEFLGFNITKEGRGLTETFKQKLLNITPPRDLKQLQSILGKLNFARNFIPNFSELVKPLYNIIATAPGKYITWTTDNSQQLQNIISMLNSAENLEERNPEVRLIMKVNTSPSAGYIRFYNEFAKRPIMYLNYVYTKAEVKFTNTEKLLTTIHKGLIKALDLGMGQEILVYSPIVSMTKIQKTPLPERKALPIRWITWMSYLEDPRIQFHYDKTLPELQQVPTVTDDIIAKIKHPSEFSMVFYTDGSAIKHPNVNKSHNAGMGIAQVQFKPEFTVINTWSIPLGDHTAQLAEVAAVEFACKKALKIDGPVLIVTDSFYVAESVNKELPYWQSNGFFNNKKKPLKHVSKWKSIADCIQLKPDIIIIHEKGHQPTASTFHTEGNNLADKLATQGSYVVNAGKRTADGSEFEKRTADGSEFESPKKKAKVE

SEQ ID NO: 556 - protein, 2096 aa, synthetic construct
MPAAKRVKLDGGDKKYSIGLDIGTNSVGWAVITDEYKVPSKKFKVLGNTDRHSIKKNLIGALLFDSGETAEATRLKRTARRRYTRRKNRICYLQEIFSNEMAKVDDSFFHRLEESFLVEEDKKHERHPIFGNIVDEVAYHEKYPTIYHLRKKLVDSTDKADLRLIYLALAHMIKFRGHFLIEGDLNPDNSDVDKLFIQLVQTYNQLFEENPINASGVDAKAILSARLSKSRRLENLIAQLPGEKKNGLFGNLIALSLGLTPNFKSNFDLAEDAKLQLSKDTYDDDLDNLLAQIGDQYADLFLAAKNLSDAILLSDILRVNTEITKAPLSASMIKRYDEHHQDLTLLKALVRQQLPEKYKEIFFDQSKNGYAGYIDGGASQEEFYKFIKPILEKMDGTEELLVKLNREDLLRKQRTFDNGSIPHQIHLGELHAILRRQEDFYPFLKDNREKIEKILTFRIPYYVGPLARGNSRFAWMTRKSEETITPWNFEEVVDKGASAQSFIERMTNFDKNLPNEKVLPKHSLLYEYFTVYNELTKVKYVTEGMRKPAFLSGEQKKAIVDLLFKTNRKVTVKQLKEDYFKKIECFDSVEISGVEDRFNASLGTYHDLLKIIKDKDFLDNEENEDILEDIVLTLTLFEDREMIEERLKTYAHLFDDKVMKQLKRRRYTGWGRLSRKLINGIRDKQSGKTILDFLKSDGFANRNFMQLIHDDSLTFKEDIQKAQVSGQGDSLHEHIANLAGSPAIKKGILQTVKVVDELVKVMGRHKPENIVIEMARENQTTQKGQKNSRERMKRIEEGIKELGSQILKEHPVENTQLQNEKLYLYYLQNGRDMYVDQELDINRLSDYDVDHIVPQSFLKDDSIDNKVLTRSDKARGKSDNVPSEEVVKKMKNYWRQLLNAKLITQRKFDNLTKAERGGLSELDKAGFIKRQLVETRQITKHVAQILDSRMNTKYDENDKLIREVKVITLKSKLVSDFRKDFQFYKVREINNYHHAHDAYLNAVVGTALIKKYPKLESEFVYGDYKVYDVRKMIAKSEQEIGKATAKYFFYSNIMNFFKTEITLANGEIRKRPLIETNGETGEIVWDKGRDFATVRKVLSMPQVNIVKKTEVQTGGFSKESILPKRNSDKLIARKKDWDPKKYGGFDSPTVAYSVLVVAKVEKGKSKKLKSVKELLGITIMERSSFEKNPIDFLEAKGYKEVKKDLIIKLPKYSLFELENGRKRMLASAGELQKGNELALPSKYVNFLYLASHYEKLKGSPEDNEQKQLFVEQHKHYLDEIIEQISEFSKRVILADANLDKVLSAYNKHRDKPIREQAENIIHLFTLTNLGAPAAFKYFDTTIDRKRYTSTKEVLDATLIHQSITGLYETRIDLSQLGGDGGEAAAKEAAAKEAAAKEAAAKGGIPWLMKKPLQLTTLVPLQEYEERLLKQTMLTGSYKEKLQSLFLKYDALWQHWENQVGHRRIKPHHIATGTVNPRPQKQYPINPKAKASIQTVINDLLKQGVLIQQNSIMNTPVYPVPKPDGKWRMVLDYREVNKTIPLIAAQNQHSAGILSSIFRGKYKTTLDLSNGFWAHSITPESYWLTAFTWLGQQYCWTRLPQGFLNSPALFNADVVDLLKEVPNVQVYVDDIYISHDDPREHLEQLEKVFSLLLNAGYVVSLKKSEIAQHEVEFLGFNITKEGRGLTETFKQKLLNITPPRDLKQLQSILGKLNFARNFIPNFSELVKPLYNIIATAPGKYITWTTDNSQQLQNIISMLNSAENLEERNPEVRLIMKVNTSPSAGYIRFYNEFAKRPIMYLNYVYTKAEVKFTNTEKLLTTIHKGLIKALDLGMGQEILVYSPIVSMTKIQKTPLPERKALPIRWITWMSYLEDPRIQFHYDKTLPELQQVPTVTDDIIAKIKHPSEFSMVFYTDGSAIKHPNVNKSHNAGMGIAQVQFKPEFTVINTWSIPLGDHTAQLAEVAAVEFACKKALKIDGPVLIVTDSFYVAESVNKELPYWQSNGFFNNKKKPLKHVSKWKSIADCIQLKPDIIIIHEKGHQPTASTFHTEGNNLADKLATQGSYVVNAGKRTADGSEFEKRTADGSEFESPKKKAKVE

SEQ ID NO: 557 - protein, 2086 aa, synthetic construct
MPAAKRVKLDGGDKKYSIGLDIGTNSVGWAVITDEYKVPSKKFKVLGNTDRHSIKKNLIGALLFDSGETAEATRLKRTARRRYTRRKNRICYLQEIFSNEMAKVDDSFFHRLEESFLVEEDKKHERHPIFGNIVDEVAYHEKYPTIYHLRKKLVDSTDKADLRLIYLALAHMIKFRGHFLIEGDLNPDNSDVDKLFIQLVQTYNQLFEENPINASGVDAKAILSARLSKSRRLENLIAQLPGEKKNGLFGNLIALSLGLTPNFKSNFDLAEDAKLQLSKDTYDDDLDNLLAQIGDQYADLFLAAKNLSDAILLSDILRVNTEITKAPLSASMIKRYDEHHQDLTLLKALVRQQLPEKYKEIFFDQSKNGYAGYIDGGASQEEFYKFIKPILEKMDGTEELLVKLNREDLLRKQRTFDNGSIPHQIHLGELHAILRRQEDFYPFLKDNREKIEKILTFRIPYYVGPLARGNSRFAWMTRKSEETITPWNFEEVVDKGASAQSFIERMTNFDKNLPNEKVLPKHSLLYEYFTVYNELTKVKYVTEGMRKPAFLSGEQKKAIVDLLFKTNRKVTVKQLKEDYFKKIECFDSVEISGVEDRFNASLGTYHDLLKIIKDKDFLDNEENEDILEDIVLTLTLFEDREMIEERLKTYAHLFDDKVMKQLKRRRYTGWGRLSRKLINGIRDKQSGKTILDFLKSDGFANRNFMQLIHDDSLTFKEDIQKAQVSGQGDSLHEHIANLAGSPAIKKGILQTVKVVDELVKVMGRHKPENIVIEMARENQTTQKGQKNSRERMKRIEEGIKELGSQILKEHPVENTQLQNEKLYLYYLQNGRDMYVDQELDINRLSDYDVDHIVPQSFLKDDSIDNKVLTRSDKARGKSDNVPSEEVVKKMKNYWRQLLNAKLITQRKFDNLTKAERGGLSELDKAGFIKRQLVETRQITKHVAQILDSRMNTKYDENDKLIREVKVITLKSKLVSDFRKDFQFYKVREINNYHHAHDAYLNAVVGTALIKKYPKLESEFVYGDYKVYDVRKMIAKSEQEIGKATAKYFFYSNIMNFFKTEITLANGEIRKRPLIETNGETGEIVWDKGRDFATVRKVLSMPQVNIVKKTEVQTGGFSKESILPKRNSDKLIARKKDWDPKKYGGFDSPTVAYSVLVVAKVEKGKSKKLKSVKELLGITIMERSSFEKNPIDFLEAKGYKEVKKDLIIKLPKYSLFELENGRKRMLASAGELQKGNELALPSKYVNFLYLASHYEKLKGSPEDNEQKQLFVEQHKHYLDEIIEQISEFSKRVILADANLDKVLSAYNKHRDKPIREQAENIIHLFTLTNLGAPAAFKYFDTTIDRKRYTSTKEVLDATLIHQSITGLYETRIDLSQLGGDGGGGGGSGGGGSGGIPWLMKKPLQLTTLVPLQEYEERLLKQTMLTGSYKEKLQSLFLKYDALWQHWENQVGHRRIKPHHIATGTVNPRPQKQYPINPKAKASIQTVINDLLKQGVLIQQNSIMNTPVYPVPKPDGKWRMVLDYREVNKTIPLIAAQNQHSAGILSSIFRGKYKTTLDLSNGFWAHSITPESYWLTAFTWLGQQYCWTRLPQGFLNSPALFNADVVDLLKEVPNVQVYVDDIYISHDDPREHLEQLEKVFSLLLNAGYVVSLKKSEIAQHEVEFLGFNITKEGRGLTETFKQKLLNITPPRDLKQLQSILGKLNFARNFIPNFSELVKPLYNIIATAPGKYITWTTDNSQQLQNIISMLNSAENLEERNPEVRLIMKVNTSPSAGYIRFYNEFAKRPIMYLNYVYTKAEVKFTNTEKLLTTIHKGLIKALDLGMGQEILVYSPIVSMTKIQKTPLPERKALPIRWITWMSYLEDPRIQFHYDKTLPELQQVPTVTDDIIAKIKHPSEFSMVFYTDGSAIKHPNVNKSHNAGMGIAQVQFKPEFTVINTWSIPLGDHTAQLAEVAAVEFACKKALKIDGPVLIVTDSFYVAESVNKELPYWQSNGFFNNKKKPLKHVSKWKSIADCIQLKPDIIIIHEKGHQPTASTFHTEGNNLADKLATQGSYVVNAGKRTADGSEFEKRTADGSEFESPKKKAKVE

SEQ ID NO: 558 - protein, 2087 aa, synthetic construct
MPAAKRVKLDGGDKKYSIGLDIGTNSVGWAVITDEYKVPSKKFKVLGNTDRHSIKKNLIGALLFDSGETAEATRLKRTARRRYTRRKNRICYLQEIFSNEMAKVDDSFFHRLEESFLVEEDKKHERHPIFGNIVDEVAYHEKYPTIYHLRKKLVDSTDKADLRLIYLALAHMIKFRGHFLIEGDLNPDNSDVDKLFIQLVQTYNQLFEENPINASGVDAKAILSARLSKSRRLENLIAQLPGEKKNGLFGNLIALSLGLTPNFKSNFDLAEDAKLQLSKDTYDDDLDNLLAQIGDQYADLFLAAKNLSDAILLSDILRVNTEITKAPLSASMIKRYDEHHQDLTLLKALVRQQLPEKYKEIFFDQSKNGYAGYIDGGASQEEFYKFIKPILEKMDGTEELLVKLNREDLLRKQRTFDNGSIPHQIHLGELHAILRRQEDFYPFLKDNREKIEKILTFRIPYYVGPLARGNSRFAWMTRKSEETITPWNFEEVVDKGASAQSFIERMTNFDKNLPNEKVLPKHSLLYEYFTVYNELTKVKYVTEGMRKPAFLSGEQKKAIVDLLFKTNRKVTVKQLKEDYFKKIECFDSVEISGVEDRFNASLGTYHDLLKIIKDKDFLDNEENEDILEDIVLTLTLFEDREMIEERLKTYAHLFDDKVMKQLKRRRYTGWGRLSRKLINGIRDKQSGKTILDFLKSDGFANRNFMQLIHDDSLTFKEDIQKAQVSGQGDSLHEHIANLAGSPAIKKGILQTVKVVDELVKVMGRHKPENIVIEMARENQTTQKGQKNSRERMKRIEEGIKELGSQILKEHPVENTQLQNEKLYLYYLQNGRDMYVDQELDINRLSDYDVDHIVPQSFLKDDSIDNKVLTRSDKARGKSDNVPSEEVVKKMKNYWRQLLNAKLITQRKFDNLTKAERGGLSELDKAGFIKRQLVETRQITKHVAQILDSRMNTKYDENDKLIREVKVITLKSKLVSDFRKDFQFYKVREINNYHHAHDAYLNAVVGTALIKKYPKLESEFVYGDYKVYDVRKMIAKSEQEIGKATAKYFFYSNIMNFFKTEITLANGEIRKRPLIETNGETGEIVWDKGRDFATVRKVLSMPQVNIVKKTEVQTGGFSKESILPKRNSDKLIARKKDWDPKKYGGFDSPTVAYSVLVVAKVEKGKSKKLKSVKELLGITIMERSSFEKNPIDFLEAKGYKEVKKDLIIKLPKYSLFELENGRKRMLASAGELQKGNELALPSKYVNFLYLASHYEKLKGSPEDNEQKQLFVEQHKHYLDEIIEQISEFSKRVILADANLDKVLSAYNKHRDKPIREQAENIIHLFTLTNLGAPAAFKYFDTTIDRKRYTSTKEVLDATLIHQSITGLYETRIDLSQLGGDGGEAAAKPAPGSSGGIPWLMKKPLQLTTLVPLQEYEERLLKQTMLTGSYKEKLQSLFLKYDALWQHWENQVGHRRIKPHHIATGTVNPRPQKQYPINPKAKASIQTVINDLLKQGVLIQQNSIMNTPVYPVPKPDGKWRMVLDYREVNKTIPLIAAQNQHSAGILSSIFRGKYKTTLDLSNGFWAHSITPESYWLTAFTWLGQQYCWTRLPQGFLNSPALFNADVVDLLKEVPNVQVYVDDIYISHDDPREHLEQLEKVFSLLLNAGYVVSLKKSEIAQHEVEFLGFNITKEGRGLTETFKQKLLNITPPRDLKQLQSILGKLNFARNFIPNFSELVKPLYNIIATAPGKYITWTTDNSQQLQNIISMLNSAENLEERNPEVRLIMKVNTSPSAGYIRFYNEFAKRPIMYLNYVYTKAEVKFTNTEKLLTTIHKGLIKALDLGMGQEILVYSPIVSMTKIQKTPLPERKALPIRWITWMSYLEDPRIQFHYDKTLPELQQVPTVTDDIIAKIKHPSEFSMVFYTDGSAIKHPNVNKSHNAGMGIAQVQFKPEFTVINTWSIPLGDHTAQLAEVAAVEFACKKALKIDGPVLIVTDSFYVAESVNKELPYWQSNGFFNNKKKPLKHVSKWKSIADCIQLKPDIIIIHEKGHQPTASTFHTEGNNLADKLATQGSYVVNAGKRTADGSEFEKRTADGSEFESPKKKAKVE

SEQ ID NO: 559 - protein, 2087 aa, synthetic construct
MPAAKRVKLDGGDKKYSIGLDIGTNSVGWAVITDEYKVPSKKFKVLGNTDRHSIKKNLIGALLFDSGETAEATRLKRTARRRYTRRKNRICYLQEIFSNEMAKVDDSFFHRLEESFLVEEDKKHERHPIFGNIVDEVAYHEKYPTIYHLRKKLVDSTDKADLRLIYLALAHMIKFRGHFLIEGDLNPDNSDVDKLFIQLVQTYNQLFEENPINASGVDAKAILSARLSKSRRLENLIAQLPGEKKNGLFGNLIALSLGLTPNFKSNFDLAEDAKLQLSKDTYDDDLDNLLAQIGDQYADLFLAAKNLSDAILLSDILRVNTEITKAPLSASMIKRYDEHHQDLTLLKALVRQQLPEKYKEIFFDQSKNGYAGYIDGGASQEEFYKFIKPILEKMDGTEELLVKLNREDLLRKQRTFDNGSIPHQIHLGELHAILRRQEDFYPFLKDNREKIEKILTFRIPYYVGPLARGNSRFAWMTRKSEETITPWNFEEVVDKGASAQSFIERMTNFDKNLPNEKVLPKHSLLYEYFTVYNELTKVKYVTEGMRKPAFLSGEQKKAIVDLLFKTNRKVTVKQLKEDYFKKIECFDSVEISGVEDRFNASLGTYHDLLKIIKDKDFLDNEENEDILEDIVLTLTLFEDREMIEERLKTYAHLFDDKVMKQLKRRRYTGWGRLSRKLINGIRDKQSGKTILDFLKSDGFANRNFMQLIHDDSLTFKEDIQKAQVSGQGDSLHEHIANLAGSPAIKKGILQTVKVVDELVKVMGRHKPENIVIEMARENQTTQKGQKNSRERMKRIEEGIKELGSQILKEHPVENTQLQNEKLYLYYLQNGRDMYVDQELDINRLSDYDVDHIVPQSFLKDDSIDNKVLTRSDKARGKSDNVPSEEVVKKMKNYWRQLLNAKLITQRKFDNLTKAERGGLSELDKAGFIKRQLVETRQITKHVAQILDSRMNTKYDENDKLIREVKVITLKSKLVSDFRKDFQFYKVREINNYHHAHDAYLNAVVGTALIKKYPKLESEFVYGDYKVYDVRKMIAKSEQEIGKATAKYFFYSNIMNFFKTEITLANGEIRKRPLIETNGETGEIVWDKGRDFATVRKVLSMPQVNIVKKTEVQTGGFSKESILPKRNSDKLIARKKDWDPKKYGGFDSPTVAYSVLVVAKVEKGKSKKLKSVKELLGITIMERSSFEKNPIDFLEAKGYKEVKKDLIIKLPKYSLFELENGRKRMLASAGELQKGNELALPSKYVNFLYLASHYEKLKGSPEDNEQKQLFVEQHKHYLDEIIEQISEFSKRVILADANLDKVLSAYNKHRDKPIREQAENIIHLFTLTNLGAPAAFKYFDTTIDRKRYTSTKEVLDATLIHQSITGLYETRIDLSQLGGDGGPAPEAAAKGGGGGIPWLMKKPLQLTTLVPLQEYEERLLKQTMLTGSYKEKLQSLFLKYDALWQHWENQVGHRRIKPHHIATGTVNPRPQKQYPINPKAKASIQTVINDLLKQGVLIQQNSIMNTPVYPVPKPDGKWRMVLDYREVNKTIPLIAAQNQHSAGILSSIFRGKYKTTLDLSNGFWAHSITPESYWLTAFTWLGQQYCWTRLPQGFLNSPALFNADVVDLLKEVPNVQVYVDDIYISHDDPREHLEQLEKVFSLLLNAGYVVSLKKSEIAQHEVEFLGFNITKEGRGLTETFKQKLLNITPPRDLKQLQSILGKLNFARNFIPNFSELVKPLYNIIATAPGKYITWTTDNSQQLQNIISMLNSAENLEERNPEVRLIMKVNTSPSAGYIRFYNEFAKRPIMYLNYVYTKAEVKFTNTEKLLTTIHKGLIKALDLGMGQEILVYSPIVSMTKIQKTPLPERKALPIRWITWMSYLEDPRIQFHYDKTLPELQQVPTVTDDIIAKIKHPSEFSMVFYTDGSAIKHPNVNKSHNAGMGIAQVQFKPEFTVINTWSIPLGDHTAQLAEVAAVEFACKKALKIDGPVLIVTDSFYVAESVNKELPYWQSNGFFNNKKKPLKHVSKWKSIADCIQLKPDIIIIHEKGHQPTASTFHTEGNNLADKLATQGSYVVNAGKRTADGSEFEKRTADGSEFESPKKKAKVE

SEQ ID NO: 560 - protein, 2083 aa, synthetic construct
MPAAKRVKLDGGDKKYSIGLDIGTNSVGWAVITDEYKVPSKKFKVLGNTDRHSIKKNLIGALLFDSGETAEATRLKRTARRRYTRRKNRICYLQEIFSNEMAKVDDSFFHRLEESFLVEEDKKHERHPIFGNIVDEVAYHEKYPTIYHLRKKLVDSTDKADLRLIYLALAHMIKFRGHFLIEGDLNPDNSDVDKLFIQLVQTYNQLFEENPINASGVDAKAILSARLSKSRRLENLIAQLPGEKKNGLFGNLIALSLGLTPNFKSNFDLAEDAKLQLSKDTYDDDLDNLLAQIGDQYADLFLAAKNLSDAILLSDILRVNTEITKAPLSASMIKRYDEHHQDLTLLKALVRQQLPEKYKEIFFDQSKNGYAGYIDGGASQEEFYKFIKPILEKMDGTEELLVKLNREDLLRKQRTFDNGSIPHQIHLGELHAILRRQEDFYPFLKDNREKIEKILTFRIPYYVGPLARGNSRFAWMTRKSEETITPWNFEEVVDKGASAQSFIERMTNFDKNLPNEKVLPKHSLLYEYFTVYNELTKVKYVTEGMRKPAFLSGEQKKAIVDLLFKTNRKVTVKQLKEDYFKKIECFDSVEISGVEDRFNASLGTYHDLLKIIKDKDFLDNEENEDILEDIVLTLTLFEDREMIEERLKTYAHLFDDKVMKQLKRRRYTGWGRLSRKLINGIRDKQSGKTILDFLKSDGFANRNFMQLIHDDSLTFKEDIQKAQVSGQGDSLHEHIANLAGSPAIKKGILQTVKVVDELVKVMGRHKPENIVIEMARENQTTQKGQKNSRERMKRIEEGIKELGSQILKEHPVENTQLQNEKLYLYYLQNGRDMYVDQELDINRLSDYDVDHIVPQSFLKDDSIDNKVLTRSDKARGKSDNVPSEEVVKKMKNYWRQLLNAKLITQRKFDNLTKAERGGLSELDKAGFIKRQLVETRQITKHVAQILDSRMNTKYDENDKLIREVKVITLKSKLVSDFRKDFQFYKVREINNYHHAHDAYLNAVVGTALIKKYPKLESEFVYGDYKVYDVRKMIAKSEQEIGKATAKYFFYSNIMNFFKTEITLANGEIRKRPLIETNGETGEIVWDKGRDFATVRKVLSMPQVNIVKKTEVQTGGFSKESILPKRNSDKLIARKKDWDPKKYGGFDSPTVAYSVLVVAKVEKGKSKKLKSVKELLGITIMERSSFEKNPIDFLEAKGYKEVKKDLIIKLPKYSLFELENGRKRMLASAGELQKGNELALPSKYVNFLYLASHYEKLKGSPEDNEQKQLFVEQHKHYLDEIIEQISEFSKRVILADANLDKVLSAYNKHRDKPIREQAENIIHLFTLTNLGAPAAFKYFDTTIDRKRYTSTKEVLDATLIHQSITGLYETRIDLSQLGGDGGPAPAPAPGGIPWLMKKPLQLTTLVPLQEYEERLLKQTMLTGSYKEKLQSLFLKYDALWQHWENQVGHRRIKPHHIATGTVNPRPQKQYPINPKAKASIQTVINDLLKQGVLIQQNSIMNTPVYPVPKPDGKWRMVLDYREVNKTIPLIAAQNQHSAGILSSIFRGKYKTTLDLSNGFWAHSITPESYWLTAFTWLGQQYCWTRLPQGFLNSPALFNADVVDLLKEVPNVQVYVDDIYISHDDPREHLEQLEKVFSLLLNAGYVVSLKKSEIAQHEVEFLGFNITKEGRGLTETFKQKLLNITPPRDLKQLQSILGKLNFARNFIPNFSELVKPLYNIIATAPGKYITWTTDNSQQLQNIISMLNSAENLEERNPEVRLIMKVNTSPSAGYIRFYNEFAKRPIMYLNYVYTKAEVKFTNTEKLLTTIHKGLIKALDLGMGQEILVYSPIVSMTKIQKTPLPERKALPIRWITWMSYLEDPRIQFHYDKTLPELQQVPTVTDDIIAKIKHPSEFSMVFYTDGSAIKHPNVNKSHNAGMGIAQVQFKPEFTVINTWSIPLGDHTAQLAEVAAVEFACKKALKIDGPVLIVTDSFYVAESVNKELPYWQSNGFFNNKKKPLKHVSKWKSIADCIQLKPDIIIIHEKGHQPTASTFHTEGNNLADKLATQGSYVVNAGKRTADGSEFEKRTADGSEFESPKKKAKVE

SEQ ID NO: 561 - protein, 2087 aa, synthetic construct
MPAAKRVKLDGGDKKYSIGLDIGTNSVGWAVITDEYKVPSKKFKVLGNTDRHSIKKNLIGALLFDSGETAEATRLKRTARRRYTRRKNRICYLQEIFSNEMAKVDDSFFHRLEESFLVEEDKKHERHPIFGNIVDEVAYHEKYPTIYHLRKKLVDSTDKADLRLIYLALAHMIKFRGHFLIEGDLNPDNSDVDKLFIQLVQTYNQLFEENPINASGVDAKAILSARLSKSRRLENLIAQLPGEKKNGLFGNLIALSLGLTPNFKSNFDLAEDAKLQLSKDTYDDDLDNLLAQIGDQYADLFLAAKNLSDAILLSDILRVNTEITKAPLSASMIKRYDEHHQDLTLLKALVRQQLPEKYKEIFFDQSKNGYAGYIDGGASQEEFYKFIKPILEKMDGTEELLVKLNREDLLRKQRTFDNGSIPHQIHLGELHAILRRQEDFYPFLKDNREKIEKILTFRIPYYVGPLARGNSRFAWMTRKSEETITPWNFEEVVDKGASAQSFIERMTNFDKNLPNEKVLPKHSLLYEYFTVYNELTKVKYVTEGMRKPAFLSGEQKKAIVDLLFKTNRKVTVKQLKEDYFKKIECFDSVEISGVEDRFNASLGTYHDLLKIIKDKDFLDNEENEDILEDIVLTLTLFEDREMIEERLKTYAHLFDDKVMKQLKRRRYTGWGRLSRKLINGIRDKQSGKTILDFLKSDGFANRNFMQLIHDDSLTFKEDIQKAQVSGQGDSLHEHIANLAGSPAIKKGILQTVKVVDELVKVMGRHKPENIVIEMARENQTTQKGQKNSRERMKRIEEGIKELGSQILKEHPVENTQLQNEKLYLYYLQNGRDMYVDQELDINRLSDYDVDHIVPQSFLKDDSIDNKVLTRSDKARGKSDNVPSEEVVKKMKNYWRQLLNAKLITQRKFDNLTKAERGGLSELDKAGFIKRQLVETRQITKHVAQILDSRMNTKYDENDKLIREVKVITLKSKLVSDFRKDFQFYKVREINNYHHAHDAYLNAVVGTALIKKYPKLESEFVYGDYKVYDVRKMIAKSEQEIGKATAKYFFYSNIMNFFKTEITLANGEIRKRPLIETNGETGEIVWDKGRDFATVRKVLSMPQVNIVKKTEVQTGGFSKESILPKRNSDKLIARKKDWDPKKYGGFDSPTVAYSVLVVAKVEKGKSKKLKSVKELLGITIMERSSFEKNPIDFLEAKGYKEVKKDLIIKLPKYSLFELENGRKRMLASAGELQKGNELALPSKYVNFLYLASHYEKLKGSPEDNEQKQLFVEQHKHYLDEIIEQISEFSKRVILADANLDKVLSAYNKHRDKPIREQAENIIHLFTLTNLGAPAAFKYFDTTIDRKRYTSTKEVLDATLIHQSITGLYETRIDLSQLGGDGGGGSEAAAKGSSGGIPWLMKKPLQLTTLVPLQEYEERLLKQTMLTGSYKEKLQSLFLKYDALWQHWENQVGHRRIKPHHIATGTVNPRPQKQYPINPKAKASIQTVINDLLKQGVLIQQNSIMNTPVYPVPKPDGKWRMVLDYREVNKTIPLIAAQNQHSAGILSSIFRGKYKTTLDLSNGFWAHSITPESYWLTAFTWLGQQYCWTRLPQGFLNSPALFNADVVDLLKEVPNVQVYVDDIYISHDDPREHLEQLEKVFSLLLNAGYVVSLKKSEIAQHEVEFLGFNITKEGRGLTETFKQKLLNITPPRDLKQLQSILGKLNFARNFIPNFSELVKPLYNIIATAPGKYITWTTDNSQQLQNIISMLNSAENLEERNPEVRLIMKVNTSPSAGYIRFYNEFAKRPIMYLNYVYTKAEVKFTNTEKLLTTIHKGLIKALDLGMGQEILVYSPIVSMTKIQKTPLPERKALPIRWITWMSYLEDPRIQFHYDKTLPELQQVPTVTDDIIAKIKHPSEFSMVFYTDGSAIKHPNVNKSHNAGMGIAQVQFKPEFTVINTWSIPLGDHTAQLAEVAAVEFACKKALKIDGPVLIVTDSFYVAESVNKELPYWQSNGFFNNKKKPLKHVSKWKSIADCIQLKPDIIIIHEKGHQPTASTFHTEGNNLADKLATQGSYVVNAGKRTADGSEFEKRTADGSEFESPKKKAKVE

SEQ ID NO: 562 - protein, 2085 aa, synthetic construct
MPAAKRVKLDGGDKKYSIGLDIGTNSVGWAVITDEYKVPSKKFKVLGNTDRHSIKKNLIGALLFDSGETAEATRLKRTARRRYTRRKNRICYLQEIFSNEMAKVDDSFFHRLEESFLVEEDKKHERHPIFGNIVDEVAYHEKYPTIYHLRKKLVDSTDKADLRLIYLALAHMIKFRGHFLIEGDLNPDNSDVDKLFIQLVQTYNQLFEENPINASGVDAKAILSARLSKSRRLENLIAQLPGEKKNGLFGNLIALSLGLTPNFKSNFDLAEDAKLQLSKDTYDDDLDNLLAQIGDQYADLFLAAKNLSDAILLSDILRVNTEITKAPLSASMIKRYDEHHQDLTLLKALVRQQLPEKYKEIFFDQSKNGYAGYIDGGASQEEFYKFIKPILEKMDGTEELLVKLNREDLLRKQRTFDNGSIPHQIHLGELHAILRRQEDFYPFLKDNREKIEKILTFRIPYYVGPLARGNSRFAWMTRKSEETITPWNFEEVVDKGASAQSFIERMTNFDKNLPNEKVLPKHSLLYEYFTVYNELTKVKYVTEGMRKPAFLSGEQKKAIVDLLFKTNRKVTVKQLKEDYFKKIECFDSVEISGVEDRFNASLGTYHDLLKIIKDKDFLDNEENEDILEDIVLTLTLFEDREMIEERLKTYAHLFDDKVMKQLKRRRYTGWGRLSRKLINGIRDKQSGKTILDFLKSDGFANRNFMQLIHDDSLTFKEDIQKAQVSGQGDSLHEHIANLAGSPAIKKGILQTVKVVDELVKVMGRHKPENIVIEMARENQTTQKGQKNSRERMKRIEEGIKELGSQILKEHPVENTQLQNEKLYLYYLQNGRDMYVDQELDINRLSDYDVDHIVPQSFLKDDSIDNKVLTRSDKARGKSDNVPSEEVVKKMKNYWRQLLNAKLITQRKFDNLTKAERGGLSELDKAGFIKRQLVETRQITKHVAQILDSRMNTKYDENDKLIREVKVITLKSKLVSDFRKDFQFYKVREINNYHHAHDAYLNAVVGTALIKKYPKLESEFVYGDYKVYDVRKMIAKSEQEIGKATAKYFFYSNIMNFFKTEITLANGEIRKRPLIETNGETGEIVWDKGRDFATVRKVLSMPQVNIVKKTEVQTGGFSKESILPKRNSDKLIARKKDWDPKKYGGFDSPTVAYSVLVVAKVEKGKSKKLKSVKELLGITIMERSSFEKNPIDFLEAKGYKEVKKDLIIKLPKYSLFELENGRKRMLASAGELQKGNELALPSKYVNFLYLASHYEKLKGSPEDNEQKQLFVEQHKHYLDEIIEQISEFSKRVILADANLDKVLSAYNKHRDKPIREQAENIIHLFTLTNLGAPAAFKYFDTTIDRKRYTSTKEVLDATLIHQSITGLYETRIDLSQLGGDGGGSSPAPGGGGGIPWLMKKPLQLTTLVPLQEYEERLLKQTMLTGSYKEKLQSLFLKYDALWQHWENQVGHRRIKPHHIATGTVNPRPQKQYPINPKAKASIQTVINDLLKQGVLIQQNSIMNTPVYPVPKPDGKWRMVLDYREVNKTIPLIAAQNQHSAGILSSIFRGKYKTTLDLSNGFWAHSITPESYWLTAFTWLGQQYCWTRLPQGFLNSPALFNADVVDLLKEVPNVQVYVDDIYISHDDPREHLEQLEKVFSLLLNAGYVVSLKKSEIAQHEVEFLGFNITKEGRGLTETFKQKLLNITPPRDLKQLQSILGKLNFARNFIPNFSELVKPLYNIIATAPGKYITWTTDNSQQLQNIISMLNSAENLEERNPEVRLIMKVNTSPSAGYIRFYNEFAKRPIMYLNYVYTKAEVKFTNTEKLLTTIHKGLIKALDLGMGQEILVYSPIVSMTKIQKTPLPERKALPIRWITWMSYLEDPRIQFHYDKTLPELQQVPTVTDDIIAKIKHPSEFSMVFYTDGSAIKHPNVNKSHNAGMGIAQVQFKPEFTVINTWSIPLGDHTAQLAEVAAVEFACKKALKIDGPVLIVTDSFYVAESVNKELPYWQSNGFFNNKKKPLKHVSKWKSIADCIQLKPDIIIIHEKGHQPTASTFHTEGNNLADKLATQGSYVVNAGKRTADGSEFEKRTADGSEFESPKKKAKVE

SEQ ID NO: 563 - protein, 2087 aa, synthetic construct
MPAAKRVKLDGGDKKYSIGLDIGTNSVGWAVITDEYKVPSKKFKVLGNTDRHSIKKNLIGALLFDSGETAEATRLKRTARRRYTRRKNRICYLQEIFSNEMAKVDDSFFHRLEESFLVEEDKKHERHPIFGNIVDEVAYHEKYPTIYHLRKKLVDSTDKADLRLIYLALAHMIKFRGHFLIEGDLNPDNSDVDKLFIQLVQTYNQLFEENPINASGVDAKAILSARLSKSRRLENLIAQLPGEKKNGLFGNLIALSLGLTPNFKSNFDLAEDAKLQLSKDTYDDDLDNLLAQIGDQYADLFLAAKNLSDAILLSDILRVNTEITKAPLSASMIKRYDEHHQDLTLLKALVRQQLPEKYKEIFFDQSKNGYAGYIDGGASQEEFYKFIKPILEKMDGTEELLVKLNREDLLRKQRTFDNGSIPHQIHLGELHAILRRQEDFYPFLKDNREKIEKILTFRIPYYVGPLARGNSRFAWMTRKSEETITPWNFEEVVDKGASAQSFIERMTNFDKNLPNEKVLPKHSLLYEYFTVYNELTKVKYVTEGMRKPAFLSGEQKKAIVDLLFKTNRKVTVKQLKEDYFKKIECFDSVEISGVEDRFNASLGTYHDLLKIIKDKDFLDNEENEDILEDIVLTLTLFEDREMIEERLKTYAHLFDDKVMKQLKRRRYTGWGRLSRKLINGIRDKQSGKTILDFLKSDGFANRNFMQLIHDDSLTFKEDIQKAQVSGQGDSLHEHIANLAGSPAIKKGILQTVKVVDELVKVMGRHKPENIVIEMARENQTTQKGQKNSRERMKRIEEGIKELGSQILKEHPVENTQLQNEKLYLYYLQNGRDMYVDQELDINRLSDYDVDHIVPQSFLKDDSIDNKVLTRSDKARGKSDNVPSEEVVKKMKNYWRQLLNAKLITQRKFDNLTKAERGGLSELDKAGFIKRQLVETRQITKHVAQILDSRMNTKYDENDKLIREVKVITLKSKLVSDFRKDFQFYKVREINNYHHAHDAYLNAVVGTALIKKYPKLESEFVYGDYKVYDVRKMIAKSEQEIGKATAKYFFYSNIMNFFKTEITLANGEIRKRPLIETNGETGEIVWDKGRDFATVRKVLSMPQVNIVKKTEVQTGGFSKESILPKRNSDKLIARKKDWDPKKYGGFDSPTVAYSVLVVAKVEKGKSKKLKSVKELLGITIMERSSFEKNPIDFLEAKGYKEVKKDLIIKLPKYSLFELENGRKRMLASAGELQKGNELALPSKYVNFLYLASHYEKLKGSPEDNEQKQLFVEQHKHYLDEIIEQISEFSKRVILADANLDKVLSAYNKHRDKPIREQAENIIHLFTLTNLGAPAAFKYFDTTIDRKRYTSTKEVLDATLIHQSITGLYETRIDLSQLGGDGGGGSEAAAKGGGGGIPWLMKKPLQLTTLVPLQEYEERLLKQTMLTGSYKEKLQSLFLKYDALWQHWENQVGHRRIKPHHIATGTVNPRPQKQYPINPKAKASIQTVINDLLKQGVLIQQNSIMNTPVYPVPKPDGKWRMVLDYREVNKTIPLIAAQNQHSAGILSSIFRGKYKTTLDLSNGFWAHSITPESYWLTAFTWLGQQYCWTRLPQGFLNSPALFNADVVDLLKEVPNVQVYVDDIYISHDDPREHLEQLEKVFSLLLNAGYVVSLKKSEIAQHEVEFLGFNITKEGRGLTETFKQKLLNITPPRDLKQLQSILGKLNFARNFIPNFSELVKPLYNIIATAPGKYITWTTDNSQQLQNIISMLNSAENLEERNPEVRLIMKVNTSPSAGYIRFYNEFAKRPIMYLNYVYTKAEVKFTNTEKLLTTIHKGLIKALDLGMGQEILVYSPIVSMTKIQKTPLPERKALPIRWITWMSYLEDPRIQFHYDKTLPELQQVPTVTDDIIAKIKHPSEFSMVFYTDGSAIKHPNVNKSHNAGMGIAQVQFKPEFTVINTWSIPLGDHTAQLAEVAAVEFACKKALKIDGPVLIVTDSFYVAESVNKELPYWQSNGFFNNKKKPLKHVSKWKSIADCIQLKPDIIIIHEKGHQPTASTFHTEGNNLADKLATQGSYVVNAGKRTADGSEFEKRTADGSEFESPKKKAKVE

SEQ ID NO: 564 - protein, 2082 aa, synthetic construct
MPAAKRVKLDGGDKKYSIGLDIGTNSVGWAVITDEYKVPSKKFKVLGNTDRHSIKKNLIGALLFDSGETAEATRLKRTARRRYTRRKNRICYLQEIFSNEMAKVDDSFFHRLEESFLVEEDKKHERHPIFGNIVDEVAYHEKYPTIYHLRKKLVDSTDKADLRLIYLALAHMIKFRGHFLIEGDLNPDNSDVDKLFIQLVQTYNQLFEENPINASGVDAKAILSARLSKSRRLENLIAQLPGEKKNGLFGNLIALSLGLTPNFKSNFDLAEDAKLQLSKDTYDDDLDNLLAQIGDQYADLFLAAKNLSDAILLSDILRVNTEITKAPLSASMIKRYDEHHQDLTLLKALVRQQLPEKYKEIFFDQSKNGYAGYIDGGASQEEFYKFIKPILEKMDGTEELLVKLNREDLLRKQRTFDNGSIPHQIHLGELHAILRRQEDFYPFLKDNREKIEKILTFRIPYYVGPLARGNSRFAWMTRKSEETITPWNFEEVVDKGASAQSFIERMTNFDKNLPNEKVLPKHSLLYEYFTVYNELTKVKYVTEGMRKPAFLSGEQKKAIVDLLFKTNRKVTVKQLKEDYFKKIECFDSVEISGVEDRFNASLGTYHDLLKIIKDKDFLDNEENEDILEDIVLTLTLFEDREMIEERLKTYAHLFDDKVMKQLKRRRYTGWGRLSRKLINGIRDKQSGKTILDFLKSDGFANRNFMQLIHDDSLTFKEDIQKAQVSGQGDSLHEHIANLAGSPAIKKGILQTVKVVDELVKVMGRHKPENIVIEMARENQTTQKGQKNSRERMKRIEEGIKELGSQILKEHPVENTQLQNEKLYLYYLQNGRDMYVDQELDINRLSDYDVDHIVPQSFLKDDSIDNKVLTRSDKARGKSDNVPSEEVVKKMKNYWRQLLNAKLITQRKFDNLTKAERGGLSELDKAGFIKRQLVETRQITKHVAQILDSRMNTKYDENDKLIREVKVITLKSKLVSDFRKDFQFYKVREINNYHHAHDAYLNAVVGTALIKKYPKLESEFVYGDYKVYDVRKMIAKSEQEIGKATAKYFFYSNIMNFFKTEITLANGEIRKRPLIETNGETGEIVWDKGRDFATVRKVLSMPQVNIVKKTEVQTGGFSKESILPKRNSDKLIARKKDWDPKKYGGFDSPTVAYSVLVVAKVEKGKSKKLKSVKELLGITIMERSSFEKNPIDFLEAKGYKEVKKDLIIKLPKYSLFELENGRKRMLASAGELQKGNELALPSKYVNFLYLASHYEKLKGSPEDNEQKQLFVEQHKHYLDEIIEQISEFSKRVILADANLDKVLSAYNKHRDKPIREQAENIIHLFTLTNLGAPAAFKYFDTTIDRKRYTSTKEVLDATLIHQSITGLYETRIDLSQLGGDGGGGGGSSGGIPWLMKKPLQLTTLVPLQEYEERLLKQTMLTGSYKEKLQSLFLKYDALWQHWENQVGHRRIKPHHIATGTVNPRPQKQYPINPKAKASIQTVINDLLKQGVLIQQNSIMNTPVYPVPKPDGKWRMVLDYREVNKTIPLIAAQNQHSAGILSSIFRGKYKTTLDLSNGFWAHSITPESYWLTAFTWLGQQYCWTRLPQGFLNSPALFNADVVDLLKEVPNVQVYVDDIYISHDDPREHLEQLEKVFSLLLNAGYVVSLKKSEIAQHEVEFLGFNITKEGRGLTETFKQKLLNITPPRDLKQLQSILGKLNFARNFIPNFSELVKPLYNIIATAPGKYITWTTDNSQQLQNIISMLNSAENLEERNPEVRLIMKVNTSPSAGYIRFYNEFAKRPIMYLNYVYTKAEVKFTNTEKLLTTIHKGLIKALDLGMGQEILVYSPIVSMTKIQKTPLPERKALPIRWITWMSYLEDPRIQFHYDKTLPELQQVPTVTDDIIAKIKHPSEFSMVFYTDGSAIKHPNVNKSHNAGMGIAQVQFKPEFTVINTWSIPLGDHTAQLAEVAAVEFACKKALKIDGPVLIVTDSFYVAESVNKELPYWQSNGFFNNKKKPLKHVSKWKSIADCIQLKPDIIIIHEKGHQPTASTFHTEGNNLADKLATQGSYVVNAGKRTADGSEFEKRTADGSEFESPKKKAKVE

SEQ ID NO: 565 - protein, 2085 aa, synthetic construct
MPAAKRVKLDGGDKKYSIGLDIGTNSVGWAVITDEYKVPSKKFKVLGNTDRHSIKKNLIGALLFDSGETAEATRLKRTARRRYTRRKNRICYLQEIFSNEMAKVDDSFFHRLEESFLVEEDKKHERHPIFGNIVDEVAYHEKYPTIYHLRKKLVDSTDKADLRLIYLALAHMIKFRGHFLIEGDLNPDNSDVDKLFIQLVQTYNQLFEENPINASGVDAKAILSARLSKSRRLENLIAQLPGEKKNGLFGNLIALSLGLTPNFKSNFDLAEDAKLQLSKDTYDDDLDNLLAQIGDQYADLFLAAKNLSDAILLSDILRVNTEITKAPLSASMIKRYDEHHQDLTLLKALVRQQLPEKYKEIFFDQSKNGYAGYIDGGASQEEFYKFIKPILEKMDGTEELLVKLNREDLLRKQRTFDNGSIPHQIHLGELHAILRRQEDFYPFLKDNREKIEKILTFRIPYYVGPLARGNSRFAWMTRKSEETITPWNFEEVVDKGASAQSFIERMTNFDKNLPNEKVLPKHSLLYEYFTVYNELTKVKYVTEGMRKPAFLSGEQKKAIVDLLFKTNRKVTVKQLKEDYFKKIECFDSVEISGVEDRFNASLGTYHDLLKIIKDKDFLDNEENEDILEDIVLTLTLFEDREMIEERLKTYAHLFDDKVMKQLKRRRYTGWGRLSRKLINGIRDKQSGKTILDFLKSDGFANRNFMQLIHDDSLTFKEDIQKAQVSGQGDSLHEHIANLAGSPAIKKGILQTVKVVDELVKVMGRHKPENIVIEMARENQTTQKGQKNSRERMKRIEEGIKELGSQILKEHPVENTQLQNEKLYLYYLQNGRDMYVDQELDINRLSDYDVDHIVPQSFLKDDSIDNKVLTRSDKARGKSDNVPSEEVVKKMKNYWRQLLNAKLITQRKFDNLTKAERGGLSELDKAGFIKRQLVETRQITKHVAQILDSRMNTKYDENDKLIREVKVITLKSKLVSDFRKDFQFYKVREINNYHHAHDAYLNAVVGTALIKKYPKLESEFVYGDYKVYDVRKMIAKSEQEIGKATAKYFFYSNIMNFFKTEITLANGEIRKRPLIETNGETGEIVWDKGRDFATVRKVLSMPQVNIVKKTEVQTGGFSKESILPKRNSDKLIARKKDWDPKKYGGFDSPTVAYSVLVVAKVEKGKSKKLKSVKELLGITIMERSSFEKNPIDFLEAKGYKEVKKDLIIKLPKYSLFELENGRKRMLASAGELQKGNELALPSKYVNFLYLASHYEKLKGSPEDNEQKQLFVEQHKHYLDEIIEQISEFSKRVILADANLDKVLSAYNKHRDKPIREQAENIIHLFTLTNLGAPAAFKYFDTTIDRKRYTSTKEVLDATLIHQSITGLYETRIDLSQLGGDGGGGSGSSGGGGGIPWLMKKPLQLTTLVPLQEYEERLLKQTMLTGSYKEKLQSLFLKYDALWQHWENQVGHRRIKPHHIATGTVNPRPQKQYPINPKAKASIQTVINDLLKQGVLIQQNSIMNTPVYPVPKPDGKWRMVLDYREVNKTIPLIAAQNQHSAGILSSIFRGKYKTTLDLSNGFWAHSITPESYWLTAFTWLGQQYCWTRLPQGFLNSPALFNADVVDLLKEVPNVQVYVDDIYISHDDPREHLEQLEKVFSLLLNAGYVVSLKKSEIAQHEVEFLGFNITKEGRGLTETFKQKLLNITPPRDLKQLQSILGKLNFARNFIPNFSELVKPLYNIIATAPGKYITWTTDNSQQLQNIISMLNSAENLEERNPEVRLIMKVNTSPSAGYIRFYNEFAKRPIMYLNYVYTKAEVKFTNTEKLLTTIHKGLIKALDLGMGQEILVYSPIVSMTKIQKTPLPERKALPIRWITWMSYLEDPRIQFHYDKTLPELQQVPTVTDDIIAKIKHPSEFSMVFYTDGSAIKHPNVNKSHNAGMGIAQVQFKPEFTVINTWSIPLGDHTAQLAEVAAVEFACKKALKIDGPVLIVTDSFYVAESVNKELPYWQSNGFFNNKKKPLKHVSKWKSIADCIQLKPDIIIIHEKGHQPTASTFHTEGNNLADKLATQGSYVVNAGKRTADGSEFEKRTADGSEFESPKKKAKVE

SEQ ID NO: 566 - protein, 2091 aa, synthetic construct
MPAAKRVKLDGGDKKYSIGLDIGTNSVGWAVITDEYKVPSKKFKVLGNTDRHSIKKNLIGALLFDSGETAEATRLKRTARRRYTRRKNRICYLQEIFSNEMAKVDDSFFHRLEESFLVEEDKKHERHPIFGNIVDEVAYHEKYPTIYHLRKKLVDSTDKADLRLIYLALAHMIKFRGHFLIEGDLNPDNSDVDKLFIQLVQTYNQLFEENPINASGVDAKAILSARLSKSRRLENLIAQLPGEKKNGLFGNLIALSLGLTPNFKSNFDLAEDAKLQLSKDTYDDDLDNLLAQIGDQYADLFLAAKNLSDAILLSDILRVNTEITKAPLSASMIKRYDEHHQDLTLLKALVRQQLPEKYKEIFFDQSKNGYAGYIDGGASQEEFYKFIKPILEKMDGTEELLVKLNREDLLRKQRTFDNGSIPHQIHLGELHAILRRQEDFYPFLKDNREKIEKILTFRIPYYVGPLARGNSRFAWMTRKSEETITPWNFEEVVDKGASAQSFIERMTNFDKNLPNEKVLPKHSLLYEYFTVYNELTKVKYVTEGMRKPAFLSGEQKKAIVDLLFKTNRKVTVKQLKEDYFKKIECFDSVEISGVEDRFNASLGTYHDLLKIIKDKDFLDNEENEDILEDIVLTLTLFEDREMIEERLKTYAHLFDDKVMKQLKRRRYTGWGRLSRKLINGIRDKQSGKTILDFLKSDGFANRNFMQLIHDDSLTFKEDIQKAQVSGQGDSLHEHIANLAGSPAIKKGILQTVKVVDELVKVMGRHKPENIVIEMARENQTTQKGQKNSRERMKRIEEGIKELGSQILKEHPVENTQLQNEKLYLYYLQNGRDMYVDQELDINRLSDYDVDHIVPQSFLKDDSIDNKVLTRSDKARGKSDNVPSEEVVKKMKNYWRQLLNAKLITQRKFDNLTKAERGGLSELDKAGFIKRQLVETRQITKHVAQILDSRMNTKYDENDKLIREVKVITLKSKLVSDFRKDFQFYKVREINNYHHAHDAYLNAVVGTALIKKYPKLESEFVYGDYKVYDVRKMIAKSEQEIGKATAKYFFYSNIMNFFKTEITLANGEIRKRPLIETNGETGEIVWDKGRDFATVRKVLSMPQVNIVKKTEVQTGGFSKESILPKRNSDKLIARKKDWDPKKYGGFDSPTVAYSVLVVAKVEKGKSKKLKSVKELLGITIMERSSFEKNPIDFLEAKGYKEVKKDLIIKLPKYSLFELENGRKRMLASAGELQKGNELALPSKYVNFLYLASHYEKLKGSPEDNEQKQLFVEQHKHYLDEIIEQISEFSKRVILADANLDKVLSAYNKHRDKPIREQAENIIHLFTLTNLGAPAAFKYFDTTIDRKRYTSTKEVLDATLIHQSITGLYETRIDLSQLGGDGGGGSGGSGGSGGSGGSGGIPWLMKKPLQLTTLVPLQEYEERLLKQTMLTGSYKEKLQSLFLKYDALWQHWENQVGHRRIKPHHIATGTVNPRPQKQYPINPKAKASIQTVINDLLKQGVLIQQNSIMNTPVYPVPKPDGKWRMVLDYREVNKTIPLIAAQNQHSAGILSSIFRGKYKTTLDLSNGFWAHSITPESYWLTAFTWLGQQYCWTRLPQGFLNSPALFNADVVDLLKEVPNVQVYVDDIYISHDDPREHLEQLEKVFSLLLNAGYVVSLKKSEIAQHEVEFLGFNITKEGRGLTETFKQKLLNITPPRDLKQLQSILGKLNFARNFIPNFSELVKPLYNIIATAPGKYITWTTDNSQQLQNIISMLNSAENLEERNPEVRLIMKVNTSPSAGYIRFYNEFAKRPIMYLNYVYTKAEVKFTNTEKLLTTIHKGLIKALDLGMGQEILVYSPIVSMTKIQKTPLPERKALPIRWITWMSYLEDPRIQFHYDKTLPELQQVPTVTDDIIAKIKHPSEFSMVFYTDGSAIKHPNVNKSHNAGMGIAQVQFKPEFTVINTWSIPLGDHTAQLAEVAAVEFACKKALKIDGPVLIVTDSFYVAESVNKELPYWQSNGFFNNKKKPLKHVSKWKSIADCIQLKPDIIIIHEKGHQPTASTFHTEGNNLADKLATQGSYVVNAGKRTADGSEFEKRTADGSEFESPKKKAKVE

SEQ ID NO: 567 - protein, 2087 aa, synthetic construct
MPAAKRVKLDGGDKKYSIGLDIGTNSVGWAVITDEYKVPSKKFKVLGNTDRHSIKKNLIGALLFDSGETAEATRLKRTARRRYTRRKNRICYLQEIFSNEMAKVDDSFFHRLEESFLVEEDKKHERHPIFGNIVDEVAYHEKYPTIYHLRKKLVDSTDKADLRLIYLALAHMIKFRGHFLIEGDLNPDNSDVDKLFIQLVQTYNQLFEENPINASGVDAKAILSARLSKSRRLENLIAQLPGEKKNGLFGNLIALSLGLTPNFKSNFDLAEDAKLQLSKDTYDDDLDNLLAQIGDQYADLFLAAKNLSDAILLSDILRVNTEITKAPLSASMIKRYDEHHQDLTLLKALVRQQLPEKYKEIFFDQSKNGYAGYIDGGASQEEFYKFIKPILEKMDGTEELLVKLNREDLLRKQRTFDNGSIPHQIHLGELHAILRRQEDFYPFLKDNREKIEKILTFRIPYYVGPLARGNSRFAWMTRKSEETITPWNFEEVVDKGASAQSFIERMTNFDKNLPNEKVLPKHSLLYEYFTVYNELTKVKYVTEGMRKPAFLSGEQKKAIVDLLFKTNRKVTVKQLKEDYFKKIECFDSVEISGVEDRFNASLGTYHDLLKIIKDKDFLDNEENEDILEDIVLTLTLFEDREMIEERLKTYAHLFDDKVMKQLKRRRYTGWGRLSRKLINGIRDKQSGKTILDFLKSDGFANRNFMQLIHDDSLTFKEDIQKAQVSGQGDSLHEHIANLAGSPAIKKGILQTVKVVDELVKVMGRHKPENIVIEMARENQTTQKGQKNSRERMKRIEEGIKELGSQILKEHPVENTQLQNEKLYLYYLQNGRDMYVDQELDINRLSDYDVDHIVPQSFLKDDSIDNKVLTRSDKARGKSDNVPSEEVVKKMKNYWRQLLNAKLITQRKFDNLTKAERGGLSELDKAGFIKRQLVETRQITKHVAQILDSRMNTKYDENDKLIREVKVITLKSKLVSDFRKDFQFYKVREINNYHHAHDAYLNAVVGTALIKKYPKLESEFVYGDYKVYDVRKMIAKSEQEIGKATAKYFFYSNIMNFFKTEITLANGEIRKRPLIETNGETGEIVWDKGRDFATVRKVLSMPQVNIVKKTEVQTGGFSKESILPKRNSDKLIARKKDWDPKKYGGFDSPTVAYSVLVVAKVEKGKSKKLKSVKELLGITIMERSSFEKNPIDFLEAKGYKEVKKDLIIKLPKYSLFELENGRKRMLASAGELQKGNELALPSKYVNFLYLASHYEKLKGSPEDNEQKQLFVEQHKHYLDEIIEQISEFSKRVILADANLDKVLSAYNKHRDKPIREQAENIIHLFTLTNLGAPAAFKYFDTTIDRKRYTSTKEVLDATLIHQSITGLYETRIDLSQLGGDGGGSSEAAAKGGGGGIPWLMKKPLQLTTLVPLQEYEERLLKQTMLTGSYKEKLQSLFLKYDALWQHWENQVGHRRIKPHHIATGTVNPRPQKQYPINPKAKASIQTVINDLLKQGVLIQQNSIMNTPVYPVPKPDGKWRMVLDYREVNKTIPLIAAQNQHSAGILSSIFRGKYKTTLDLSNGFWAHSITPESYWLTAFTWLGQQYCWTRLPQGFLNSPALFNADVVDLLKEVPNVQVYVDDIYISHDDPREHLEQLEKVFSLLLNAGYVVSLKKSEIAQHEVEFLGFNITKEGRGLTETFKQKLLNITPPRDLKQLQSILGKLNFARNFIPNFSELVKPLYNIIATAPGKYITWTTDNSQQLQNIISMLNSAENLEERNPEVRLIMKVNTSPSAGYIRFYNEFAKRPIMYLNYVYTKAEVKFTNTEKLLTTIHKGLIKALDLGMGQEILVYSPIVSMTKIQKTPLPERKALPIRWITWMSYLEDPRIQFHYDKTLPELQQVPTVTDDIIAKIKHPSEFSMVFYTDGSAIKHPNVNKSHNAGMGIAQVQFKPEFTVINTWSIPLGDHTAQLAEVAAVEFACKKALKIDGPVLIVTDSFYVAESVNKELPYWQSNGFFNNKKKPLKHVSKWKSIADCIQLKPDIIIIHEKGHQPTASTFHTEGNNLADKLATQGSYVVNAGKRTADGSEFEKRTADGSEFESPKKKAKVE

SEQ ID NO: 568 - protein, 2085 aa, synthetic construct
MPAAKRVKLDGGDKKYSIGLDIGTNSVGWAVITDEYKVPSKKFKVLGNTDRHSIKKNLIGALLFDSGETAEATRLKRTARRRYTRRKNRICYLQEIFSNEMAKVDDSFFHRLEESFLVEEDKKHERHPIFGNIVDEVAYHEKYPTIYHLRKKLVDSTDKADLRLIYLALAHMIKFRGHFLIEGDLNPDNSDVDKLFIQLVQTYNQLFEENPINASGVDAKAILSARLSKSRRLENLIAQLPGEKKNGLFGNLIALSLGLTPNFKSNFDLAEDAKLQLSKDTYDDDLDNLLAQIGDQYADLFLAAKNLSDAILLSDILRVNTEITKAPLSASMIKRYDEHHQDLTLLKALVRQQLPEKYKEIFFDQSKNGYAGYIDGGASQEEFYKFIKPILEKMDGTEELLVKLNREDLLRKQRTFDNGSIPHQIHLGELHAILRRQEDFYPFLKDNREKIEKILTFRIPYYVGPLARGNSRFAWMTRKSEETITPWNFEEVVDKGASAQSFIERMTNFDKNLPNEKVLPKHSLLYEYFTVYNELTKVKYVTEGMRKPAFLSGEQKKAIVDLLFKTNRKVTVKQLKEDYFKKIECFDSVEISGVEDRFNASLGTYHDLLKIIKDKDFLDNEENEDILEDIVLTLTLFEDREMIEERLKTYAHLFDDKVMKQLKRRRYTGWGRLSRKLINGIRDKQSGKTILDFLKSDGFANRNFMQLIHDDSLTFKEDIQKAQVSGQGDSLHEHIANLAGSPAIKKGILQTVKVVDELVKVMGRHKPENIVIEMARENQTTQKGQKNSRERMKRIEEGIKELGSQILKEHPVENTQLQNEKLYLYYLQNGRDMYVDQELDINRLSDYDVDHIVPQSFLKDDSIDNKVLTRSDKARGKSDNVPSEEVVKKMKNYWRQLLNAKLITQRKFDNLTKAERGGLSELDKAGFIKRQLVETRQITKHVAQILDSRMNTKYDENDKLIREVKVITLKSKLVSDFRKDFQFYKVREINNYHHAHDAYLNAVVGTALIKKYPKLESEFVYGDYKVYDVRKMIAKSEQEIGKATAKYFFYSNIMNFFKTEITLANGEIRKRPLIETNGETGEIVWDKGRDFATVRKVLSMPQVNIVKKTEVQTGGFSKESILPKRNSDKLIARKKDWDPKKYGGFDSPTVAYSVLVVAKVEKGKSKKLKSVKELLGITIMERSSFEKNPIDFLEAKGYKEVKKDLIIKLPKYSLFELENGRKRMLASAGELQKGNELALPSKYVNFLYLASHYEKLKGSPEDNEQKQLFVEQHKHYLDEIIEQISEFSKRVILADANLDKVLSAYNKHRDKPIREQAENIIHLFTLTNLGAPAAFKYFDTTIDRKRYTSTKEVLDATLIHQSITGLYETRIDLSQLGGDGGGGGPAPGSSGGIPWLMKKPLQLTTLVPLQEYEERLLKQTMLTGSYKEKLQSLFLKYDALWQHWENQVGHRRIKPHHIATGTVNPRPQKQYPINPKAKASIQTVINDLLKQGVLIQQNSIMNTPVYPVPKPDGKWRMVLDYREVNKTIPLIAAQNQHSAGILSSIFRGKYKTTLDLSNGFWAHSITPESYWLTAFTWLGQQYCWTRLPQGFLNSPALFNADVVDLLKEVPNVQVYVDDIYISHDDPREHLEQLEKVFSLLLNAGYVVSLKKSEIAQHEVEFLGFNITKEGRGLTETFKQKLLNITPPRDLKQLQSILGKLNFARNFIPNFSELVKPLYNIIATAPGKYITWTTDNSQQLQNIISMLNSAENLEERNPEVRLIMKVNTSPSAGYIRFYNEFAKRPIMYLNYVYTKAEVKFTNTEKLLTTIHKGLIKALDLGMGQEILVYSPIVSMTKIQKTPLPERKALPIRWITWMSYLEDPRIQFHYDKTLPELQQVPTVTDDIIAKIKHPSEFSMVFYTDGSAIKHPNVNKSHNAGMGIAQVQFKPEFTVINTWSIPLGDHTAQLAEVAAVEFACKKALKIDGPVLIVTDSFYVAESVNKELPYWQSNGFFNNKKKPLKHVSKWKSIADCIQLKPDIIIIHEKGHQPTASTFHTEGNNLADKLATQGSYVVNAGKRTADGSEFEKRTADGSEFESPKKKAKVE

SEQ ID NO: 569 - protein, 2087 aa, synthetic construct
MPAAKRVKLDGGDKKYSIGLDIGTNSVGWAVITDEYKVPSKKFKVLGNTDRHSIKKNLIGALLFDSGETAEATRLKRTARRRYTRRKNRICYLQEIFSNEMAKVDDSFFHRLEESFLVEEDKKHERHPIFGNIVDEVAYHEKYPTIYHLRKKLVDSTDKADLRLIYLALAHMIKFRGHFLIEGDLNPDNSDVDKLFIQLVQTYNQLFEENPINASGVDAKAILSARLSKSRRLENLIAQLPGEKKNGLFGNLIALSLGLTPNFKSNFDLAEDAKLQLSKDTYDDDLDNLLAQIGDQYADLFLAAKNLSDAILLSDILRVNTEITKAPLSASMIKRYDEHHQDLTLLKALVRQQLPEKYKEIFFDQSKNGYAGYIDGGASQEEFYKFIKPILEKMDGTEELLVKLNREDLLRKQRTFDNGSIPHQIHLGELHAILRRQEDFYPFLKDNREKIEKILTFRIPYYVGPLARGNSRFAWMTRKSEETITPWNFEEVVDKGASAQSFIERMTNFDKNLPNEKVLPKHSLLYEYFTVYNELTKVKYVTEGMRKPAFLSGEQKKAIVDLLFKTNRKVTVKQLKEDYFKKIECFDSVEISGVEDRFNASLGTYHDLLKIIKDKDFLDNEENEDILEDIVLTLTLFEDREMIEERLKTYAHLFDDKVMKQLKRRRYTGWGRLSRKLINGIRDKQSGKTILDFLKSDGFANRNFMQLIHDDSLTFKEDIQKAQVSGQGDSLHEHIANLAGSPAIKKGILQTVKVVDELVKVMGRHKPENIVIEMARENQTTQKGQKNSRERMKRIEEGIKELGSQILKEHPVENTQLQNEKLYLYYLQNGRDMYVDQELDINRLSDYDVDHIVPQSFLKDDSIDNKVLTRSDKARGKSDNVPSEEVVKKMKNYWRQLLNAKLITQRKFDNLTKAERGGLSELDKAGFIKRQLVETRQITKHVAQILDSRMNTKYDENDKLIREVKVITLKSKLVSDFRKDFQFYKVREINNYHHAHDAYLNAVVGTALIKKYPKLESEFVYGDYKVYDVRKMIAKSEQEIGKATAKYFFYSNIMNFFKTEITLANGEIRKRPLIETNGETGEIVWDKGRDFATVRKVLSMPQVNIVKKTEVQTGGFSKESILPKRNSDKLIARKKDWDPKKYGGFDSPTVAYSVLVVAKVEKGKSKKLKSVKELLGITIMERSSFEKNPIDFLEAKGYKEVKKDLIIKLPKYSLFELENGRKRMLASAGELQKGNELALPSKYVNFLYLASHYEKLKGSPEDNEQKQLFVEQHKHYLDEIIEQISEFSKRVILADANLDKVLSAYNKHRDKPIREQAENIIHLFTLTNLGAPAAFKYFDTTIDRKRYTSTKEVLDATLIHQSITGLYETRIDLSQLGGDGGPAPAPAPAPAPGGIPWLMKKPLQLTTLVPLQEYEERLLKQTMLTGSYKEKLQSLFLKYDALWQHWENQVGHRRIKPHHIATGTVNPRPQKQYPINPKAKASIQTVINDLLKQGVLIQQNSIMNTPVYPVPKPDGKWRMVLDYREVNKTIPLIAAQNQHSAGILSSIFRGKYKTTLDLSNGFWAHSITPESYWLTAFTWLGQQYCWTRLPQGFLNSPALFNADVVDLLKEVPNVQVYVDDIYISHDDPREHLEQLEKVFSLLLNAGYVVSLKKSEIAQHEVEFLGFNITKEGRGLTETFKQKLLNITPPRDLKQLQSILGKLNFARNFIPNFSELVKPLYNIIATAPGKYITWTTDNSQQLQNIISMLNSAENLEERNPEVRLIMKVNTSPSAGYIRFYNEFAKRPIMYLNYVYTKAEVKFTNTEKLLTTIHKGLIKALDLGMGQEILVYSPIVSMTKIQKTPLPERKALPIRWITWMSYLEDPRIQFHYDKTLPELQQVPTVTDDIIAKIKHPSEFSMVFYTDGSAIKHPNVNKSHNAGMGIAQVQFKPEFTVINTWSIPLGDHTAQLAEVAAVEFACKKALKIDGPVLIVTDSFYVAESVNKELPYWQSNGFFNNKKKPLKHVSKWKSIADCIQLKPDIIIIHEKGHQPTASTFHTEGNNLADKLATQGSYVVNAGKRTADGSEFEKRTADGSEFESPKKKAKVE

SEQ ID NO: 570 - protein, 2101 aa, synthetic construct
MPAAKRVKLDGGDKKYSIGLDIGTNSVGWAVITDEYKVPSKKFKVLGNTDRHSIKKNLIGALLFDSGETAEATRLKRTARRRYTRRKNRICYLQEIFSNEMAKVDDSFFHRLEESFLVEEDKKHERHPIFGNIVDEVAYHEKYPTIYHLRKKLVDSTDKADLRLIYLALAHMIKFRGHFLIEGDLNPDNSDVDKLFIQLVQTYNQLFEENPINASGVDAKAILSARLSKSRRLENLIAQLPGEKKNGLFGNLIALSLGLTPNFKSNFDLAEDAKLQLSKDTYDDDLDNLLAQIGDQYADLFLAAKNLSDAILLSDILRVNTEITKAPLSASMIKRYDEHHQDLTLLKALVRQQLPEKYKEIFFDQSKNGYAGYIDGGASQEEFYKFIKPILEKMDGTEELLVKLNREDLLRKQRTFDNGSIPHQIHLGELHAILRRQEDFYPFLKDNREKIEKILTFRIPYYVGPLARGNSRFAWMTRKSEETITPWNFEEVVDKGASAQSFIERMTNFDKNLPNEKVLPKHSLLYEYFTVYNELTKVKYVTEGMRKPAFLSGEQKKAIVDLLFKTNRKVTVKQLKEDYFKKIECFDSVEISGVEDRFNASLGTYHDLLKIIKDKDFLDNEENEDILEDIVLTLTLFEDREMIEERLKTYAHLFDDKVMKQLKRRRYTGWGRLSRKLINGIRDKQSGKTILDFLKSDGFANRNFMQLIHDDSLTFKEDIQKAQVSGQGDSLHEHIANLAGSPAIKKGILQTVKVVDELVKVMGRHKPENIVIEMARENQTTQKGQKNSRERMKRIEEGIKELGSQILKEHPVENTQLQNEKLYLYYLQNGRDMYVDQELDINRLSDYDVDHIVPQSFLKDDSIDNKVLTRSDKARGKSDNVPSEEVVKKMKNYWRQLLNAKLITQRKFDNLTKAERGGLSELDKAGFIKRQLVETRQITKHVAQILDSRMNTKYDENDKLIREVKVITLKSKLVSDFRKDFQFYKVREINNYHHAHDAYLNAVVGTALIKKYPKLESEFVYGDYKVYDVRKMIAKSEQEIGKATAKYFFYSNIMNFFKTEITLANGEIRKRPLIETNGETGEIVWDKGRDFATVRKVLSMPQVNIVKKTEVQTGGFSKESILPKRNSDKLIARKKDWDPKKYGGFDSPTVAYSVLVVAKVEKGKSKKLKSVKELLGITIMERSSFEKNPIDFLEAKGYKEVKKDLIIKLPKYSLFELENGRKRMLASAGELQKGNELALPSKYVNFLYLASHYEKLKGSPEDNEQKQLFVEQHKHYLDEIIEQISEFSKRVILADANLDKVLSAYNKHRDKPIREQAENIIHLFTLTNLGAPAAFKYFDTTIDRKRYTSTKEVLDATLIHQSITGLYETRIDLSQLGGDGGEAAAKEAAAKEAAAKEAAAKEAAAKGGIPWLMKKPLQLTTLVPLQEYEERLLKQTMLTGSYKEKLQSLFLKYDALWQHWENQVGHRRIKPHHIATGTVNPRPQKQYPINPKAKASIQTVINDLLKQGVLIQQNSIMNTPVYPVPKPDGKWRMVLDYREVNKTIPLIAAQNQHSAGILSSIFRGKYKTTLDLSNGFWAHSITPESYWLTAFTWLGQQYCWTRLPQGFLNSPALFNADVVDLLKEVPNVQVYVDDIYISHDDPREHLEQLEKVFSLLLNAGYVVSLKKSEIAQHEVEFLGFNITKEGRGLTETFKQKLLNITPPRDLKQLQSILGKLNFARNFIPNFSELVKPLYNIIATAPGKYITWTTDNSQQLQNIISMLNSAENLEERNPEVRLIMKVNTSPSAGYIRFYNEFAKRPIMYLNYVYTKAEVKFTNTEKLLTTIHKGLIKALDLGMGQEILVYSPIVSMTKIQKTPLPERKALPIRWITWMSYLEDPRIQFHYDKTLPELQQVPTVTDDIIAKIKHPSEFSMVFYTDGSAIKHPNVNKSHNAGMGIAQVQFKPEFTVINTWSIPLGDHTAQLAEVAAVEFACKKALKIDGPVLIVTDSFYVAESVNKELPYWQSNGFFNNKKKPLKHVSKWKSIADCIQLKPDIIIIHEKGHQPTASTFHTEGNNLADKLATQGSYVVNAGKRTADGSEFEKRTADGSEFESPKKKAKVE

SEQ ID NO: 571 - protein, 2087 aa, synthetic construct
MPAAKRVKLDGGDKKYSIGLDIGTNSVGWAVITDEYKVPSKKFKVLGNTDRHSIKKNLIGALLFDSGETAEATRLKRTARRRYTRRKNRICYLQEIFSNEMAKVDDSFFHRLEESFLVEEDKKHERHPIFGNIVDEVAYHEKYPTIYHLRKKLVDSTDKADLRLIYLALAHMIKFRGHFLIEGDLNPDNSDVDKLFIQLVQTYNQLFEENPINASGVDAKAILSARLSKSRRLENLIAQLPGEKKNGLFGNLIALSLGLTPNFKSNFDLAEDAKLQLSKDTYDDDLDNLLAQIGDQYADLFLAAKNLSDAILLSDILRVNTEITKAPLSASMIKRYDEHHQDLTLLKALVRQQLPEKYKEIFFDQSKNGYAGYIDGGASQEEFYKFIKPILEKMDGTEELLVKLNREDLLRKQRTFDNGSIPHQIHLGELHAILRRQEDFYPFLKDNREKIEKILTFRIPYYVGPLARGNSRFAWMTRKSEETITPWNFEEVVDKGASAQSFIERMTNFDKNLPNEKVLPKHSLLYEYFTVYNELTKVKYVTEGMRKPAFLSGEQKKAIVDLLFKTNRKVTVKQLKEDYFKKIECFDSVEISGVEDRFNASLGTYHDLLKIIKDKDFLDNEENEDILEDIVLTLTLFEDREMIEERLKTYAHLFDDKVMKQLKRRRYTGWGRLSRKLINGIRDKQSGKTILDFLKSDGFANRNFMQLIHDDSLTFKEDIQKAQVSGQGDSLHEHIANLAGSPAIKKGILQTVKVVDELVKVMGRHKPENIVIEMARENQTTQKGQKNSRERMKRIEEGIKELGSQILKEHPVENTQLQNEKLYLYYLQNGRDMYVDQELDINRLSDYDVDHIVPQSFLKDDSIDNKVLTRSDKARGKSDNVPSEEVVKKMKNYWRQLLNAKLITQRKFDNLTKAERGGLSELDKAGFIKRQLVETRQITKHVAQILDSRMNTKYDENDKLIREVKVITLKSKLVSDFRKDFQFYKVREINNYHHAHDAYLNAVVGTALIKKYPKLESEFVYGDYKVYDVRKMIAKSEQEIGKATAKYFFYSNIMNFFKTEITLANGEIRKRPLIETNGETGEIVWDKGRDFATVRKVLSMPQVNIVKKTEVQTGGFSKESILPKRNSDKLIARKKDWDPKKYGGFDSPTVAYSVLVVAKVEKGKSKKLKSVKELLGITIMERSSFEKNPIDFLEAKGYKEVKKDLIIKLPKYSLFELENGRKRMLASAGELQKGNELALPSKYVNFLYLASHYEKLKGSPEDNEQKQLFVEQHKHYLDEIIEQISEFSKRVILADANLDKVLSAYNKHRDKPIREQAENIIHLFTLTNLGAPAAFKYFDTTIDRKRYTSTKEVLDATLIHQSITGLYETRIDLSQLGGDGGGGSGSSEAAAKGGIPWLMKKPLQLTTLVPLQEYEERLLKQTMLTGSYKEKLQSLFLKYDALWQHWENQVGHRRIKPHHIATGTVNPRPQKQYPINPKAKASIQTVINDLLKQGVLIQQNSIMNTPVYPVPKPDGKWRMVLDYREVNKTIPLIAAQNQHSAGILSSIFRGKYKTTLDLSNGFWAHSITPESYWLTAFTWLGQQYCWTRLPQGFLNSPALFNADVVDLLKEVPNVQVYVDDIYISHDDPREHLEQLEKVFSLLLNAGYVVSLKKSEIAQHEVEFLGFNITKEGRGLTETFKQKLLNITPPRDLKQLQSILGKLNFARNFIPNFSELVKPLYNIIATAPGKYITWTTDNSQQLQNIISMLNSAENLEERNPEVRLIMKVNTSPSAGYIRFYNEFAKRPIMYLNYVYTKAEVKFTNTEKLLTTIHKGLIKALDLGMGQEILVYSPIVSMTKIQKTPLPERKALPIRWITWMSYLEDPRIQFHYDKTLPELQQVPTVTDDIIAKIKHPSEFSMVFYTDGSAIKHPNVNKSHNAGMGIAQVQFKPEFTVINTWSIPLGDHTAQLAEVAAVEFACKKALKIDGPVLIVTDSFYVAESVNKELPYWQSNGFFNNKKKPLKHVSKWKSIADCIQLKPDIIIIHEKGHQPTASTFHTEGNNLADKLATQGSYVVNAGKRTADGSEFEKRTADGSEFESPKKKAKVE

SEQ ID NO: 572 - protein, 2087 aa, synthetic construct
MPAAKRVKLDGGDKKYSIGLDIGTNSVGWAVITDEYKVPSKKFKVLGNTDRHSIKKNLIGALLFDSGETAEATRLKRTARRRYTRRKNRICYLQEIFSNEMAKVDDSFFHRLEESFLVEEDKKHERHPIFGNIVDEVAYHEKYPTIYHLRKKLVDSTDKADLRLIYLALAHMIKFRGHFLIEGDLNPDNSDVDKLFIQLVQTYNQLFEENPINASGVDAKAILSARLSKSRRLENLIAQLPGEKKNGLFGNLIALSLGLTPNFKSNFDLAEDAKLQLSKDTYDDDLDNLLAQIGDQYADLFLAAKNLSDAILLSDILRVNTEITKAPLSASMIKRYDEHHQDLTLLKALVRQQLPEKYKEIFFDQSKNGYAGYIDGGASQEEFYKFIKPILEKMDGTEELLVKLNREDLLRKQRTFDNGSIPHQIHLGELHAILRRQEDFYPFLKDNREKIEKILTFRIPYYVGPLARGNSRFAWMTRKSEETITPWNFEEVVDKGASAQSFIERMTNFDKNLPNEKVLPKHSLLYEYFTVYNELTKVKYVTEGMRKPAFLSGEQKKAIVDLLFKTNRKVTVKQLKEDYFKKIECFDSVEISGVEDRFNASLGTYHDLLKIIKDKDFLDNEENEDILEDIVLTLTLFEDREMIEERLKTYAHLFDDKVMKQLKRRRYTGWGRLSRKLINGIRDKQSGKTILDFLKSDGFANRNFMQLIHDDSLTFKEDIQKAQVSGQGDSLHEHIANLAGSPAIKKGILQTVKVVDELVKVMGRHKPENIVIEMARENQTTQKGQKNSRERMKRIEEGIKELGSQILKEHPVENTQLQNEKLYLYYLQNGRDMYVDQELDINRLSDYDVDHIVPQSFLKDDSIDNKVLTRSDKARGKSDNVPSEEVVKKMKNYWRQLLNAKLITQRKFDNLTKAERGGLSELDKAGFIKRQLVETRQITKHVAQILDSRMNTKYDENDKLIREVKVITLKSKLVSDFRKDFQFYKVREINNYHHAHDAYLNAVVGTALIKKYPKLESEFVYGDYKVYDVRKMIAKSEQEIGKATAKYFFYSNIMNFFKTEITLANGEIRKRPLIETNGETGEIVWDKGRDFATVRKVLSMPQVNIVKKTEVQTGGFSKESILPKRNSDKLIARKKDWDPKKYGGFDSPTVAYSVLVVAKVEKGKSKKLKSVKELLGITIMERSSFEKNPIDFLEAKGYKEVKKDLIIKLPKYSLFELENGRKRMLASAGELQKGNELALPSKYVNFLYLASHYEKLKGSPEDNEQKQLFVEQHKHYLDEIIEQISEFSKRVILADANLDKVLSAYNKHRDKPIREQAENIIHLFTLTNLGAPAAFKYFDTTIDRKRYTSTKEVLDATLIHQSITGLYETRIDLSQLGGDGGEAAAKGGSPAPGGIPWLMKKPLQLTTLVPLQEYEERLLKQTMLTGSYKEKLQSLFLKYDALWQHWENQVGHRRIKPHHIATGTVNPRPQKQYPINPKAKASIQTVINDLLKQGVLIQQNSIMNTPVYPVPKPDGKWRMVLDYREVNKTIPLIAAQNQHSAGILSSIFRGKYKTTLDLSNGFWAHSITPESYWLTAFTWLGQQYCWTRLPQGFLNSPALFNADVVDLLKEVPNVQVYVDDIYISHDDPREHLEQLEKVFSLLLNAGYVVSLKKSEIAQHEVEFLGFNITKEGRGLTETFKQKLLNITPPRDLKQLQSILGKLNFARNFIPNFSELVKPLYNIIATAPGKYITWTTDNSQQLQNIISMLNSAENLEERNPEVRLIMKVNTSPSAGYIRFYNEFAKRPIMYLNYVYTKAEVKFTNTEKLLTTIHKGLIKALDLGMGQEILVYSPIVSMTKIQKTPLPERKALPIRWITWMSYLEDPRIQFHYDKTLPELQQVPTVTDDIIAKIKHPSEFSMVFYTDGSAIKHPNVNKSHNAGMGIAQVQFKPEFTVINTWSIPLGDHTAQLAEVAAVEFACKKALKIDGPVLIVTDSFYVAESVNKELPYWQSNGFFNNKKKPLKHVSKWKSIADCIQLKPDIIIIHEKGHQPTASTFHTEGNNLADKLATQGSYVVNAGKRTADGSEFEKRTADGSEFESPKKKAKVE

SEQ ID NO: 573 - protein, 2085 aa, synthetic construct
MPAAKRVKLDGGDKKYSIGLDIGTNSVGWAVITDEYKVPSKKFKVLGNTDRHSIKKNLIGALLFDSGETAEATRLKRTARRRYTRRKNRICYLQEIFSNEMAKVDDSFFHRLEESFLVEEDKKHERHPIFGNIVDEVAYHEKYPTIYHLRKKLVDSTDKADLRLIYLALAHMIKFRGHFLIEGDLNPDNSDVDKLFIQLVQTYNQLFEENPINASGVDAKAILSARLSKSRRLENLIAQLPGEKKNGLFGNLIALSLGLTPNFKSNFDLAEDAKLQLSKDTYDDDLDNLLAQIGDQYADLFLAAKNLSDAILLSDILRVNTEITKAPLSASMIKRYDEHHQDLTLLKALVRQQLPEKYKEIFFDQSKNGYAGYIDGGASQEEFYKFIKPILEKMDGTEELLVKLNREDLLRKQRTFDNGSIPHQIHLGELHAILRRQEDFYPFLKDNREKIEKILTFRIPYYVGPLARGNSRFAWMTRKSEETITPWNFEEVVDKGASAQSFIERMTNFDKNLPNEKVLPKHSLLYEYFTVYNELTKVKYVTEGMRKPAFLSGEQKKAIVDLLFKTNRKVTVKQLKEDYFKKIECFDSVEISGVEDRFNASLGTYHDLLKIIKDKDFLDNEENEDILEDIVLTLTLFEDREMIEERLKTYAHLFDDKVMKQLKRRRYTGWGRLSRKLINGIRDKQSGKTILDFLKSDGFANRNFMQLIHDDSLTFKEDIQKAQVSGQGDSLHEHIANLAGSPAIKKGILQTVKVVDELVKVMGRHKPENIVIEMARENQTTQKGQKNSRERMKRIEEGIKELGSQILKEHPVENTQLQNEKLYLYYLQNGRDMYVDQELDINRLSDYDVDHIVPQSFLKDDSIDNKVLTRSDKARGKSDNVPSEEVVKKMKNYWRQLLNAKLITQRKFDNLTKAERGGLSELDKAGFIKRQLVETRQITKHVAQILDSRMNTKYDENDKLIREVKVITLKSKLVSDFRKDFQFYKVREINNYHHAHDAYLNAVVGTALIKKYPKLESEFVYGDYKVYDVRKMIAKSEQEIGKATAKYFFYSNIMNFFKTEITLANGEIRKRPLIETNGETGEIVWDKGRDFATVRKVLSMPQVNIVKKTEVQTGGFSKESILPKRNSDKLIARKKDWDPKKYGGFDSPTVAYSVLVVAKVEKGKSKKLKSVKELLGITIMERSSFEKNPIDFLEAKGYKEVKKDLIIKLPKYSLFELENGRKRMLASAGELQKGNELALPSKYVNFLYLASHYEKLKGSPEDNEQKQLFVEQHKHYLDEIIEQISEFSKRVILADANLDKVLSAYNKHRDKPIREQAENIIHLFTLTNLGAPAAFKYFDTTIDRKRYTSTKEVLDATLIHQSITGLYETRIDLSQLGGDGGGGSPAPGGGGGIPWLMKKPLQLTTLVPLQEYEERLLKQTMLTGSYKEKLQSLFLKYDALWQHWENQVGHRRIKPHHIATGTVNPRPQKQYPINPKAKASIQTVINDLLKQGVLIQQNSIMNTPVYPVPKPDGKWRMVLDYREVNKTIPLIAAQNQHSAGILSSIFRGKYKTTLDLSNGFWAHSITPESYWLTAFTWLGQQYCWTRLPQGFLNSPALFNADVVDLLKEVPNVQVYVDDIYISHDDPREHLEQLEKVFSLLLNAGYVVSLKKSEIAQHEVEFLGFNITKEGRGLTETFKQKLLNITPPRDLKQLQSILGKLNFARNFIPNFSELVKPLYNIIATAPGKYITWTTDNSQQLQNIISMLNSAENLEERNPEVRLIMKVNTSPSAGYIRFYNEFAKRPIMYLNYVYTKAEVKFTNTEKLLTTIHKGLIKALDLGMGQEILVYSPIVSMTKIQKTPLPERKALPIRWITWMSYLEDPRIQFHYDKTLPELQQVPTVTDDIIAKIKHPSEFSMVFYTDGSAIKHPNVNKSHNAGMGIAQVQFKPEFTVINTWSIPLGDHTAQLAEVAAVEFACKKALKIDGPVLIVTDSFYVAESVNKELPYWQSNGFFNNKKKPLKHVSKWKSIADCIQLKPDIIIIHEKGHQPTASTFHTEGNNLADKLATQGSYVVNAGKRTADGSEFEKRTADGSEFESPKKKAKVE

SEQ ID NO: 574 - protein, 2091 aa, synthetic construct
MPAAKRVKLDGGDKKYSIGLDIGTNSVGWAVITDEYKVPSKKFKVLGNTDRHSIKKNLIGALLFDSGETAEATRLKRTARRRYTRRKNRICYLQEIFSNEMAKVDDSFFHRLEESFLVEEDKKHERHPIFGNIVDEVAYHEKYPTIYHLRKKLVDSTDKADLRLIYLALAHMIKFRGHFLIEGDLNPDNSDVDKLFIQLVQTYNQLFEENPINASGVDAKAILSARLSKSRRLENLIAQLPGEKKNGLFGNLIALSLGLTPNFKSNFDLAEDAKLQLSKDTYDDDLDNLLAQIGDQYADLFLAAKNLSDAILLSDILRVNTEITKAPLSASMIKRYDEHHQDLTLLKALVRQQLPEKYKEIFFDQSKNGYAGYIDGGASQEEFYKFIKPILEKMDGTEELLVKLNREDLLRKQRTFDNGSIPHQIHLGELHAILRRQEDFYPFLKDNREKIEKILTFRIPYYVGPLARGNSRFAWMTRKSEETITPWNFEEVVDKGASAQSFIERMTNFDKNLPNEKVLPKHSLLYEYFTVYNELTKVKYVTEGMRKPAFLSGEQKKAIVDLLFKTNRKVTVKQLKEDYFKKIECFDSVEISGVEDRFNASLGTYHDLLKIIKDKDFLDNEENEDILEDIVLTLTLFEDREMIEERLKTYAHLFDDKVMKQLKRRRYTGWGRLSRKLINGIRDKQSGKTILDFLKSDGFANRNFMQLIHDDSLTFKEDIQKAQVSGQGDSLHEHIANLAGSPAIKKGILQTVKVVDELVKVMGRHKPENIVIEMARENQTTQKGQKNSRERMKRIEEGIKELGSQILKEHPVENTQLQNEKLYLYYLQNGRDMYVDQELDINRLSDYDVDHIVPQSFLKDDSIDNKVLTRSDKARGKSDNVPSEEVVKKMKNYWRQLLNAKLITQRKFDNLTKAERGGLSELDKAGFIKRQLVETRQITKHVAQILDSRMNTKYDENDKLIREVKVITLKSKLVSDFRKDFQFYKVREINNYHHAHDAYLNAVVGTALIKKYPKLESEFVYGDYKVYDVRKMIAKSEQEIGKATAKYFFYSNIMNFFKTEITLANGEIRKRPLIETNGETGEIVWDKGRDFATVRKVLSMPQVNIVKKTEVQTGGFSKESILPKRNSDKLIARKKDWDPKKYGGFDSPTVAYSVLVVAKVEKGKSKKLKSVKELLGITIMERSSFEKNPIDFLEAKGYKEVKKDLIIKLPKYSLFELENGRKRMLASAGELQKGNELALPSKYVNFLYLASHYEKLKGSPEDNEQKQLFVEQHKHYLDEIIEQISEFSKRVILADANLDKVLSAYNKHRDKPIREQAENIIHLFTLTNLGAPAAFKYFDTTIDRKRYTSTKEVLDATLIHQSITGLYETRIDLSQLGGDGGEAAAKGGGGSEAAAKGGIPWLMKKPLQLTTLVPLQEYEERLLKQTMLTGSYKEKLQSLFLKYDALWQHWENQVGHRRIKPHHIATGTVNPRPQKQYPINPKAKASIQTVINDLLKQGVLIQQNSIMNTPVYPVPKPDGKWRMVLDYREVNKTIPLIAAQNQHSAGILSSIFRGKYKTTLDLSNGFWAHSITPESYWLTAFTWLGQQYCWTRLPQGFLNSPALFNADVVDLLKEVPNVQVYVDDIYISHDDPREHLEQLEKVFSLLLNAGYVVSLKKSEIAQHEVEFLGFNITKEGRGLTETFKQKLLNITPPRDLKQLQSILGKLNFARNFIPNFSELVKPLYNIIATAPGKYITWTTDNSQQLQNIISMLNSAENLEERNPEVRLIMKVNTSPSAGYIRFYNEFAKRPIMYLNYVYTKAEVKFTNTEKLLTTIHKGLIKALDLGMGQEILVYSPIVSMTKIQKTPLPERKALPIRWITWMSYLEDPRIQFHYDKTLPELQQVPTVTDDIIAKIKHPSEFSMVFYTDGSAIKHPNVNKSHNAGMGIAQVQFKPEFTVINTWSIPLGDHTAQLAEVAAVEFACKKALKIDGPVLIVTDSFYVAESVNKELPYWQSNGFFNNKKKPLKHVSKWKSIADCIQLKPDIIIIHEKGHQPTASTFHTEGNNLADKLATQGSYVVNAGKRTADGSEFEKRTADGSEFESPKKKAKVE

SEQ ID NO: 575 - protein, 2082 aa, synthetic construct
MPAAKRVKLDGGDKKYSIGLDIGTNSVGWAVITDEYKVPSKKFKVLGNTDRHSIKKNLIGALLFDSGETAEATRLKRTARRRYTRRKNRICYLQEIFSNEMAKVDDSFFHRLEESFLVEEDKKHERHPIFGNIVDEVAYHEKYPTIYHLRKKLVDSTDKADLRLIYLALAHMIKFRGHFLIEGDLNPDNSDVDKLFIQLVQTYNQLFEENPINASGVDAKAILSARLSKSRRLENLIAQLPGEKKNGLFGNLIALSLGLTPNFKSNFDLAEDAKLQLSKDTYDDDLDNLLAQIGDQYADLFLAAKNLSDAILLSDILRVNTEITKAPLSASMIKRYDEHHQDLTLLKALVRQQLPEKYKEIFFDQSKNGYAGYIDGGASQEEFYKFIKPILEKMDGTEELLVKLNREDLLRKQRTFDNGSIPHQIHLGELHAILRRQEDFYPFLKDNREKIEKILTFRIPYYVGPLARGNSRFAWMTRKSEETITPWNFEEVVDKGASAQSFIERMTNFDKNLPNEKVLPKHSLLYEYFTVYNELTKVKYVTEGMRKPAFLSGEQKKAIVDLLFKTNRKVTVKQLKEDYFKKIECFDSVEISGVEDRFNASLGTYHDLLKIIKDKDFLDNEENEDILEDIVLTLTLFEDREMIEERLKTYAHLFDDKVMKQLKRRRYTGWGRLSRKLINGIRDKQSGKTILDFLKSDGFANRNFMQLIHDDSLTFKEDIQKAQVSGQGDSLHEHIANLAGSPAIKKGILQTVKVVDELVKVMGRHKPENIVIEMARENQTTQKGQKNSRERMKRIEEGIKELGSQILKEHPVENTQLQNEKLYLYYLQNGRDMYVDQELDINRLSDYDVDHIVPQSFLKDDSIDNKVLTRSDKARGKSDNVPSEEVVKKMKNYWRQLLNAKLITQRKFDNLTKAERGGLSELDKAGFIKRQLVETRQITKHVAQILDSRMNTKYDENDKLIREVKVITLKSKLVSDFRKDFQFYKVREINNYHHAHDAYLNAVVGTALIKKYPKLESEFVYGDYKVYDVRKMIAKSEQEIGKATAKYFFYSNIMNFFKTEITLANGEIRKRPLIETNGETGEIVWDKGRDFATVRKVLSMPQVNIVKKTEVQTGGFSKESILPKRNSDKLIARKKDWDPKKYGGFDSPTVAYSVLVVAKVEKGKSKKLKSVKELLGITIMERSSFEKNPIDFLEAKGYKEVKKDLIIKLPKYSLFELENGRKRMLASAGELQKGNELALPSKYVNFLYLASHYEKLKGSPEDNEQKQLFVEQHKHYLDEIIEQISEFSKRVILADANLDKVLSAYNKHRDKPIREQAENIIHLFTLTNLGAPAAFKYFDTTIDRKRYTSTKEVLDATLIHQSITGLYETRIDLSQLGGDGGGSSPAPGGIPWLMKKPLQLTTLVPLQEYEERLLKQTMLTGSYKEKLQSLFLKYDALWQHWENQVGHRRIKPHHIATGTVNPRPQKQYPINPKAKASIQTVINDLLKQGVLIQQNSIMNTPVYPVPKPDGKWRMVLDYREVNKTIPLIAAQNQHSAGILSSIFRGKYKTTLDLSNGFWAHSITPESYWLTAFTWLGQQYCWTRLPQGFLNSPALFNADVVDLLKEVPNVQVYVDDIYISHDDPREHLEQLEKVFSLLLNAGYVVSLKKSEIAQHEVEFLGFNITKEGRGLTETFKQKLLNITPPRDLKQLQSILGKLNFARNFIPNFSELVKPLYNIIATAPGKYITWTTDNSQQLQNIISMLNSAENLEERNPEVRLIMKVNTSPSAGYIRFYNEFAKRPIMYLNYVYTKAEVKFTNTEKLLTTIHKGLIKALDLGMGQEILVYSPIVSMTKIQKTPLPERKALPIRWITWMSYLEDPRIQFHYDKTLPELQQVPTVTDDIIAKIKHPSEFSMVFYTDGSAIKHPNVNKSHNAGMGIAQVQFKPEFTVINTWSIPLGDHTAQLAEVAAVEFACKKALKIDGPVLIVTDSFYVAESVNKELPYWQSNGFFNNKKKPLKHVSKWKSIADCIQLKPDIIIIHEKGHQPTASTFHTEGNNLADKLATQGSYVVNAGKRTADGSEFEKRTADGSEFESPKKKAKVE

SEQ ID NO: 576 - protein, 2087 aa, synthetic construct
MPAAKRVKLDGGDKKYSIGLDIGTNSVGWAVITDEYKVPSKKFKVLGNTDRHSIKKNLIGALLFDSGETAEATRLKRTARRRYTRRKNRICYLQEIFSNEMAKVDDSFFHRLEESFLVEEDKKHERHPIFGNIVDEVAYHEKYPTIYHLRKKLVDSTDKADLRLIYLALAHMIKFRGHFLIEGDLNPDNSDVDKLFIQLVQTYNQLFEENPINASGVDAKAILSARLSKSRRLENLIAQLPGEKKNGLFGNLIALSLGLTPNFKSNFDLAEDAKLQLSKDTYDDDLDNLLAQIGDQYADLFLAAKNLSDAILLSDILRVNTEITKAPLSASMIKRYDEHHQDLTLLKALVRQQLPEKYKEIFFDQSKNGYAGYIDGGASQEEFYKFIKPILEKMDGTEELLVKLNREDLLRKQRTFDNGSIPHQIHLGELHAILRRQEDFYPFLKDNREKIEKILTFRIPYYVGPLARGNSRFAWMTRKSEETITPWNFEEVVDKGASAQSFIERMTNFDKNLPNEKVLPKHSLLYEYFTVYNELTKVKYVTEGMRKPAFLSGEQKKAIVDLLFKTNRKVTVKQLKEDYFKKIECFDSVEISGVEDRFNASLGTYHDLLKIIKDKDFLDNEENEDILEDIVLTLTLFEDREMIEERLKTYAHLFDDKVMKQLKRRRYTGWGRLSRKLINGIRDKQSGKTILDFLKSDGFANRNFMQLIHDDSLTFKEDIQKAQVSGQGDSLHEHIANLAGSPAIKKGILQTVKVVDELVKVMGRHKPENIVIEMARENQTTQKGQKNSRERMKRIEEGIKELGSQILKEHPVENTQLQNEKLYLYYLQNGRDMYVDQELDINRLSDYDVDHIVPQSFLKDDSIDNKVLTRSDKARGKSDNVPSEEVVKKMKNYWRQLLNAKLITQRKFDNLTKAERGGLSELDKAGFIKRQLVETRQITKHVAQILDSRMNTKYDENDKLIREVKVITLKSKLVSDFRKDFQFYKVREINNYHHAHDAYLNAVVGTALIKKYPKLESEFVYGDYKVYDVRKMIAKSEQEIGKATAKYFFYSNIMNFFKTEITLANGEIRKRPLIETNGETGEIVWDKGRDFATVRKVLSMPQVNIVKKTEVQTGGFSKESILPKRNSDKLIARKKDWDPKKYGGFDSPTVAYSVLVVAKVEKGKSKKLKSVKELLGITIMERSSFEKNPIDFLEAKGYKEVKKDLIIKLPKYSLFELENGRKRMLASAGELQKGNELALPSKYVNFLYLASHYEKLKGSPEDNEQKQLFVEQHKHYLDEIIEQISEFSKRVILADANLDKVLSAYNKHRDKPIREQAENIIHLFTLTNLGAPAAFKYFDTTIDRKRYTSTKEVLDATLIHQSITGLYETRIDLSQLGGDGGPAPGGSEAAAKGGIPWLMKKPLQLTTLVPLQEYEERLLKQTMLTGSYKEKLQSLFLKYDALWQHWENQVGHRRIKPHHIATGTVNPRPQKQYPINPKAKASIQTVINDLLKQGVLIQQNSIMNTPVYPVPKPDGKWRMVLDYREVNKTIPLIAAQNQHSAGILSSIFRGKYKTTLDLSNGFWAHSITPESYWLTAFTWLGQQYCWTRLPQGFLNSPALFNADVVDLLKEVPNVQVYVDDIYISHDDPREHLEQLEKVFSLLLNAGYVVSLKKSEIAQHEVEFLGFNITKEGRGLTETFKQKLLNITPPRDLKQLQSILGKLNFARNFIPNFSELVKPLYNIIATAPGKYITWTTDNSQQLQNIISMLNSAENLEERNPEVRLIMKVNTSPSAGYIRFYNEFAKRPIMYLNYVYTKAEVKFTNTEKLLTTIHKGLIKALDLGMGQEILVYSPIVSMTKIQKTPLPERKALPIRWITWMSYLEDPRIQFHYDKTLPELQQVPTVTDDIIAKIKHPSEFSMVFYTDGSAIKHPNVNKSHNAGMGIAQVQFKPEFTVINTWSIPLGDHTAQLAEVAAVEFACKKALKIDGPVLIVTDSFYVAESVNKELPYWQSNGFFNNKKKPLKHVSKWKSIADCIQLKPDIIIIHEKGHQPTASTFHTEGNNLADKLATQGSYVVNAGKRTADGSEFEKRTADGSEFESPKKKAKVE

SEQ ID NO: 577 - protein, 2087 aa, synthetic construct
MPAAKRVKLDGGDKKYSIGLDIGTNSVGWAVITDEYKVPSKKFKVLGNTDRHSIKKNLIGALLFDSGETAEATRLKRTARRRYTRRKNRICYLQEIFSNEMAKVDDSFFHRLEESFLVEEDKKHERHPIFGNIVDEVAYHEKYPTIYHLRKKLVDSTDKADLRLIYLALAHMIKFRGHFLIEGDLNPDNSDVDKLFIQLVQTYNQLFEENPINASGVDAKAILSARLSKSRRLENLIAQLPGEKKNGLFGNLIALSLGLTPNFKSNFDLAEDAKLQLSKDTYDDDLDNLLAQIGDQYADLFLAAKNLSDAILLSDILRVNTEITKAPLSASMIKRYDEHHQDLTLLKALVRQQLPEKYKEIFFDQSKNGYAGYIDGGASQEEFYKFIKPILEKMDGTEELLVKLNREDLLRKQRTFDNGSIPHQIHLGELHAILRRQEDFYPFLKDNREKIEKILTFRIPYYVGPLARGNSRFAWMTRKSEETITPWNFEEVVDKGASAQSFIERMTNFDKNLPNEKVLPKHSLLYEYFTVYNELTKVKYVTEGMRKPAFLSGEQKKAIVDLLFKTNRKVTVKQLKEDYFKKIECFDSVEISGVEDRFNASLGTYHDLLKIIKDKDFLDNEENEDILEDIVLTLTLFEDREMIEERLKTYAHLFDDKVMKQLKRRRYTGWGRLSRKLINGIRDKQSGKTILDFLKSDGFANRNFMQLIHDDSLTFKEDIQKAQVSGQGDSLHEHIANLAGSPAIKKGILQTVKVVDELVKVMGRHKPENIVIEMARENQTTQKGQKNSRERMKRIEEGIKELGSQILKEHPVENTQLQNEKLYLYYLQNGRDMYVDQELDINRLSDYDVDHIVPQSFLKDDSIDNKVLTRSDKARGKSDNVPSEEVVKKMKNYWRQLLNAKLITQRKFDNLTKAERGGLSELDKAGFIKRQLVETRQITKHVAQILDSRMNTKYDENDKLIREVKVITLKSKLVSDFRKDFQFYKVREINNYHHAHDAYLNAVVGTALIKKYPKLESEFVYGDYKVYDVRKMIAKSEQEIGKATAKYFFYSNIMNFFKTEITLANGEIRKRPLIETNGETGEIVWDKGRDFATVRKVLSMPQVNIVKKTEVQTGGFSKESILPKRNSDKLIARKKDWDPKKYGGFDSPTVAYSVLVVAKVEKGKSKKLKSVKELLGITIMERSSFEKNPIDFLEAKGYKEVKKDLIIKLPKYSLFELENGRKRMLASAGELQKGNELALPSKYVNFLYLASHYEKLKGSPEDNEQKQLFVEQHKHYLDEIIEQISEFSKRVILADANLDKVLSAYNKHRDKPIREQAENIIHLFTLTNLGAPAAFKYFDTTIDRKRYTSTKEVLDATLIHQSITGLYETRIDLSQLGGDGGGGGEAAAKGGSGGIPWLMKKPLQLTTLVPLQEYEERLLKQTMLTGSYKEKLQSLFLKYDALWQHWENQVGHRRIKPHHIATGTVNPRPQKQYPINPKAKASIQTVINDLLKQGVLIQQNSIMNTPVYPVPKPDGKWRMVLDYREVNKTIPLIAAQNQHSAGILSSIFRGKYKTTLDLSNGFWAHSITPESYWLTAFTWLGQQYCWTRLPQGFLNSPALFNADVVDLLKEVPNVQVYVDDIYISHDDPREHLEQLEKVFSLLLNAGYVVSLKKSEIAQHEVEFLGFNITKEGRGLTETFKQKLLNITPPRDLKQLQSILGKLNFARNFIPNFSELVKPLYNIIATAPGKYITWTTDNSQQLQNIISMLNSAENLEERNPEVRLIMKVNTSPSAGYIRFYNEFAKRPIMYLNYVYTKAEVKFTNTEKLLTTIHKGLIKALDLGMGQEILVYSPIVSMTKIQKTPLPERKALPIRWITWMSYLEDPRIQFHYDKTLPELQQVPTVTDDIIAKIKHPSEFSMVFYTDGSAIKHPNVNKSHNAGMGIAQVQFKPEFTVINTWSIPLGDHTAQLAEVAAVEFACKKALKIDGPVLIVTDSFYVAESVNKELPYWQSNGFFNNKKKPLKHVSKWKSIADCIQLKPDIIIIHEKGHQPTASTFHTEGNNLADKLATQGSYVVNAGKRTADGSEFEKRTADGSEFESPKKKAKVE

SEQ ID NO: 578 - protein, 2084 aa, synthetic construct
MPAAKRVKLDGGDKKYSIGLDIGTNSVGWAVITDEYKVPSKKFKVLGNTDRHSIKKNLIGALLFDSGETAEATRLKRTARRRYTRRKNRICYLQEIFSNEMAKVDDSFFHRLEESFLVEEDKKHERHPIFGNIVDEVAYHEKYPTIYHLRKKLVDSTDKADLRLIYLALAHMIKFRGHFLIEGDLNPDNSDVDKLFIQLVQTYNQLFEENPINASGVDAKAILSARLSKSRRLENLIAQLPGEKKNGLFGNLIALSLGLTPNFKSNFDLAEDAKLQLSKDTYDDDLDNLLAQIGDQYADLFLAAKNLSDAILLSDILRVNTEITKAPLSASMIKRYDEHHQDLTLLKALVRQQLPEKYKEIFFDQSKNGYAGYIDGGASQEEFYKFIKPILEKMDGTEELLVKLNREDLLRKQRTFDNGSIPHQIHLGELHAILRRQEDFYPFLKDNREKIEKILTFRIPYYVGPLARGNSRFAWMTRKSEETITPWNFEEVVDKGASAQSFIERMTNFDKNLPNEKVLPKHSLLYEYFTVYNELTKVKYVTEGMRKPAFLSGEQKKAIVDLLFKTNRKVTVKQLKEDYFKKIECFDSVEISGVEDRFNASLGTYHDLLKIIKDKDFLDNEENEDILEDIVLTLTLFEDREMIEERLKTYAHLFDDKVMKQLKRRRYTGWGRLSRKLINGIRDKQSGKTILDFLKSDGFANRNFMQLIHDDSLTFKEDIQKAQVSGQGDSLHEHIANLAGSPAIKKGILQTVKVVDELVKVMGRHKPENIVIEMARENQTTQKGQKNSRERMKRIEEGIKELGSQILKEHPVENTQLQNEKLYLYYLQNGRDMYVDQELDINRLSDYDVDHIVPQSFLKDDSIDNKVLTRSDKARGKSDNVPSEEVVKKMKNYWRQLLNAKLITQRKFDNLTKAERGGLSELDKAGFIKRQLVETRQITKHVAQILDSRMNTKYDENDKLIREVKVITLKSKLVSDFRKDFQFYKVREINNYHHAHDAYLNAVVGTALIKKYPKLESEFVYGDYKVYDVRKMIAKSEQEIGKATAKYFFYSNIMNFFKTEITLANGEIRKRPLIETNGETGEIVWDKGRDFATVRKVLSMPQVNIVKKTEVQTGGFSKESILPKRNSDKLIARKKDWDPKKYGGFDSPTVAYSVLVVAKVEKGKSKKLKSVKELLGITIMERSSFEKNPIDFLEAKGYKEVKKDLIIKLPKYSLFELENGRKRMLASAGELQKGNELALPSKYVNFLYLASHYEKLKGSPEDNEQKQLFVEQHKHYLDEIIEQISEFSKRVILADANLDKVLSAYNKHRDKPIREQAENIIHLFTLTNLGAPAAFKYFDTTIDRKRYTSTKEVLDATLIHQSITGLYETRIDLSQLGGDGGGGGGGGGGGGIPWLMKKPLQLTTLVPLQEYEERLLKQTMLTGSYKEKLQSLFLKYDALWQHWENQVGHRRIKPHHIATGTVNPRPQKQYPINPKAKASIQTVINDLLKQGVLIQQNSIMNTPVYPVPKPDGKWRMVLDYREVNKTIPLIAAQNQHSAGILSSIFRGKYKTTLDLSNGFWAHSITPESYWLTAFTWLGQQYCWTRLPQGFLNSPALFNADVVDLLKEVPNVQVYVDDIYISHDDPREHLEQLEKVFSLLLNAGYVVSLKKSEIAQHEVEFLGFNITKEGRGLTETFKQKLLNITPPRDLKQLQSILGKLNFARNFIPNFSELVKPLYNIIATAPGKYITWTTDNSQQLQNIISMLNSAENLEERNPEVRLIMKVNTSPSAGYIRFYNEFAKRPIMYLNYVYTKAEVKFTNTEKLLTTIHKGLIKALDLGMGQEILVYSPIVSMTKIQKTPLPERKALPIRWITWMSYLEDPRIQFHYDKTLPELQQVPTVTDDIIAKIKHPSEFSMVFYTDGSAIKHPNVNKSHNAGMGIAQVQFKPEFTVINTWSIPLGDHTAQLAEVAAVEFACKKALKIDGPVLIVTDSFYVAESVNKELPYWQSNGFFNNKKKPLKHVSKWKSIADCIQLKPDIIIIHEKGHQPTASTFHTEGNNLADKLATQGSYVVNAGKRTADGSEFEKRTADGSEFESPKKKAKVE

SEQ ID NO: 579 - protein, 2087 aa, synthetic construct
MPAAKRVKLDGGDKKYSIGLDIGTNSVGWAVITDEYKVPSKKFKVLGNTDRHSIKKNLIGALLFDSGETAEATRLKRTARRRYTRRKNRICYLQEIFSNEMAKVDDSFFHRLEESFLVEEDKKHERHPIFGNIVDEVAYHEKYPTIYHLRKKLVDSTDKADLRLIYLALAHMIKFRGHFLIEGDLNPDNSDVDKLFIQLVQTYNQLFEENPINASGVDAKAILSARLSKSRRLENLIAQLPGEKKNGLFGNLIALSLGLTPNFKSNFDLAEDAKLQLSKDTYDDDLDNLLAQIGDQYADLFLAAKNLSDAILLSDILRVNTEITKAPLSASMIKRYDEHHQDLTLLKALVRQQLPEKYKEIFFDQSKNGYAGYIDGGASQEEFYKFIKPILEKMDGTEELLVKLNREDLLRKQRTFDNGSIPHQIHLGELHAILRRQEDFYPFLKDNREKIEKILTFRIPYYVGPLARGNSRFAWMTRKSEETITPWNFEEVVDKGASAQSFIERMTNFDKNLPNEKVLPKHSLLYEYFTVYNELTKVKYVTEGMRKPAFLSGEQKKAIVDLLFKTNRKVTVKQLKEDYFKKIECFDSVEISGVEDRFNASLGTYHDLLKIIKDKDFLDNEENEDILEDIVLTLTLFEDREMIEERLKTYAHLFDDKVMKQLKRRRYTGWGRLSRKLINGIRDKQSGKTILDFLKSDGFANRNFMQLIHDDSLTFKEDIQKAQVSGQGDSLHEHIANLAGSPAIKKGILQTVKVVDELVKVMGRHKPENIVIEMARENQTTQKGQKNSRERMKRIEEGIKELGSQILKEHPVENTQLQNEKLYLYYLQNGRDMYVDQELDINRLSDYDVDHIVPQSFLKDDSIDNKVLTRSDKARGKSDNVPSEEVVKKMKNYWRQLLNAKLITQRKFDNLTKAERGGLSELDKAGFIKRQLVETRQITKHVAQILDSRMNTKYDENDKLIREVKVITLKSKLVSDFRKDFQFYKVREINNYHHAHDAYLNAVVGTALIKKYPKLESEFVYGDYKVYDVRKMIAKSEQEIGKATAKYFFYSNIMNFFKTEITLANGEIRKRPLIETNGETGEIVWDKGRDFATVRKVLSMPQVNIVKKTEVQTGGFSKESILPKRNSDKLIARKKDWDPKKYGGFDSPTVAYSVLVVAKVEKGKSKKLKSVKELLGITIMERSSFEKNPIDFLEAKGYKEVKKDLIIKLPKYSLFELENGRKRMLASAGELQKGNELALPSKYVNFLYLASHYEKLKGSPEDNEQKQLFVEQHKHYLDEIIEQISEFSKRVILADANLDKVLSAYNKHRDKPIREQAENIIHLFTLTNLGAPAAFKYFDTTIDRKRYTSTKEVLDATLIHQSITGLYETRIDLSQLGGDGGPAPGSSEAAAKGGIPWLMKKPLQLTTLVPLQEYEERLLKQTMLTGSYKEKLQSLFLKYDALWQHWENQVGHRRIKPHHIATGTVNPRPQKQYPINPKAKASIQTVINDLLKQGVLIQQNSIMNTPVYPVPKPDGKWRMVLDYREVNKTIPLIAAQNQHSAGILSSIFRGKYKTTLDLSNGFWAHSITPESYWLTAFTWLGQQYCWTRLPQGFLNSPALFNADVVDLLKEVPNVQVYVDDIYISHDDPREHLEQLEKVFSLLLNAGYVVSLKKSEIAQHEVEFLGFNITKEGRGLTETFKQKLLNITPPRDLKQLQSILGKLNFARNFIPNFSELVKPLYNIIATAPGKYITWTTDNSQQLQNIISMLNSAENLEERNPEVRLIMKVNTSPSAGYIRFYNEFAKRPIMYLNYVYTKAEVKFTNTEKLLTTIHKGLIKALDLGMGQEILVYSPIVSMTKIQKTPLPERKALPIRWITWMSYLEDPRIQFHYDKTLPELQQVPTVTDDIIAKIKHPSEFSMVFYTDGSAIKHPNVNKSHNAGMGIAQVQFKPEFTVINTWSIPLGDHTAQLAEVAAVEFACKKALKIDGPVLIVTDSFYVAESVNKELPYWQSNGFFNNKKKPLKHVSKWKSIADCIQLKPDIIIIHEKGHQPTASTFHTEGNNLADKLATQGSYVVNAGKRTADGSEFEKRTADGSEFESPKKKAKVE

SEQ ID NO: 580 - protein, 2087 aa, synthetic construct
MPAAKRVKLDGGDKKYSIGLDIGTNSVGWAVITDEYKVPSKKFKVLGNTDRHSIKKNLIGALLFDSGETAEATRLKRTARRRYTRRKNRICYLQEIFSNEMAKVDDSFFHRLEESFLVEEDKKHERHPIFGNIVDEVAYHEKYPTIYHLRKKLVDSTDKADLRLIYLALAHMIKFRGHFLIEGDLNPDNSDVDKLFIQLVQTYNQLFEENPINASGVDAKAILSARLSKSRRLENLIAQLPGEKKNGLFGNLIALSLGLTPNFKSNFDLAEDAKLQLSKDTYDDDLDNLLAQIGDQYADLFLAAKNLSDAILLSDILRVNTEITKAPLSASMIKRYDEHHQDLTLLKALVRQQLPEKYKEIFFDQSKNGYAGYIDGGASQEEFYKFIKPILEKMDGTEELLVKLNREDLLRKQRTFDNGSIPHQIHLGELHAILRRQEDFYPFLKDNREKIEKILTFRIPYYVGPLARGNSRFAWMTRKSEETITPWNFEEVVDKGASAQSFIERMTNFDKNLPNEKVLPKHSLLYEYFTVYNELTKVKYVTEGMRKPAFLSGEQKKAIVDLLFKTNRKVTVKQLKEDYFKKIECFDSVEISGVEDRFNASLGTYHDLLKIIKDKDFLDNEENEDILEDIVLTLTLFEDREMIEERLKTYAHLFDDKVMKQLKRRRYTGWGRLSRKLINGIRDKQSGKTILDFLKSDGFANRNFMQLIHDDSLTFKEDIQKAQVSGQGDSLHEHIANLAGSPAIKKGILQTVKVVDELVKVMGRHKPENIVIEMARENQTTQKGQKNSRERMKRIEEGIKELGSQILKEHPVENTQLQNEKLYLYYLQNGRDMYVDQELDINRLSDYDVDHIVPQSFLKDDSIDNKVLTRSDKARGKSDNVPSEEVVKKMKNYWRQLLNAKLITQRKFDNLTKAERGGLSELDKAGFIKRQLVETRQITKHVAQILDSRMNTKYDENDKLIREVKVITLKSKLVSDFRKDFQFYKVREINNYHHAHDAYLNAVVGTALIKKYPKLESEFVYGDYKVYDVRKMIAKSEQEIGKATAKYFFYSNIMNFFKTEITLANGEIRKRPLIETNGETGEIVWDKGRDFATVRKVLSMPQVNIVKKTEVQTGGFSKESILPKRNSDKLIARKKDWDPKKYGGFDSPTVAYSVLVVAKVEKGKSKKLKSVKELLGITIMERSSFEKNPIDFLEAKGYKEVKKDLIIKLPKYSLFELENGRKRMLASAGELQKGNELALPSKYVNFLYLASHYEKLKGSPEDNEQKQLFVEQHKHYLDEIIEQISEFSKRVILADANLDKVLSAYNKHRDKPIREQAENIIHLFTLTNLGAPAAFKYFDTTIDRKRYTSTKEVLDATLIHQSITGLYETRIDLSQLGGDGGGGSEAAAKPAPGGIPWLMKKPLQLTTLVPLQEYEERLLKQTMLTGSYKEKLQSLFLKYDALWQHWENQVGHRRIKPHHIATGTVNPRPQKQYPINPKAKASIQTVINDLLKQGVLIQQNSIMNTPVYPVPKPDGKWRMVLDYREVNKTIPLIAAQNQHSAGILSSIFRGKYKTTLDLSNGFWAHSITPESYWLTAFTWLGQQYCWTRLPQGFLNSPALFNADVVDLLKEVPNVQVYVDDIYISHDDPREHLEQLEKVFSLLLNAGYVVSLKKSEIAQHEVEFLGFNITKEGRGLTETFKQKLLNITPPRDLKQLQSILGKLNFARNFIPNFSELVKPLYNIIATAPGKYITWTTDNSQQLQNIISMLNSAENLEERNPEVRLIMKVNTSPSAGYIRFYNEFAKRPIMYLNYVYTKAEVKFTNTEKLLTTIHKGLIKALDLGMGQEILVYSPIVSMTKIQKTPLPERKALPIRWITWMSYLEDPRIQFHYDKTLPELQQVPTVTDDIIAKIKHPSEFSMVFYTDGSAIKHPNVNKSHNAGMGIAQVQFKPEFTVINTWSIPLGDHTAQLAEVAAVEFACKKALKIDGPVLIVTDSFYVAESVNKELPYWQSNGFFNNKKKPLKHVSKWKSIADCIQLKPDIIIIHEKGHQPTASTFHTEGNNLADKLATQGSYVVNAGKRTADGSEFEKRTADGSEFESPKKKAKVE

SEQ ID NO: 581 - protein, 2085 aa, synthetic construct
MPAAKRVKLDGGDKKYSIGLDIGTNSVGWAVITDEYKVPSKKFKVLGNTDRHSIKKNLIGALLFDSGETAEATRLKRTARRRYTRRKNRICYLQEIFSNEMAKVDDSFFHRLEESFLVEEDKKHERHPIFGNIVDEVAYHEKYPTIYHLRKKLVDSTDKADLRLIYLALAHMIKFRGHFLIEGDLNPDNSDVDKLFIQLVQTYNQLFEENPINASGVDAKAILSARLSKSRRLENLIAQLPGEKKNGLFGNLIALSLGLTPNFKSNFDLAEDAKLQLSKDTYDDDLDNLLAQIGDQYADLFLAAKNLSDAILLSDILRVNTEITKAPLSASMIKRYDEHHQDLTLLKALVRQQLPEKYKEIFFDQSKNGYAGYIDGGASQEEFYKFIKPILEKMDGTEELLVKLNREDLLRKQRTFDNGSIPHQIHLGELHAILRRQEDFYPFLKDNREKIEKILTFRIPYYVGPLARGNSRFAWMTRKSEETITPWNFEEVVDKGASAQSFIERMTNFDKNLPNEKVLPKHSLLYEYFTVYNELTKVKYVTEGMRKPAFLSGEQKKAIVDLLFKTNRKVTVKQLKEDYFKKIECFDSVEISGVEDRFNASLGTYHDLLKIIKDKDFLDNEENEDILEDIVLTLTLFEDREMIEERLKTYAHLFDDKVMKQLKRRRYTGWGRLSRKLINGIRDKQSGKTILDFLKSDGFANRNFMQLIHDDSLTFKEDIQKAQVSGQGDSLHEHIANLAGSPAIKKGILQTVKVVDELVKVMGRHKPENIVIEMARENQTTQKGQKNSRERMKRIEEGIKELGSQILKEHPVENTQLQNEKLYLYYLQNGRDMYVDQELDINRLSDYDVDHIVPQSFLKDDSIDNKVLTRSDKARGKSDNVPSEEVVKKMKNYWRQLLNAKLITQRKFDNLTKAERGGLSELDKAGFIKRQLVETRQITKHVAQILDSRMNTKYDENDKLIREVKVITLKSKLVSDFRKDFQFYKVREINNYHHAHDAYLNAVVGTALIKKYPKLESEFVYGDYKVYDVRKMIAKSEQEIGKATAKYFFYSNIMNFFKTEITLANGEIRKRPLIETNGETGEIVWDKGRDFATVRKVLSMPQVNIVKKTEVQTGGFSKESILPKRNSDKLIARKKDWDPKKYGGFDSPTVAYSVLVVAKVEKGKSKKLKSVKELLGITIMERSSFEKNPIDFLEAKGYKEVKKDLIIKLPKYSLFELENGRKRMLASAGELQKGNELALPSKYVNFLYLASHYEKLKGSPEDNEQKQLFVEQHKHYLDEIIEQISEFSKRVILADANLDKVLSAYNKHRDKPIREQAENIIHLFTLTNLGAPAAFKYFDTTIDRKRYTSTKEVLDATLIHQSITGLYETRIDLSQLGGDGGPAPGSSGGGGGIPWLMKKPLQLTTLVPLQEYEERLLKQTMLTGSYKEKLQSLFLKYDALWQHWENQVGHRRIKPHHIATGTVNPRPQKQYPINPKAKASIQTVINDLLKQGVLIQQNSIMNTPVYPVPKPDGKWRMVLDYREVNKTIPLIAAQNQHSAGILSSIFRGKYKTTLDLSNGFWAHSITPESYWLTAFTWLGQQYCWTRLPQGFLNSPALFNADVVDLLKEVPNVQVYVDDIYISHDDPREHLEQLEKVFSLLLNAGYVVSLKKSEIAQHEVEFLGFNITKEGRGLTETFKQKLLNITPPRDLKQLQSILGKLNFARNFIPNFSELVKPLYNIIATAPGKYITWTTDNSQQLQNIISMLNSAENLEERNPEVRLIMKVNTSPSAGYIRFYNEFAKRPIMYLNYVYTKAEVKFTNTEKLLTTIHKGLIKALDLGMGQEILVYSPIVSMTKIQKTPLPERKALPIRWITWMSYLEDPRIQFHYDKTLPELQQVPTVTDDIIAKIKHPSEFSMVFYTDGSAIKHPNVNKSHNAGMGIAQVQFKPEFTVINTWSIPLGDHTAQLAEVAAVEFACKKALKIDGPVLIVTDSFYVAESVNKELPYWQSNGFFNNKKKPLKHVSKWKSIADCIQLKPDIIIIHEKGHQPTASTFHTEGNNLADKLATQGSYVVNAGKRTADGSEFEKRTADGSEFESPKKKAKVE

SEQ ID NO: 582 - protein, 2087 aa, synthetic construct
MPAAKRVKLDGGDKKYSIGLDIGTNSVGWAVITDEYKVPSKKFKVLGNTDRHSIKKNLIGALLFDSGETAEATRLKRTARRRYTRRKNRICYLQEIFSNEMAKVDDSFFHRLEESFLVEEDKKHERHPIFGNIVDEVAYHEKYPTIYHLRKKLVDSTDKADLRLIYLALAHMIKFRGHFLIEGDLNPDNSDVDKLFIQLVQTYNQLFEENPINASGVDAKAILSARLSKSRRLENLIAQLPGEKKNGLFGNLIALSLGLTPNFKSNFDLAEDAKLQLSKDTYDDDLDNLLAQIGDQYADLFLAAKNLSDAILLSDILRVNTEITKAPLSASMIKRYDEHHQDLTLLKALVRQQLPEKYKEIFFDQSKNGYAGYIDGGASQEEFYKFIKPILEKMDGTEELLVKLNREDLLRKQRTFDNGSIPHQIHLGELHAILRRQEDFYPFLKDNREKIEKILTFRIPYYVGPLARGNSRFAWMTRKSEETITPWNFEEVVDKGASAQSFIERMTNFDKNLPNEKVLPKHSLLYEYFTVYNELTKVKYVTEGMRKPAFLSGEQKKAIVDLLFKTNRKVTVKQLKEDYFKKIECFDSVEISGVEDRFNASLGTYHDLLKIIKDKDFLDNEENEDILEDIVLTLTLFEDREMIEERLKTYAHLFDDKVMKQLKRRRYTGWGRLSRKLINGIRDKQSGKTILDFLKSDGFANRNFMQLIHDDSLTFKEDIQKAQVSGQGDSLHEHIANLAGSPAIKKGILQTVKVVDELVKVMGRHKPENIVIEMARENQTTQKGQKNSRERMKRIEEGIKELGSQILKEHPVENTQLQNEKLYLYYLQNGRDMYVDQELDINRLSDYDVDHIVPQSFLKDDSIDNKVLTRSDKARGKSDNVPSEEVVKKMKNYWRQLLNAKLITQRKFDNLTKAERGGLSELDKAGFIKRQLVETRQITKHVAQILDSRMNTKYDENDKLIREVKVITLKSKLVSDFRKDFQFYKVREINNYHHAHDAYLNAVVGTALIKKYPKLESEFVYGDYKVYDVRKMIAKSEQEIGKATAKYFFYSNIMNFFKTEITLANGEIRKRPLIETNGETGEIVWDKGRDFATVRKVLSMPQVNIVKKTEVQTGGFSKESILPKRNSDKLIARKKDWDPKKYGGFDSPTVAYSVLVVAKVEKGKSKKLKSVKELLGITIMERSSFEKNPIDFLEAKGYKEVKKDLIIKLPKYSLFELENGRKRMLASAGELQKGNELALPSKYVNFLYLASHYEKLKGSPEDNEQKQLFVEQHKHYLDEIIEQISEFSKRVILADANLDKVLSAYNKHRDKPIREQAENIIHLFTLTNLGAPAAFKYFDTTIDRKRYTSTKEVLDATLIHQSITGLYETRIDLSQLGGDGGGGGGSSEAAAKGGIPWLMKKPLQLTTLVPLQEYEERLLKQTMLTGSYKEKLQSLFLKYDALWQHWENQVGHRRIKPHHIATGTVNPRPQKQYPINPKAKASIQTVINDLLKQGVLIQQNSIMNTPVYPVPKPDGKWRMVLDYREVNKTIPLIAAQNQHSAGILSSIFRGKYKTTLDLSNGFWAHSITPESYWLTAFTWLGQQYCWTRLPQGFLNSPALFNADVVDLLKEVPNVQVYVDDIYISHDDPREHLEQLEKVFSLLLNAGYVVSLKKSEIAQHEVEFLGFNITKEGRGLTETFKQKLLNITPPRDLKQLQSILGKLNFARNFIPNFSELVKPLYNIIATAPGKYITWTTDNSQQLQNIISMLNSAENLEERNPEVRLIMKVNTSPSAGYIRFYNEFAKRPIMYLNYVYTKAEVKFTNTEKLLTTIHKGLIKALDLGMGQEILVYSPIVSMTKIQKTPLPERKALPIRWITWMSYLEDPRIQFHYDKTLPELQQVPTVTDDIIAKIKHPSEFSMVFYTDGSAIKHPNVNKSHNAGMGIAQVQFKPEFTVINTWSIPLGDHTAQLAEVAAVEFACKKALKIDGPVLIVTDSFYVAESVNKELPYWQSNGFFNNKKKPLKHVSKWKSIADCIQLKPDIIIIHEKGHQPTASTFHTEGNNLADKLATQGSYVVNAGKRTADGSEFEKRTADGSEFESPKKKAKVE

SEQ ID NO: 583 - protein, 2087 aa, synthetic construct
MPAAKRVKLDGGDKKYSIGLDIGTNSVGWAVITDEYKVPSKKFKVLGNTDRHSIKKNLIGALLFDSGETAEATRLKRTARRRYTRRKNRICYLQEIFSNEMAKVDDSFFHRLEESFLVEEDKKHERHPIFGNIVDEVAYHEKYPTIYHLRKKLVDSTDKADLRLIYLALAHMIKFRGHFLIEGDLNPDNSDVDKLFIQLVQTYNQLFEENPINASGVDAKAILSARLSKSRRLENLIAQLPGEKKNGLFGNLIALSLGLTPNFKSNFDLAEDAKLQLSKDTYDDDLDNLLAQIGDQYADLFLAAKNLSDAILLSDILRVNTEITKAPLSASMIKRYDEHHQDLTLLKALVRQQLPEKYKEIFFDQSKNGYAGYIDGGASQEEFYKFIKPILEKMDGTEELLVKLNREDLLRKQRTFDNGSIPHQIHLGELHAILRRQEDFYPFLKDNREKIEKILTFRIPYYVGPLARGNSRFAWMTRKSEETITPWNFEEVVDKGASAQSFIERMTNFDKNLPNEKVLPKHSLLYEYFTVYNELTKVKYVTEGMRKPAFLSGEQKKAIVDLLFKTNRKVTVKQLKEDYFKKIECFDSVEISGVEDRFNASLGTYHDLLKIIKDKDFLDNEENEDILEDIVLTLTLFEDREMIEERLKTYAHLFDDKVMKQLKRRRYTGWGRLSRKLINGIRDKQSGKTILDFLKSDGFANRNFMQLIHDDSLTFKEDIQKAQVSGQGDSLHEHIANLAGSPAIKKGILQTVKVVDELVKVMGRHKPENIVIEMARENQTTQKGQKNSRERMKRIEEGIKELGSQILKEHPVENTQLQNEKLYLYYLQNGRDMYVDQELDINRLSDYDVDHIVPQSFLKDDSIDNKVLTRSDKARGKSDNVPSEEVVKKMKNYWRQLLNAKLITQRKFDNLTKAERGGLSELDKAGFIKRQLVETRQITKHVAQILDSRMNTKYDENDKLIREVKVITLKSKLVSDFRKDFQFYKVREINNYHHAHDAYLNAVVGTALIKKYPKLESEFVYGDYKVYDVRKMIAKSEQEIGKATAKYFFYSNIMNFFKTEITLANGEIRKRPLIETNGETGEIVWDKGRDFATVRKVLSMPQVNIVKKTEVQTGGFSKESILPKRNSDKLIARKKDWDPKKYGGFDSPTVAYSVLVVAKVEKGKSKKLKSVKELLGITIMERSSFEKNPIDFLEAKGYKEVKKDLIIKLPKYSLFELENGRKRMLASAGELQKGNELALPSKYVNFLYLASHYEKLKGSPEDNEQKQLFVEQHKHYLDEIIEQISEFSKRVILADANLDKVLSAYNKHRDKPIREQAENIIHLFTLTNLGAPAAFKYFDTTIDRKRYTSTKEVLDATLIHQSITGLYETRIDLSQLGGDGGGGSGGGEAAAKGGIPWLMKKPLQLTTLVPLQEYEERLLKQTMLTGSYKEKLQSLFLKYDALWQHWENQVGHRRIKPHHIATGTVNPRPQKQYPINPKAKASIQTVINDLLKQGVLIQQNSIMNTPVYPVPKPDGKWRMVLDYREVNKTIPLIAAQNQHSAGILSSIFRGKYKTTLDLSNGFWAHSITPESYWLTAFTWLGQQYCWTRLPQGFLNSPALFNADVVDLLKEVPNVQVYVDDIYISHDDPREHLEQLEKVFSLLLNAGYVVSLKKSEIAQHEVEFLGFNITKEGRGLTETFKQKLLNITPPRDLKQLQSILGKLNFARNFIPNFSELVKPLYNIIATAPGKYITWTTDNSQQLQNIISMLNSAENLEERNPEVRLIMKVNTSPSAGYIRFYNEFAKRPIMYLNYVYTKAEVKFTNTEKLLTTIHKGLIKALDLGMGQEILVYSPIVSMTKIQKTPLPERKALPIRWITWMSYLEDPRIQFHYDKTLPELQQVPTVTDDIIAKIKHPSEFSMVFYTDGSAIKHPNVNKSHNAGMGIAQVQFKPEFTVINTWSIPLGDHTAQLAEVAAVEFACKKALKIDGPVLIVTDSFYVAESVNKELPYWQSNGFFNNKKKPLKHVSKWKSIADCIQLKPDIIIIHEKGHQPTASTFHTEGNNLADKLATQGSYVVNAGKRTADGSEFEKRTADGSEFESPKKKAKVE

SEQ ID NO: 584 - protein, 2085 aa, synthetic construct
MPAAKRVKLDGGDKKYSIGLDIGTNSVGWAVITDEYKVPSKKFKVLGNTDRHSIKKNLIGALLFDSGETAEATRLKRTARRRYTRRKNRICYLQEIFSNEMAKVDDSFFHRLEESFLVEEDKKHERHPIFGNIVDEVAYHEKYPTIYHLRKKLVDSTDKADLRLIYLALAHMIKFRGHFLIEGDLNPDNSDVDKLFIQLVQTYNQLFEENPINASGVDAKAILSARLSKSRRLENLIAQLPGEKKNGLFGNLIALSLGLTPNFKSNFDLAEDAKLQLSKDTYDDDLDNLLAQIGDQYADLFLAAKNLSDAILLSDILRVNTEITKAPLSASMIKRYDEHHQDLTLLKALVRQQLPEKYKEIFFDQSKNGYAGYIDGGASQEEFYKFIKPILEKMDGTEELLVKLNREDLLRKQRTFDNGSIPHQIHLGELHAILRRQEDFYPFLKDNREKIEKILTFRIPYYVGPLARGNSRFAWMTRKSEETITPWNFEEVVDKGASAQSFIERMTNFDKNLPNEKVLPKHSLLYEYFTVYNELTKVKYVTEGMRKPAFLSGEQKKAIVDLLFKTNRKVTVKQLKEDYFKKIECFDSVEISGVEDRFNASLGTYHDLLKIIKDKDFLDNEENEDILEDIVLTLTLFEDREMIEERLKTYAHLFDDKVMKQLKRRRYTGWGRLSRKLINGIRDKQSGKTILDFLKSDGFANRNFMQLIHDDSLTFKEDIQKAQVSGQGDSLHEHIANLAGSPAIKKGILQTVKVVDELVKVMGRHKPENIVIEMARENQTTQKGQKNSRERMKRIEEGIKELGSQILKEHPVENTQLQNEKLYLYYLQNGRDMYVDQELDINRLSDYDVDHIVPQSFLKDDSIDNKVLTRSDKARGKSDNVPSEEVVKKMKNYWRQLLNAKLITQRKFDNLTKAERGGLSELDKAGFIKRQLVETRQITKHVAQILDSRMNTKYDENDKLIREVKVITLKSKLVSDFRKDFQFYKVREINNYHHAHDAYLNAVVGTALIKKYPKLESEFVYGDYKVYDVRKMIAKSEQEIGKATAKYFFYSNIMNFFKTEITLANGEIRKRPLIETNGETGEIVWDKGRDFATVRKVLSMPQVNIVKKTEVQTGGFSKESILPKRNSDKLIARKKDWDPKKYGGFDSPTVAYSVLVVAKVEKGKSKKLKSVKELLGITIMERSSFEKNPIDFLEAKGYKEVKKDLIIKLPKYSLFELENGRKRMLASAGELQKGNELALPSKYVNFLYLASHYEKLKGSPEDNEQKQLFVEQHKHYLDEIIEQISEFSKRVILADANLDKVLSAYNKHRDKPIREQAENIIHLFTLTNLGAPAAFKYFDTTIDRKRYTSTKEVLDATLIHQSITGLYETRIDLSQLGGDGGGSSGGSPAPGGIPWLMKKPLQLTTLVPLQEYEERLLKQTMLTGSYKEKLQSLFLKYDALWQHWENQVGHRRIKPHHIATGTVNPRPQKQYPINPKAKASIQTVINDLLKQGVLIQQNSIMNTPVYPVPKPDGKWRMVLDYREVNKTIPLIAAQNQHSAGILSSIFRGKYKTTLDLSNGFWAHSITPESYWLTAFTWLGQQYCWTRLPQGFLNSPALFNADVVDLLKEVPNVQVYVDDIYISHDDPREHLEQLEKVFSLLLNAGYVVSLKKSEIAQHEVEFLGFNITKEGRGLTETFKQKLLNITPPRDLKQLQSILGKLNFARNFIPNFSELVKPLYNIIATAPGKYITWTTDNSQQLQNIISMLNSAENLEERNPEVRLIMKVNTSPSAGYIRFYNEFAKRPIMYLNYVYTKAEVKFTNTEKLLTTIHKGLIKALDLGMGQEILVYSPIVSMTKIQKTPLPERKALPIRWITWMSYLEDPRIQFHYDKTLPELQQVPTVTDDIIAKIKHPSEFSMVFYTDGSAIKHPNVNKSHNAGMGIAQVQFKPEFTVINTWSIPLGDHTAQLAEVAAVEFACKKALKIDGPVLIVTDSFYVAESVNKELPYWQSNGFFNNKKKPLKHVSKWKSIADCIQLKPDIIIIHEKGHQPTASTFHTEGNNLADKLATQGSYVVNAGKRTADGSEFEKRTADGSEFESPKKKAKVE

SEQ ID NO: 585 - protein, 2109 aa, synthetic construct
MPAAKRVKLDGGDKKYSIGLDIGTNSVGWAVITDEYKVPSKKFKVLGNTDRHSIKKNLIGALLFDSGETAEATRLKRTARRRYTRRKNRICYLQEIFSNEMAKVDDSFFHRLEESFLVEEDKKHERHPIFGNIVDEVAYHEKYPTIYHLRKKLVDSTDKADLRLIYLALAHMIKFRGHFLIEGDLNPDNSDVDKLFIQLVQTYNQLFEENPINASGVDAKAILSARLSKSRRLENLIAQLPGEKKNGLFGNLIALSLGLTPNFKSNFDLAEDAKLQLSKDTYDDDLDNLLAQIGDQYADLFLAAKNLSDAILLSDILRVNTEITKAPLSASMIKRYDEHHQDLTLLKALVRQQLPEKYKEIFFDQSKNGYAGYIDGGASQEEFYKFIKPILEKMDGTEELLVKLNREDLLRKQRTFDNGSIPHQIHLGELHAILRRQEDFYPFLKDNREKIEKILTFRIPYYVGPLARGNSRFAWMTRKSEETITPWNFEEVVDKGASAQSFIERMTNFDKNLPNEKVLPKHSLLYEYFTVYNELTKVKYVTEGMRKPAFLSGEQKKAIVDLLFKTNRKVTVKQLKEDYFKKIECFDSVEISGVEDRFNASLGTYHDLLKIIKDKDFLDNEENEDILEDIVLTLTLFEDREMIEERLKTYAHLFDDKVMKQLKRRRYTGWGRLSRKLINGIRDKQSGKTILDFLKSDGFANRNFMQLIHDDSLTFKEDIQKAQVSGQGDSLHEHIANLAGSPAIKKGILQTVKVVDELVKVMGRHKPENIVIEMARENQTTQKGQKNSRERMKRIEEGIKELGSQILKEHPVENTQLQNEKLYLYYLQNGRDMYVDQELDINRLSDYDVDHIVPQSFLKDDSIDNKVLTRSDKARGKSDNVPSEEVVKKMKNYWRQLLNAKLITQRKFDNLTKAERGGLSELDKAGFIKRQLVETRQITKHVAQILDSRMNTKYDENDKLIREVKVITLKSKLVSDFRKDFQFYKVREINNYHHAHDAYLNAVVGTALIKKYPKLESEFVYGDYKVYDVRKMIAKSEQEIGKATAKYFFYSNIMNFFKTEITLANGEIRKRPLIETNGETGEIVWDKGRDFATVRKVLSMPQVNIVKKTEVQTGGFSKESILPKRNSDKLIARKKDWDPKKYGGFDSPTVAYSVLVVAKVEKGKSKKLKSVKELLGITIMERSSFEKNPIDFLEAKGYKEVKKDLIIKLPKYSLFELENGRKRMLASAGELQKGNELALPSKYVNFLYLASHYEKLKGSPEDNEQKQLFVEQHKHYLDEIIEQISEFSKRVILADANLDKVLSAYNKHRDKPIREQAENIIHLFTLTNLGAPAAFKYFDTTIDRKRYTSTKEVLDATLIHQSITGLYETRIDLSQLGGDGGSGGSSGGSSGSETPGTSESATPESSGGSSGGSSGGIPWLMKKPLQLTTLVPLQEYEERLLKQTMLTGSYKEKLQSLFLKYDALWQHWENQVGHRRIKPHHIATGTVNPRPQKQYPINPKAKASIQTVINDLLKQGVLIQQNSIMNTPVYPVPKPDGKWRMVLDYREVNKTIPLIAAQNQHSAGILSSIFRGKYKTTLDLSNGFWAHSITPESYWLTAFTWLGQQYCWTRLPQGFLNSPALFNADVVDLLKEVPNVQVYVDDIYISHDDPREHLEQLEKVFSLLLNAGYVVSLKKSEIAQHEVEFLGFNITKEGRGLTETFKQKLLNITPPRDLKQLQSILGKLNFARNFIPNFSELVKPLYNIIATAPGKYITWTTDNSQQLQNIISMLNSAENLEERNPEVRLIMKVNTSPSAGYIRFYNEFAKRPIMYLNYVYTKAEVKFTNTEKLLTTIHKGLIKALDLGMGQEILVYSPIVSMTKIQKTPLPERKALPIRWITWMSYLEDPRIQFHYDKTLPELQQVPTVTDDIIAKIKHPSEFSMVFYTDGSAIKHPNVNKSHNAGMGIAQVQFKPEFTVINTWSIPLGDHTAQLAEVAAVEFACKKALKIDGPVLIVTDSFYVAESVNKELPYWQSNGFFNNKKKPLKHVSKWKSIADCIQLKPDIIIIHEKGHQPTASTFHTEGNNLADKLATQGSYVVNAGKRTADGSEFEKRTADGSEFESPKKKAKVE

SEQ ID NO: 586 - protein, 2088 aa, synthetic construct
MPAAKRVKLDGGDKKYSIGLDIGTNSVGWAVITDEYKVPSKKFKVLGNTDRHSIKKNLIGALLFDSGETAEATRLKRTARRRYTRRKNRICYLQEIFSNEMAKVDDSFFHRLEESFLVEEDKKHERHPIFGNIVDEVAYHEKYPTIYHLRKKLVDSTDKADLRLIYLALAHMIKFRGHFLIEGDLNPDNSDVDKLFIQLVQTYNQLFEENPINASGVDAKAILSARLSKSRRLENLIAQLPGEKKNGLFGNLIALSLGLTPNFKSNFDLAEDAKLQLSKDTYDDDLDNLLAQIGDQYADLFLAAKNLSDAILLSDILRVNTEITKAPLSASMIKRYDEHHQDLTLLKALVRQQLPEKYKEIFFDQSKNGYAGYIDGGASQEEFYKFIKPILEKMDGTEELLVKLNREDLLRKQRTFDNGSIPHQIHLGELHAILRRQEDFYPFLKDNREKIEKILTFRIPYYVGPLARGNSRFAWMTRKSEETITPWNFEEVVDKGASAQSFIERMTNFDKNLPNEKVLPKHSLLYEYFTVYNELTKVKYVTEGMRKPAFLSGEQKKAIVDLLFKTNRKVTVKQLKEDYFKKIECFDSVEISGVEDRFNASLGTYHDLLKIIKDKDFLDNEENEDILEDIVLTLTLFEDREMIEERLKTYAHLFDDKVMKQLKRRRYTGWGRLSRKLINGIRDKQSGKTILDFLKSDGFANRNFMQLIHDDSLTFKEDIQKAQVSGQGDSLHEHIANLAGSPAIKKGILQTVKVVDELVKVMGRHKPENIVIEMARENQTTQKGQKNSRERMKRIEEGIKELGSQILKEHPVENTQLQNEKLYLYYLQNGRDMYVDQELDINRLSDYDVDHIVPQSFLKDDSIDNKVLTRSDKARGKSDNVPSEEVVKKMKNYWRQLLNAKLITQRKFDNLTKAERGGLSELDKAGFIKRQLVETRQITKHVAQILDSRMNTKYDENDKLIREVKVITLKSKLVSDFRKDFQFYKVREINNYHHAHDAYLNAVVGTALIKKYPKLESEFVYGDYKVYDVRKMIAKSEQEIGKATAKYFFYSNIMNFFKTEITLANGEIRKRPLIETNGETGEIVWDKGRDFATVRKVLSMPQVNIVKKTEVQTGGFSKESILPKRNSDKLIARKKDWDPKKYGGFDSPTVAYSVLVVAKVEKGKSKKLKSVKELLGITIMERSSFEKNPIDFLEAKGYKEVKKDLIIKLPKYSLFELENGRKRMLASAGELQKGNELALPSKYVNFLYLASHYEKLKGSPEDNEQKQLFVEQHKHYLDEIIEQISEFSKRVILADANLDKVLSAYNKHRDKPIREQAENIIHLFTLTNLGAPAAFKYFDTTIDRKRYTSTKEVLDATLIHQSITGLYETRIDLSQLGGDGGGSSGSSGSSGSSGGIPWLMKKPLQLTTLVPLQEYEERLLKQTMLTGSYKEKLQSLFLKYDALWQHWENQVGHRRIKPHHIATGTVNPRPQKQYPINPKAKASIQTVINDLLKQGVLIQQNSIMNTPVYPVPKPDGKWRMVLDYREVNKTIPLIAAQNQHSAGILSSIFRGKYKTTLDLSNGFWAHSITPESYWLTAFTWLGQQYCWTRLPQGFLNSPALFNADVVDLLKEVPNVQVYVDDIYISHDDPREHLEQLEKVFSLLLNAGYVVSLKKSEIAQHEVEFLGFNITKEGRGLTETFKQKLLNITPPRDLKQLQSILGKLNFARNFIPNFSELVKPLYNIIATAPGKYITWTTDNSQQLQNIISMLNSAENLEERNPEVRLIMKVNTSPSAGYIRFYNEFAKRPIMYLNYVYTKAEVKFTNTEKLLTTIHKGLIKALDLGMGQEILVYSPIVSMTKIQKTPLPERKALPIRWITWMSYLEDPRIQFHYDKTLPELQQVPTVTDDIIAKIKHPSEFSMVFYTDGSAIKHPNVNKSHNAGMGIAQVQFKPEFTVINTWSIPLGDHTAQLAEVAAVEFACKKALKIDGPVLIVTDSFYVAESVNKELPYWQSNGFFNNKKKPLKHVSKWKSIADCIQLKPDIIIIHEKGHQPTASTFHTEGNNLADKLATQGSYVVNAGKRTADGSEFEKRTADGSEFESPKKKAKVE

SEQ ID NO: 587 - protein, 2085 aa, synthetic construct
MPAAKRVKLDGGDKKYSIGLDIGTNSVGWAVITDEYKVPSKKFKVLGNTDRHSIKKNLIGALLFDSGETAEATRLKRTARRRYTRRKNRICYLQEIFSNEMAKVDDSFFHRLEESFLVEEDKKHERHPIFGNIVDEVAYHEKYPTIYHLRKKLVDSTDKADLRLIYLALAHMIKFRGHFLIEGDLNPDNSDVDKLFIQLVQTYNQLFEENPINASGVDAKAILSARLSKSRRLENLIAQLPGEKKNGLFGNLIALSLGLTPNFKSNFDLAEDAKLQLSKDTYDDDLDNLLAQIGDQYADLFLAAKNLSDAILLSDILRVNTEITKAPLSASMIKRYDEHHQDLTLLKALVRQQLPEKYKEIFFDQSKNGYAGYIDGGASQEEFYKFIKPILEKMDGTEELLVKLNREDLLRKQRTFDNGSIPHQIHLGELHAILRRQEDFYPFLKDNREKIEKILTFRIPYYVGPLARGNSRFAWMTRKSEETITPWNFEEVVDKGASAQSFIERMTNFDKNLPNEKVLPKHSLLYEYFTVYNELTKVKYVTEGMRKPAFLSGEQKKAIVDLLFKTNRKVTVKQLKEDYFKKIECFDSVEISGVEDRFNASLGTYHDLLKIIKDKDFLDNEENEDILEDIVLTLTLFEDREMIEERLKTYAHLFDDKVMKQLKRRRYTGWGRLSRKLINGIRDKQSGKTILDFLKSDGFANRNFMQLIHDDSLTFKEDIQKAQVSGQGDSLHEHIANLAGSPAIKKGILQTVKVVDELVKVMGRHKPENIVIEMARENQTTQKGQKNSRERMKRIEEGIKELGSQILKEHPVENTQLQNEKLYLYYLQNGRDMYVDQELDINRLSDYDVDHIVPQSFLKDDSIDNKVLTRSDKARGKSDNVPSEEVVKKMKNYWRQLLNAKLITQRKFDNLTKAERGGLSELDKAGFIKRQLVETRQITKHVAQILDSRMNTKYDENDKLIREVKVITLKSKLVSDFRKDFQFYKVREINNYHHAHDAYLNAVVGTALIKKYPKLESEFVYGDYKVYDVRKMIAKSEQEIGKATAKYFFYSNIMNFFKTEITLANGEIRKRPLIETNGETGEIVWDKGRDFATVRKVLSMPQVNIVKKTEVQTGGFSKESILPKRNSDKLIARKKDWDPKKYGGFDSPTVAYSVLVVAKVEKGKSKKLKSVKELLGITIMERSSFEKNPIDFLEAKGYKEVKKDLIIKLPKYSLFELENGRKRMLASAGELQKGNELALPSKYVNFLYLASHYEKLKGSPEDNEQKQLFVEQHKHYLDEIIEQISEFSKRVILADANLDKVLSAYNKHRDKPIREQAENIIHLFTLTNLGAPAAFKYFDTTIDRKRYTSTKEVLDATLIHQSITGLYETRIDLSQLGGDGGGSSGGSGGGGGIPWLMKKPLQLTTLVPLQEYEERLLKQTMLTGSYKEKLQSLFLKYDALWQHWENQVGHRRIKPHHIATGTVNPRPQKQYPINPKAKASIQTVINDLLKQGVLIQQNSIMNTPVYPVPKPDGKWRMVLDYREVNKTIPLIAAQNQHSAGILSSIFRGKYKTTLDLSNGFWAHSITPESYWLTAFTWLGQQYCWTRLPQGFLNSPALFNADVVDLLKEVPNVQVYVDDIYISHDDPREHLEQLEKVFSLLLNAGYVVSLKKSEIAQHEVEFLGFNITKEGRGLTETFKQKLLNITPPRDLKQLQSILGKLNFARNFIPNFSELVKPLYNIIATAPGKYITWTTDNSQQLQNIISMLNSAENLEERNPEVRLIMKVNTSPSAGYIRFYNEFAKRPIMYLNYVYTKAEVKFTNTEKLLTTIHKGLIKALDLGMGQEILVYSPIVSMTKIQKTPLPERKALPIRWITWMSYLEDPRIQFHYDKTLPELQQVPTVTDDIIAKIKHPSEFSMVFYTDGSAIKHPNVNKSHNAGMGIAQVQFKPEFTVINTWSIPLGDHTAQLAEVAAVEFACKKALKIDGPVLIVTDSFYVAESVNKELPYWQSNGFFNNKKKPLKHVSKWKSIADCIQLKPDIIIIHEKGHQPTASTFHTEGNNLADKLATQGSYVVNAGKRTADGSEFEKRTADGSEFESPKKKAKVE

SEQ ID NO: 588 - protein, 2084 aa, synthetic construct
MPAAKRVKLDGGDKKYSIGLDIGTNSVGWAVITDEYKVPSKKFKVLGNTDRHSIKKNLIGALLFDSGETAEATRLKRTARRRYTRRKNRICYLQEIFSNEMAKVDDSFFHRLEESFLVEEDKKHERHPIFGNIVDEVAYHEKYPTIYHLRKKLVDSTDKADLRLIYLALAHMIKFRGHFLIEGDLNPDNSDVDKLFIQLVQTYNQLFEENPINASGVDAKAILSARLSKSRRLENLIAQLPGEKKNGLFGNLIALSLGLTPNFKSNFDLAEDAKLQLSKDTYDDDLDNLLAQIGDQYADLFLAAKNLSDAILLSDILRVNTEITKAPLSASMIKRYDEHHQDLTLLKALVRQQLPEKYKEIFFDQSKNGYAGYIDGGASQEEFYKFIKPILEKMDGTEELLVKLNREDLLRKQRTFDNGSIPHQIHLGELHAILRRQEDFYPFLKDNREKIEKILTFRIPYYVGPLARGNSRFAWMTRKSEETITPWNFEEVVDKGASAQSFIERMTNFDKNLPNEKVLPKHSLLYEYFTVYNELTKVKYVTEGMRKPAFLSGEQKKAIVDLLFKTNRKVTVKQLKEDYFKKIECFDSVEISGVEDRFNASLGTYHDLLKIIKDKDFLDNEENEDILEDIVLTLTLFEDREMIEERLKTYAHLFDDKVMKQLKRRRYTGWGRLSRKLINGIRDKQSGKTILDFLKSDGFANRNFMQLIHDDSLTFKEDIQKAQVSGQGDSLHEHIANLAGSPAIKKGILQTVKVVDELVKVMGRHKPENIVIEMARENQTTQKGQKNSRERMKRIEEGIKELGSQILKEHPVENTQLQNEKLYLYYLQNGRDMYVDQELDINRLSDYDVDHIVPQSFLKDDSIDNKVLTRSDKARGKSDNVPSEEVVKKMKNYWRQLLNAKLITQRKFDNLTKAERGGLSELDKAGFIKRQLVETRQITKHVAQILDSRMNTKYDENDKLIREVKVITLKSKLVSDFRKDFQFYKVREINNYHHAHDAYLNAVVGTALIKKYPKLESEFVYGDYKVYDVRKMIAKSEQEIGKATAKYFFYSNIMNFFKTEITLANGEIRKRPLIETNGETGEIVWDKGRDFATVRKVLSMPQVNIVKKTEVQTGGFSKESILPKRNSDKLIARKKDWDPKKYGGFDSPTVAYSVLVVAKVEKGKSKKLKSVKELLGITIMERSSFEKNPIDFLEAKGYKEVKKDLIIKLPKYSLFELENGRKRMLASAGELQKGNELALPSKYVNFLYLASHYEKLKGSPEDNEQKQLFVEQHKHYLDEIIEQISEFSKRVILADANLDKVLSAYNKHRDKPIREQAENIIHLFTLTNLGAPAAFKYFDTTIDRKRYTSTKEVLDATLIHQSITGLYETRIDLSQLGGDGGGGGEAAAKGGIPWLMKKPLQLTTLVPLQEYEERLLKQTMLTGSYKEKLQSLFLKYDALWQHWENQVGHRRIKPHHIATGTVNPRPQKQYPINPKAKASIQTVINDLLKQGVLIQQNSIMNTPVYPVPKPDGKWRMVLDYREVNKTIPLIAAQNQHSAGILSSIFRGKYKTTLDLSNGFWAHSITPESYWLTAFTWLGQQYCWTRLPQGFLNSPALFNADVVDLLKEVPNVQVYVDDIYISHDDPREHLEQLEKVFSLLLNAGYVVSLKKSEIAQHEVEFLGFNITKEGRGLTETFKQKLLNITPPRDLKQLQSILGKLNFARNFIPNFSELVKPLYNIIATAPGKYITWTTDNSQQLQNIISMLNSAENLEERNPEVRLIMKVNTSPSAGYIRFYNEFAKRPIMYLNYVYTKAEVKFTNTEKLLTTIHKGLIKALDLGMGQEILVYSPIVSMTKIQKTPLPERKALPIRWITWMSYLEDPRIQFHYDKTLPELQQVPTVTDDIIAKIKHPSEFSMVFYTDGSAIKHPNVNKSHNAGMGIAQVQFKPEFTVINTWSIPLGDHTAQLAEVAAVEFACKKALKIDGPVLIVTDSFYVAESVNKELPYWQSNGFFNNKKKPLKHVSKWKSIADCIQLKPDIIIIHEKGHQPTASTFHTEGNNLADKLATQGSYVVNAGKRTADGSEFEKRTADGSEFESPKKKAKVE

SEQ ID NO: 589 - protein, 2085 aa, synthetic construct
MPAAKRVKLDGGDKKYSIGLDIGTNSVGWAVITDEYKVPSKKFKVLGNTDRHSIKKNLIGALLFDSGETAEATRLKRTARRRYTRRKNRICYLQEIFSNEMAKVDDSFFHRLEESFLVEEDKKHERHPIFGNIVDEVAYHEKYPTIYHLRKKLVDSTDKADLRLIYLALAHMIKFRGHFLIEGDLNPDNSDVDKLFIQLVQTYNQLFEENPINASGVDAKAILSARLSKSRRLENLIAQLPGEKKNGLFGNLIALSLGLTPNFKSNFDLAEDAKLQLSKDTYDDDLDNLLAQIGDQYADLFLAAKNLSDAILLSDILRVNTEITKAPLSASMIKRYDEHHQDLTLLKALVRQQLPEKYKEIFFDQSKNGYAGYIDGGASQEEFYKFIKPILEKMDGTEELLVKLNREDLLRKQRTFDNGSIPHQIHLGELHAILRRQEDFYPFLKDNREKIEKILTFRIPYYVGPLARGNSRFAWMTRKSEETITPWNFEEVVDKGASAQSFIERMTNFDKNLPNEKVLPKHSLLYEYFTVYNELTKVKYVTEGMRKPAFLSGEQKKAIVDLLFKTNRKVTVKQLKEDYFKKIECFDSVEISGVEDRFNASLGTYHDLLKIIKDKDFLDNEENEDILEDIVLTLTLFEDREMIEERLKTYAHLFDDKVMKQLKRRRYTGWGRLSRKLINGIRDKQSGKTILDFLKSDGFANRNFMQLIHDDSLTFKEDIQKAQVSGQGDSLHEHIANLAGSPAIKKGILQTVKVVDELVKVMGRHKPENIVIEMARENQTTQKGQKNSRERMKRIEEGIKELGSQILKEHPVENTQLQNEKLYLYYLQNGRDMYVDQELDINRLSDYDVDHIVPQSFLKDDSIDNKVLTRSDKARGKSDNVPSEEVVKKMKNYWRQLLNAKLITQRKFDNLTKAERGGLSELDKAGFIKRQLVETRQITKHVAQILDSRMNTKYDENDKLIREVKVITLKSKLVSDFRKDFQFYKVREINNYHHAHDAYLNAVVGTALIKKYPKLESEFVYGDYKVYDVRKMIAKSEQEIGKATAKYFFYSNIMNFFKTEITLANGEIRKRPLIETNGETGEIVWDKGRDFATVRKVLSMPQVNIVKKTEVQTGGFSKESILPKRNSDKLIARKKDWDPKKYGGFDSPTVAYSVLVVAKVEKGKSKKLKSVKELLGITIMERSSFEKNPIDFLEAKGYKEVKKDLIIKLPKYSLFELENGRKRMLASAGELQKGNELALPSKYVNFLYLASHYEKLKGSPEDNEQKQLFVEQHKHYLDEIIEQISEFSKRVILADANLDKVLSAYNKHRDKPIREQAENIIHLFTLTNLGAPAAFKYFDTTIDRKRYTSTKEVLDATLIHQSITGLYETRIDLSQLGGDGGGGSGSSPAPGGIPWLMKKPLQLTTLVPLQEYEERLLKQTMLTGSYKEKLQSLFLKYDALWQHWENQVGHRRIKPHHIATGTVNPRPQKQYPINPKAKASIQTVINDLLKQGVLIQQNSIMNTPVYPVPKPDGKWRMVLDYREVNKTIPLIAAQNQHSAGILSSIFRGKYKTTLDLSNGFWAHSITPESYWLTAFTWLGQQYCWTRLPQGFLNSPALFNADVVDLLKEVPNVQVYVDDIYISHDDPREHLEQLEKVFSLLLNAGYVVSLKKSEIAQHEVEFLGFNITKEGRGLTETFKQKLLNITPPRDLKQLQSILGKLNFARNFIPNFSELVKPLYNIIATAPGKYITWTTDNSQQLQNIISMLNSAENLEERNPEVRLIMKVNTSPSAGYIRFYNEFAKRPIMYLNYVYTKAEVKFTNTEKLLTTIHKGLIKALDLGMGQEILVYSPIVSMTKIQKTPLPERKALPIRWITWMSYLEDPRIQFHYDKTLPELQQVPTVTDDIIAKIKHPSEFSMVFYTDGSAIKHPNVNKSHNAGMGIAQVQFKPEFTVINTWSIPLGDHTAQLAEVAAVEFACKKALKIDGPVLIVTDSFYVAESVNKELPYWQSNGFFNNKKKPLKHVSKWKSIADCIQLKPDIIIIHEKGHQPTASTFHTEGNNLADKLATQGSYVVNAGKRTADGSEFEKRTADGSEFESPKKKAKVE

SEQ ID NO: 590 - protein, 2195 aa, synthetic construct
MPAAKRVKLDGGDKKYSIGLDIGTNSVGWAVITDEYKVPSKKFKVLGNTDRHSIKKNLIGALLFDSGETAEATRLKRTARRRYTRRKNRICYLQEIFSNEMAKVDDSFFHRLEESFLVEEDKKHERHPIFGNIVDEVAYHEKYPTIYHLRKKLVDSTDKADLRLIYLALAHMIKFRGHFLIEGDLNPDNSDVDKLFIQLVQTYNQLFEENPINASGVDAKAILSARLSKSRRLENLIAQLPGEKKNGLFGNLIALSLGLTPNFKSNFDLAEDAKLQLSKDTYDDDLDNLLAQIGDQYADLFLAAKNLSDAILLSDILRVNTEITKAPLSASMIKRYDEHHQDLTLLKALVRQQLPEKYKEIFFDQSKNGYAGYIDGGASQEEFYKFIKPILEKMDGTEELLVKLNREDLLRKQRTFDNGSIPHQIHLGELHAILRRQEDFYPFLKDNREKIEKILTFRIPYYVGPLARGNSRFAWMTRKSEETITPWNFEEVVDKGASAQSFIERMTNFDKNLPNEKVLPKHSLLYEYFTVYNELTKVKYVTEGMRKPAFLSGEQKKAIVDLLFKTNRKVTVKQLKEDYFKKIECFDSVEISGVEDRFNASLGTYHDLLKIIKDKDFLDNEENEDILEDIVLTLTLFEDREMIEERLKTYAHLFDDKVMKQLKRRRYTGWGRLSRKLINGIRDKQSGKTILDFLKSDGFANRNFMQLIHDDSLTFKEDIQKAQVSGQGDSLHEHIANLAGSPAIKKGILQTVKVVDELVKVMGRHKPENIVIEMARENQTTQKGQKNSRERMKRIEEGIKELGSQILKEHPVENTQLQNEKLYLYYLQNGRDMYVDQELDINRLSDYDVDHIVPQSFLKDDSIDNKVLTRSDKARGKSDNVPSEEVVKKMKNYWRQLLNAKLITQRKFDNLTKAERGGLSELDKAGFIKRQLVETRQITKHVAQILDSRMNTKYDENDKLIREVKVITLKSKLVSDFRKDFQFYKVREINNYHHAHDAYLNAVVGTALIKKYPKLESEFVYGDYKVYDVRKMIAKSEQEIGKATAKYFFYSNIMNFFKTEITLANGEIRKRPLIETNGETGEIVWDKGRDFATVRKVLSMPQVNIVKKTEVQTGGFSKESILPKRNSDKLIARKKDWDPKKYGGFDSPTVAYSVLVVAKVEKGKSKKLKSVKELLGITIMERSSFEKNPIDFLEAKGYKEVKKDLIIKLPKYSLFELENGRKRMLASAGELQKGNELALPSKYVNFLYLASHYEKLKGSPEDNEQKQLFVEQHKHYLDEIIEQISEFSKRVILADANLDKVLSAYNKHRDKPIREQAENIIHLFTLTNLGAPAAFKYFDTTIDRKRYTSTKEVLDATLIHQSITGLYETRIDLSQLGGDGGEAAAKEAAAKEAAAKEAAAKEAAAKEAAAKGGMDPLQLLQPLEAEIKGTKLKAHWNSGATITCVPQAFLEEEVPIKNIWIKTIHGEKEQPVYYLTFKIQGRKVEAEVISSPYDYILVSPSDIPWLMKKPLQLTTLVPLQEYEERLLKQTMLTGSYKEKLQSLFLKYDALWQHWENQVGHRRIKPHHIATGTVNPRPQKQYPINPKAKASIQTVINDLLKQGVLIQQNSIMNTPVYPVPKPDGKWRMVLDYREVNKTIPLIAAQNQHSAGILSSIFRGKYKTTLDLSNGFWAHSITPESYWLTAFTWLGQQYCWTRLPQGFLNSPALFNADVVDLLKEVPNVQVYVDDIYISHDDPREHLEQLEKVFSLLLNAGYVVSLKKSEIAQHEVEFLGFNITKEGRGLTETFKQKLLNITPPRDLKQLQSILGLLNFARNFIPNFSELVKPLYNIIATAPGKYITWTTDNSQQLQNIISMLNSAENLEERNPEVRLIMKVNTSPSAGYIRFYNEFAKRPIMYLNYVYTKAEVKFTNTEKLLTTIHKGLIKALDLGMGQEILVYSPIVSMTKIQKTPLPERKALPIRWITWMSYLEDPRIQFHYDKTLPELQQVPTVTDDIIAKIKHPSEFSMVFYTDGSAIKHPNVNKSHNAGMGIAQVQFKPEFTVINTWSIPLGDHTAQLAEVAAVEFACKKALKIDGPVLIVTDSFYVAESVNKELPYWQSNGFFNNKKKPLKHVSKWKSIADCIQLKPDIIIIHEKGHQPTASTFHTEGNNLADKLATQGSYVVNAGKRTADGSEFEKRTADGSEFESPKKKAKVE

SEQ ID NO: 591 - protein, 2211 aa, synthetic construct
MPAAKRVKLDGGDKKYSIGLDIGTNSVGWAVITDEYKVPSKKFKVLGNTDRHSIKKNLIGALLFDSGETAEATRLKRTARRRYTRRKNRICYLQEIFSNEMAKVDDSFFHRLEESFLVEEDKKHERHPIFGNIVDEVAYHEKYPTIYHLRKKLVDSTDKADLRLIYLALAHMIKFRGHFLIEGDLNPDNSDVDKLFIQLVQTYNQLFEENPINASGVDAKAILSARLSKSRRLENLIAQLPGEKKNGLFGNLIALSLGLTPNFKSNFDLAEDAKLQLSKDTYDDDLDNLLAQIGDQYADLFLAAKNLSDAILLSDILRVNTEITKAPLSASMIKRYDEHHQDLTLLKALVRQQLPEKYKEIFFDQSKNGYAGYIDGGASQEEFYKFIKPILEKMDGTEELLVKLNREDLLRKQRTFDNGSIPHQIHLGELHAILRRQEDFYPFLKDNREKIEKILTFRIPYYVGPLARGNSRFAWMTRKSEETITPWNFEEVVDKGASAQSFIERMTNFDKNLPNEKVLPKHSLLYEYFTVYNELTKVKYVTEGMRKPAFLSGEQKKAIVDLLFKTNRKVTVKQLKEDYFKKIECFDSVEISGVEDRFNASLGTYHDLLKIIKDKDFLDNEENEDILEDIVLTLTLFEDREMIEERLKTYAHLFDDKVMKQLKRRRYTGWGRLSRKLINGIRDKQSGKTILDFLKSDGFANRNFMQLIHDDSLTFKEDIQKAQVSGQGDSLHEHIANLAGSPAIKKGILQTVKVVDELVKVMGRHKPENIVIEMARENQTTQKGQKNSRERMKRIEEGIKELGSQILKEHPVENTQLQNEKLYLYYLQNGRDMYVDQELDINRLSDYDVDHIVPQSFLKDDSIDNKVLTRSDKARGKSDNVPSEEVVKKMKNYWRQLLNAKLITQRKFDNLTKAERGGLSELDKAGFIKRQLVETRQITKHVAQILDSRMNTKYDENDKLIREVKVITLKSKLVSDFRKDFQFYKVREINNYHHAHDAYLNAVVGTALIKKYPKLESEFVYGDYKVYDVRKMIAKSEQEIGKATAKYFFYSNIMNFFKTEITLANGEIRKRPLIETNGETGEIVWDKGRDFATVRKVLSMPQVNIVKKTEVQTGGFSKESILPKRNSDKLIARKKDWDPKKYGGFDSPTVAYSVLVVAKVEKGKSKKLKSVKELLGITIMERSSFEKNPIDFLEAKGYKEVKKDLIIKLPKYSLFELENGRKRMLASAGELQKGNELALPSKYVNFLYLASHYEKLKGSPEDNEQKQLFVEQHKHYLDEIIEQISEFSKRVILADANLDKVLSAYNKHRDKPIREQAENIIHLFTLTNLGAPAAFKYFDTTIDRKRYTSTKEVLDATLIHQSITGLYETRIDLSQLGGDGGAEAAAKEAAAKEAAAKEAAAKALEAEAAAKEAAAKEAAAKEAAAKAGGMDPLQLLQPLEAEIKGTKLKAHWNSGATITCVPQAFLEEEVPIKNIWIKTIHGEKEQPVYYLTFKIQGRKVEAEVISSPYDYILVSPSDIPWLMKKPLQLTTLVPLQEYEERLLKQTMLTGSYKEKLQSLFLKYDALWQHWENQVGHRRIKPHHIATGTVNPRPQKQYPINPKAKASIQTVINDLLKQGVLIQQNSIMNTPVYPVPKPDGKWRMVLDYREVNKTIPLIAAQNQHSAGILSSIFRGKYKTTLDLSNGFWAHSITPESYWLTAFTWLGQQYCWTRLPQGFLNSPALFNADVVDLLKEVPNVQVYVDDIYISHDDPREHLEQLEKVFSLLLNAGYVVSLKKSEIAQHEVEFLGFNITKEGRGLTETFKQKLLNITPPRDLKQLQSILGLLNFARNFIPNFSELVKPLYNIIATAPGKYITWTTDNSQQLQNIISMLNSAENLEERNPEVRLIMKVNTSPSAGYIRFYNEFAKRPIMYLNYVYTKAEVKFTNTEKLLTTIHKGLIKALDLGMGQEILVYSPIVSMTKIQKTPLPERKALPIRWITWMSYLEDPRIQFHYDKTLPELQQVPTVTDDIIAKIKHPSEFSMVFYTDGSAIKHPNVNKSHNAGMGIAQVQFKPEFTVINTWSIPLGDHTAQLAEVAAVEFACKKALKIDGPVLIVTDSFYVAESVNKELPYWQSNGFFNNKKKPLKHVSKWKSIADCIQLKPDIIIIHEKGHQPTASTFHTEGNNLADKLATQGSYVVNAGKRTADGSEFEKRTADGSEFESPKKKAKVE

SEQ ID NO: 592 - protein, 2195 aa, synthetic construct
MPAAKRVKLDGGDKKYSIGLDIGTNSVGWAVITDEYKVPSKKFKVLGNTDRHSIKKNLIGALLFDSGETAEATRLKRTARRRYTRRKNRICYLQEIFSNEMAKVDDSFFHRLEESFLVEEDKKHERHPIFGNIVDEVAYHEKYPTIYHLRKKLVDSTDKADLRLIYLALAHMIKFRGHFLIEGDLNPDNSDVDKLFIQLVQTYNQLFEENPINASGVDAKAILSARLSKSRRLENLIAQLPGEKKNGLFGNLIALSLGLTPNFKSNFDLAEDAKLQLSKDTYDDDLDNLLAQIGDQYADLFLAAKNLSDAILLSDILRVNTEITKAPLSASMIKRYDEHHQDLTLLKALVRQQLPEKYKEIFFDQSKNGYAGYIDGGASQEEFYKFIKPILEKMDGTEELLVKLNREDLLRKQRTFDNGSIPHQIHLGELHAILRRQEDFYPFLKDNREKIEKILTFRIPYYVGPLARGNSRFAWMTRKSEETITPWNFEEVVDKGASAQSFIERMTNFDKNLPNEKVLPKHSLLYEYFTVYNELTKVKYVTEGMRKPAFLSGEQKKAIVDLLFKTNRKVTVKQLKEDYFKKIECFDSVEISGVEDRFNASLGTYHDLLKIIKDKDFLDNEENEDILEDIVLTLTLFEDREMIEERLKTYAHLFDDKVMKQLKRRRYTGWGRLSRKLINGIRDKQSGKTILDFLKSDGFANRNFMQLIHDDSLTFKEDIQKAQVSGQGDSLHEHIANLAGSPAIKKGILQTVKVVDELVKVMGRHKPENIVIEMARENQTTQKGQKNSRERMKRIEEGIKELGSQILKEHPVENTQLQNEKLYLYYLQNGRDMYVDQELDINRLSDYDVDHIVPQSFLKDDSIDNKVLTRSDKARGKSDNVPSEEVVKKMKNYWRQLLNAKLITQRKFDNLTKAERGGLSELDKAGFIKRQLVETRQITKHVAQILDSRMNTKYDENDKLIREVKVITLKSKLVSDFRKDFQFYKVREINNYHHAHDAYLNAVVGTALIKKYPKLESEFVYGDYKVYDVRKMIAKSEQEIGKATAKYFFYSNIMNFFKTEITLANGEIRKRPLIETNGETGEIVWDKGRDFATVRKVLSMPQVNIVKKTEVQTGGFSKESILPKRNSDKLIARKKDWDPKKYGGFDSPTVAYSVLVVAKVEKGKSKKLKSVKELLGITIMERSSFEKNPIDFLEAKGYKEVKKDLIIKLPKYSLFELENGRKRMLASAGELQKGNELALPSKYVNFLYLASHYEKLKGSPEDNEQKQLFVEQHKHYLDEIIEQISEFSKRVILADANLDKVLSAYNKHRDKPIREQAENIIHLFTLTNLGAPAAFKYFDTTIDRKRYTSTKEVLDATLIHQSITGLYETRIDLSQLGGDGGGGGGSGGGGSGGGGSGGGGSGGGGSGGGGSGGMDPLQLLQPLEAEIKGTKLKAHWNSGATITCVPQAFLEEEVPIKNIWIKTIHGEKEQPVYYLTFKIQGRKVEAEVISSPYDYILVSPSDIPWLMKKPLQLTTLVPLQEYEERLLKQTMLTGSYKEKLQSLFLKYDALWQHWENQVGHRRIKPHHIATGTVNPRPQKQYPINPKAKASIQTVINDLLKQGVLIQQNSIMNTPVYPVPKPDGKWRMVLDYREVNKTIPLIAAQNQHSAGILSSIFRGKYKTTLDLSNGFWAHSITPESYWLTAFTWLGQQYCWTRLPQGFLNSPALFNADVVDLLKEVPNVQVYVDDIYISHDDPREHLEQLEKVFSLLLNAGYVVSLKKSEIAQHEVEFLGFNITKEGRGLTETFKQKLLNITPPRDLKQLQSILGLLNFARNFIPNFSELVKPLYNIIATAPGKYITWTTDNSQQLQNIISMLNSAENLEERNPEVRLIMKVNTSPSAGYIRFYNEFAKRPIMYLNYVYTKAEVKFTNTEKLLTTIHKGLIKALDLGMGQEILVYSPIVSMTKIQKTPLPERKALPIRWITWMSYLEDPRIQFHYDKTLPELQQVPTVTDDIIAKIKHPSEFSMVFYTDGSAIKHPNVNKSHNAGMGIAQVQFKPEFTVINTWSIPLGDHTAQLAEVAAVEFACKKALKIDGPVLIVTDSFYVAESVNKELPYWQSNGFFNNKKKPLKHVSKWKSIADCIQLKPDIIIIHEKGHQPTASTFHTEGNNLADKLATQGSYVVNAGKRTADGSEFEKRTADGSEFESPKKKAKVE

SEQ ID NO: 593 - protein, 2190 aa, synthetic construct
MPAAKRVKLDGGDKKYSIGLDIGTNSVGWAVITDEYKVPSKKFKVLGNTDRHSIKKNLIGALLFDSGETAEATRLKRTARRRYTRRKNRICYLQEIFSNEMAKVDDSFFHRLEESFLVEEDKKHERHPIFGNIVDEVAYHEKYPTIYHLRKKLVDSTDKADLRLIYLALAHMIKFRGHFLIEGDLNPDNSDVDKLFIQLVQTYNQLFEENPINASGVDAKAILSARLSKSRRLENLIAQLPGEKKNGLFGNLIALSLGLTPNFKSNFDLAEDAKLQLSKDTYDDDLDNLLAQIGDQYADLFLAAKNLSDAILLSDILRVNTEITKAPLSASMIKRYDEHHQDLTLLKALVRQQLPEKYKEIFFDQSKNGYAGYIDGGASQEEFYKFIKPILEKMDGTEELLVKLNREDLLRKQRTFDNGSIPHQIHLGELHAILRRQEDFYPFLKDNREKIEKILTFRIPYYVGPLARGNSRFAWMTRKSEETITPWNFEEVVDKGASAQSFIERMTNFDKNLPNEKVLPKHSLLYEYFTVYNELTKVKYVTEGMRKPAFLSGEQKKAIVDLLFKTNRKVTVKQLKEDYFKKIECFDSVEISGVEDRFNASLGTYHDLLKIIKDKDFLDNEENEDILEDIVLTLTLFEDREMIEERLKTYAHLFDDKVMKQLKRRRYTGWGRLSRKLINGIRDKQSGKTILDFLKSDGFANRNFMQLIHDDSLTFKEDIQKAQVSGQGDSLHEHIANLAGSPAIKKGILQTVKVVDELVKVMGRHKPENIVIEMARENQTTQKGQKNSRERMKRIEEGIKELGSQILKEHPVENTQLQNEKLYLYYLQNGRDMYVDQELDINRLSDYDVDHIVPQSFLKDDSIDNKVLTRSDKARGKSDNVPSEEVVKKMKNYWRQLLNAKLITQRKFDNLTKAERGGLSELDKAGFIKRQLVETRQITKHVAQILDSRMNTKYDENDKLIREVKVITLKSKLVSDFRKDFQFYKVREINNYHHAHDAYLNAVVGTALIKKYPKLESEFVYGDYKVYDVRKMIAKSEQEIGKATAKYFFYSNIMNFFKTEITLANGEIRKRPLIETNGETGEIVWDKGRDFATVRKVLSMPQVNIVKKTEVQTGGFSKESILPKRNSDKLIARKKDWDPKKYGGFDSPTVAYSVLVVAKVEKGKSKKLKSVKELLGITIMERSSFEKNPIDFLEAKGYKEVKKDLIIKLPKYSLFELENGRKRMLASAGELQKGNELALPSKYVNFLYLASHYEKLKGSPEDNEQKQLFVEQHKHYLDEIIEQISEFSKRVILADANLDKVLSAYNKHRDKPIREQAENIIHLFTLTNLGAPAAFKYFDTTIDRKRYTSTKEVLDATLIHQSITGLYETRIDLSQLGGDGGEAAAKEAAAKEAAAKEAAAKEAAAKGGMDPLQLLQPLEAEIKGTKLKAHWNSGATITCVPQAFLEEEVPIKNIWIKTIHGEKEQPVYYLTFKIQGRKVEAEVISSPYDYILVSPSDIPWLMKKPLQLTTLVPLQEYEERLLKQTMLTGSYKEKLQSLFLKYDALWQHWENQVGHRRIKPHHIATGTVNPRPQKQYPINPKAKASIQTVINDLLKQGVLIQQNSIMNTPVYPVPKPDGKWRMVLDYREVNKTIPLIAAQNQHSAGILSSIFRGKYKTTLDLSNGFWAHSITPESYWLTAFTWLGQQYCWTRLPQGFLNSPALFNADVVDLLKEVPNVQVYVDDIYISHDDPREHLEQLEKVFSLLLNAGYVVSLKKSEIAQHEVEFLGFNITKEGRGLTETFKQKLLNITPPRDLKQLQSILGLLNFARNFIPNFSELVKPLYNIIATAPGKYITWTTDNSQQLQNIISMLNSAENLEERNPEVRLIMKVNTSPSAGYIRFYNEFAKRPIMYLNYVYTKAEVKFTNTEKLLTTIHKGLIKALDLGMGQEILVYSPIVSMTKIQKTPLPERKALPIRWITWMSYLEDPRIQFHYDKTLPELQQVPTVTDDIIAKIKHPSEFSMVFYTDGSAIKHPNVNKSHNAGMGIAQVQFKPEFTVINTWSIPLGDHTAQLAEVAAVEFACKKALKIDGPVLIVTDSFYVAESVNKELPYWQSNGFFNNKKKPLKHVSKWKSIADCIQLKPDIIIIHEKGHQPTASTFHTEGNNLADKLATQGSYVVNAGKRTADGSEFEKRTADGSEFESPKKKAKVE

SEQ ID NO: 594 - protein, 2174 aa, synthetic construct
MPAAKRVKLDGGDKKYSIGLDIGTNSVGWAVITDEYKVPSKKFKVLGNTDRHSIKKNLIGALLFDSGETAEATRLKRTARRRYTRRKNRICYLQEIFSNEMAKVDDSFFHRLEESFLVEEDKKHERHPIFGNIVDEVAYHEKYPTIYHLRKKLVDSTDKADLRLIYLALAHMIKFRGHFLIEGDLNPDNSDVDKLFIQLVQTYNQLFEENPINASGVDAKAILSARLSKSRRLENLIAQLPGEKKNGLFGNLIALSLGLTPNFKSNFDLAEDAKLQLSKDTYDDDLDNLLAQIGDQYADLFLAAKNLSDAILLSDILRVNTEITKAPLSASMIKRYDEHHQDLTLLKALVRQQLPEKYKEIFFDQSKNGYAGYIDGGASQEEFYKFIKPILEKMDGTEELLVKLNREDLLRKQRTFDNGSIPHQIHLGELHAILRRQEDFYPFLKDNREKIEKILTFRIPYYVGPLARGNSRFAWMTRKSEETITPWNFEEVVDKGASAQSFIERMTNFDKNLPNEKVLPKHSLLYEYFTVYNELTKVKYVTEGMRKPAFLSGEQKKAIVDLLFKTNRKVTVKQLKEDYFKKIECFDSVEISGVEDRFNASLGTYHDLLKIIKDKDFLDNEENEDILEDIVLTLTLFEDREMIEERLKTYAHLFDDKVMKQLKRRRYTGWGRLSRKLINGIRDKQSGKTILDFLKSDGFANRNFMQLIHDDSLTFKEDIQKAQVSGQGDSLHEHIANLAGSPAIKKGILQTVKVVDELVKVMGRHKPENIVIEMARENQTTQKGQKNSRERMKRIEEGIKELGSQILKEHPVENTQLQNEKLYLYYLQNGRDMYVDQELDINRLSDYDVDHIVPQSFLKDDSIDNKVLTRSDKARGKSDNVPSEEVVKKMKNYWRQLLNAKLITQRKFDNLTKAERGGLSELDKAGFIKRQLVETRQITKHVAQILDSRMNTKYDENDKLIREVKVITLKSKLVSDFRKDFQFYKVREINNYHHAHDAYLNAVVGTALIKKYPKLESEFVYGDYKVYDVRKMIAKSEQEIGKATAKYFFYSNIMNFFKTEITLANGEIRKRPLIETNGETGEIVWDKGRDFATVRKVLSMPQVNIVKKTEVQTGGFSKESILPKRNSDKLIARKKDWDPKKYGGFDSPTVAYSVLVVAKVEKGKSKKLKSVKELLGITIMERSSFEKNPIDFLEAKGYKEVKKDLIIKLPKYSLFELENGRKRMLASAGELQKGNELALPSKYVNFLYLASHYEKLKGSPEDNEQKQLFVEQHKHYLDEIIEQISEFSKRVILADANLDKVLSAYNKHRDKPIREQAENIIHLFTLTNLGAPAAFKYFDTTIDRKRYTSTKEVLDATLIHQSITGLYETRIDLSQLGGDGGGGGPAPGGSGGMDPLQLLQPLEAEIKGTKLKAHWNSGATITCVPQAFLEEEVPIKNIWIKTIHGEKEQPVYYLTFKIQGRKVEAEVISSPYDYILVSPSDIPWLMKKPLQLTTLVPLQEYEERLLKQTMLTGSYKEKLQSLFLKYDALWQHWENQVGHRRIKPHHIATGTVNPRPQKQYPINPKAKASIQTVINDLLKQGVLIQQNSIMNTPVYPVPKPDGKWRMVLDYREVNKTIPLIAAQNQHSAGILSSIFRGKYKTTLDLSNGFWAHSITPESYWLTAFTWLGQQYCWTRLPQGFLNSPALFNADVVDLLKEVPNVQVYVDDIYISHDDPREHLEQLEKVFSLLLNAGYVVSLKKSEIAQHEVEFLGFNITKEGRGLTETFKQKLLNITPPRDLKQLQSILGLLNFARNFIPNFSELVKPLYNIIATAPGKYITWTTDNSQQLQNIISMLNSAENLEERNPEVRLIMKVNTSPSAGYIRFYNEFAKRPIMYLNYVYTKAEVKFTNTEKLLTTIHKGLIKALDLGMGQEILVYSPIVSMTKIQKTPLPERKALPIRWITWMSYLEDPRIQFHYDKTLPELQQVPTVTDDIIAKIKHPSEFSMVFYTDGSAIKHPNVNKSHNAGMGIAQVQFKPEFTVINTWSIPLGDHTAQLAEVAAVEFACKKALKIDGPVLIVTDSFYVAESVNKELPYWQSNGFFNNKKKPLKHVSKWKSIADCIQLKPDIIIIHEKGHQPTASTFHTEGNNLADKLATQGSYVVNAGKRTADGSEFEKRTADGSEFESPKKKAKVE

SEQ ID NO: 595 - protein, 2176 aa, synthetic construct
MPAAKRVKLDGGDKKYSIGLDIGTNSVGWAVITDEYKVPSKKFKVLGNTDRHSIKKNLIGALLFDSGETAEATRLKRTARRRYTRRKNRICYLQEIFSNEMAKVDDSFFHRLEESFLVEEDKKHERHPIFGNIVDEVAYHEKYPTIYHLRKKLVDSTDKADLRLIYLALAHMIKFRGHFLIEGDLNPDNSDVDKLFIQLVQTYNQLFEENPINASGVDAKAILSARLSKSRRLENLIAQLPGEKKNGLFGNLIALSLGLTPNFKSNFDLAEDAKLQLSKDTYDDDLDNLLAQIGDQYADLFLAAKNLSDAILLSDILRVNTEITKAPLSASMIKRYDEHHQDLTLLKALVRQQLPEKYKEIFFDQSKNGYAGYIDGGASQEEFYKFIKPILEKMDGTEELLVKLNREDLLRKQRTFDNGSIPHQIHLGELHAILRRQEDFYPFLKDNREKIEKILTFRIPYYVGPLARGNSRFAWMTRKSEETITPWNFEEVVDKGASAQSFIERMTNFDKNLPNEKVLPKHSLLYEYFTVYNELTKVKYVTEGMRKPAFLSGEQKKAIVDLLFKTNRKVTVKQLKEDYFKKIECFDSVEISGVEDRFNASLGTYHDLLKIIKDKDFLDNEENEDILEDIVLTLTLFEDREMIEERLKTYAHLFDDKVMKQLKRRRYTGWGRLSRKLINGIRDKQSGKTILDFLKSDGFANRNFMQLIHDDSLTFKEDIQKAQVSGQGDSLHEHIANLAGSPAIKKGILQTVKVVDELVKVMGRHKPENIVIEMARENQTTQKGQKNSRERMKRIEEGIKELGSQILKEHPVENTQLQNEKLYLYYLQNGRDMYVDQELDINRLSDYDVDHIVPQSFLKDDSIDNKVLTRSDKARGKSDNVPSEEVVKKMKNYWRQLLNAKLITQRKFDNLTKAERGGLSELDKAGFIKRQLVETRQITKHVAQILDSRMNTKYDENDKLIREVKVITLKSKLVSDFRKDFQFYKVREINNYHHAHDAYLNAVVGTALIKKYPKLESEFVYGDYKVYDVRKMIAKSEQEIGKATAKYFFYSNIMNFFKTEITLANGEIRKRPLIETNGETGEIVWDKGRDFATVRKVLSMPQVNIVKKTEVQTGGFSKESILPKRNSDKLIARKKDWDPKKYGGFDSPTVAYSVLVVAKVEKGKSKKLKSVKELLGITIMERSSFEKNPIDFLEAKGYKEVKKDLIIKLPKYSLFELENGRKRMLASAGELQKGNELALPSKYVNFLYLASHYEKLKGSPEDNEQKQLFVEQHKHYLDEIIEQISEFSKRVILADANLDKVLSAYNKHRDKPIREQAENIIHLFTLTNLGAPAAFKYFDTTIDRKRYTSTKEVLDATLIHQSITGLYETRIDLSQLGGDGGGGSEAAAKPAPGGMDPLQLLQPLEAEIKGTKLKAHWNSGATITCVPQAFLEEEVPIKNIWIKTIHGEKEQPVYYLTFKIQGRKVEAEVISSPYDYILVSPSDIPWLMKKPLQLTTLVPLQEYEERLLKQTMLTGSYKEKLQSLFLKYDALWQHWENQVGHRRIKPHHIATGTVNPRPQKQYPINPKAKASIQTVINDLLKQGVLIQQNSIMNTPVYPVPKPDGKWRMVLDYREVNKTIPLIAAQNQHSAGILSSIFRGKYKTTLDLSNGFWAHSITPESYWLTAFTWLGQQYCWTRLPQGFLNSPALFNADVVDLLKEVPNVQVYVDDIYISHDDPREHLEQLEKVFSLLLNAGYVVSLKKSEIAQHEVEFLGFNITKEGRGLTETFKQKLLNITPPRDLKQLQSILGLLNFARNFIPNFSELVKPLYNIIATAPGKYITWTTDNSQQLQNIISMLNSAENLEERNPEVRLIMKVNTSPSAGYIRFYNEFAKRPIMYLNYVYTKAEVKFTNTEKLLTTIHKGLIKALDLGMGQEILVYSPIVSMTKIQKTPLPERKALPIRWITWMSYLEDPRIQFHYDKTLPELQQVPTVTDDIIAKIKHPSEFSMVFYTDGSAIKHPNVNKSHNAGMGIAQVQFKPEFTVINTWSIPLGDHTAQLAEVAAVEFACKKALKIDGPVLIVTDSFYVAESVNKELPYWQSNGFFNNKKKPLKHVSKWKSIADCIQLKPDIIIIHEKGHQPTASTFHTEGNNLADKLATQGSYVVNAGKRTADGSEFEKRTADGSEFESPKKKAKVE

SEQ ID NO: 596 - protein, 2180 aa, synthetic construct
MPAAKRVKLDGGDKKYSIGLDIGTNSVGWAVITDEYKVPSKKFKVLGNTDRHSIKKNLIGALLFDSGETAEATRLKRTARRRYTRRKNRICYLQEIFSNEMAKVDDSFFHRLEESFLVEEDKKHERHPIFGNIVDEVAYHEKYPTIYHLRKKLVDSTDKADLRLIYLALAHMIKFRGHFLIEGDLNPDNSDVDKLFIQLVQTYNQLFEENPINASGVDAKAILSARLSKSRRLENLIAQLPGEKKNGLFGNLIALSLGLTPNFKSNFDLAEDAKLQLSKDTYDDDLDNLLAQIGDQYADLFLAAKNLSDAILLSDILRVNTEITKAPLSASMIKRYDEHHQDLTLLKALVRQQLPEKYKEIFFDQSKNGYAGYIDGGASQEEFYKFIKPILEKMDGTEELLVKLNREDLLRKQRTFDNGSIPHQIHLGELHAILRRQEDFYPFLKDNREKIEKILTFRIPYYVGPLARGNSRFAWMTRKSEETITPWNFEEVVDKGASAQSFIERMTNFDKNLPNEKVLPKHSLLYEYFTVYNELTKVKYVTEGMRKPAFLSGEQKKAIVDLLFKTNRKVTVKQLKEDYFKKIECFDSVEISGVEDRFNASLGTYHDLLKIIKDKDFLDNEENEDILEDIVLTLTLFEDREMIEERLKTYAHLFDDKVMKQLKRRRYTGWGRLSRKLINGIRDKQSGKTILDFLKSDGFANRNFMQLIHDDSLTFKEDIQKAQVSGQGDSLHEHIANLAGSPAIKKGILQTVKVVDELVKVMGRHKPENIVIEMARENQTTQKGQKNSRERMKRIEEGIKELGSQILKEHPVENTQLQNEKLYLYYLQNGRDMYVDQELDINRLSDYDVDHIVPQSFLKDDSIDNKVLTRSDKARGKSDNVPSEEVVKKMKNYWRQLLNAKLITQRKFDNLTKAERGGLSELDKAGFIKRQLVETRQITKHVAQILDSRMNTKYDENDKLIREVKVITLKSKLVSDFRKDFQFYKVREINNYHHAHDAYLNAVVGTALIKKYPKLESEFVYGDYKVYDVRKMIAKSEQEIGKATAKYFFYSNIMNFFKTEITLANGEIRKRPLIETNGETGEIVWDKGRDFATVRKVLSMPQVNIVKKTEVQTGGFSKESILPKRNSDKLIARKKDWDPKKYGGFDSPTVAYSVLVVAKVEKGKSKKLKSVKELLGITIMERSSFEKNPIDFLEAKGYKEVKKDLIIKLPKYSLFELENGRKRMLASAGELQKGNELALPSKYVNFLYLASHYEKLKGSPEDNEQKQLFVEQHKHYLDEIIEQISEFSKRVILADANLDKVLSAYNKHRDKPIREQAENIIHLFTLTNLGAPAAFKYFDTTIDRKRYTSTKEVLDATLIHQSITGLYETRIDLSQLGGDGGEAAAKGGGGSEAAAKGGMDPLQLLQPLEAEIKGTKLKAHWNSGATITCVPQAFLEEEVPIKNIWIKTIHGEKEQPVYYLTFKIQGRKVEAEVISSPYDYILVSPSDIPWLMKKPLQLTTLVPLQEYEERLLKQTMLTGSYKEKLQSLFLKYDALWQHWENQVGHRRIKPHHIATGTVNPRPQKQYPINPKAKASIQTVINDLLKQGVLIQQNSIMNTPVYPVPKPDGKWRMVLDYREVNKTIPLIAAQNQHSAGILSSIFRGKYKTTLDLSNGFWAHSITPESYWLTAFTWLGQQYCWTRLPQGFLNSPALFNADVVDLLKEVPNVQVYVDDIYISHDDPREHLEQLEKVFSLLLNAGYVVSLKKSEIAQHEVEFLGFNITKEGRGLTETFKQKLLNITPPRDLKQLQSILGLLNFARNFIPNFSELVKPLYNIIATAPGKYITWTTDNSQQLQNIISMLNSAENLEERNPEVRLIMKVNTSPSAGYIRFYNEFAKRPIMYLNYVYTKAEVKFTNTEKLLTTIHKGLIKALDLGMGQEILVYSPIVSMTKIQKTPLPERKALPIRWITWMSYLEDPRIQFHYDKTLPELQQVPTVTDDIIAKIKHPSEFSMVFYTDGSAIKHPNVNKSHNAGMGIAQVQFKPEFTVINTWSIPLGDHTAQLAEVAAVEFACKKALKIDGPVLIVTDSFYVAESVNKELPYWQSNGFFNNKKKPLKHVSKWKSIADCIQLKPDIIIIHEKGHQPTASTFHTEGNNLADKLATQGSYVVNAGKRTADGSEFEKRTADGSEFESPKKKAKVE

SEQ ID NO: 597 - protein, 2175 aa, synthetic construct
MPAAKRVKLDGGDKKYSIGLDIGTNSVGWAVITDEYKVPSKKFKVLGNTDRHSIKKNLIGALLFDSGETAEATRLKRTARRRYTRRKNRICYLQEIFSNEMAKVDDSFFHRLEESFLVEEDKKHERHPIFGNIVDEVAYHEKYPTIYHLRKKLVDSTDKADLRLIYLALAHMIKFRGHFLIEGDLNPDNSDVDKLFIQLVQTYNQLFEENPINASGVDAKAILSARLSKSRRLENLIAQLPGEKKNGLFGNLIALSLGLTPNFKSNFDLAEDAKLQLSKDTYDDDLDNLLAQIGDQYADLFLAAKNLSDAILLSDILRVNTEITKAPLSASMIKRYDEHHQDLTLLKALVRQQLPEKYKEIFFDQSKNGYAGYIDGGASQEEFYKFIKPILEKMDGTEELLVKLNREDLLRKQRTFDNGSIPHQIHLGELHAILRRQEDFYPFLKDNREKIEKILTFRIPYYVGPLARGNSRFAWMTRKSEETITPWNFEEVVDKGASAQSFIERMTNFDKNLPNEKVLPKHSLLYEYFTVYNELTKVKYVTEGMRKPAFLSGEQKKAIVDLLFKTNRKVTVKQLKEDYFKKIECFDSVEISGVEDRFNASLGTYHDLLKIIKDKDFLDNEENEDILEDIVLTLTLFEDREMIEERLKTYAHLFDDKVMKQLKRRRYTGWGRLSRKLINGIRDKQSGKTILDFLKSDGFANRNFMQLIHDDSLTFKEDIQKAQVSGQGDSLHEHIANLAGSPAIKKGILQTVKVVDELVKVMGRHKPENIVIEMARENQTTQKGQKNSRERMKRIEEGIKELGSQILKEHPVENTQLQNEKLYLYYLQNGRDMYVDQELDINRLSDYDVDHIVPQSFLKDDSIDNKVLTRSDKARGKSDNVPSEEVVKKMKNYWRQLLNAKLITQRKFDNLTKAERGGLSELDKAGFIKRQLVETRQITKHVAQILDSRMNTKYDENDKLIREVKVITLKSKLVSDFRKDFQFYKVREINNYHHAHDAYLNAVVGTALIKKYPKLESEFVYGDYKVYDVRKMIAKSEQEIGKATAKYFFYSNIMNFFKTEITLANGEIRKRPLIETNGETGEIVWDKGRDFATVRKVLSMPQVNIVKKTEVQTGGFSKESILPKRNSDKLIARKKDWDPKKYGGFDSPTVAYSVLVVAKVEKGKSKKLKSVKELLGITIMERSSFEKNPIDFLEAKGYKEVKKDLIIKLPKYSLFELENGRKRMLASAGELQKGNELALPSKYVNFLYLASHYEKLKGSPEDNEQKQLFVEQHKHYLDEIIEQISEFSKRVILADANLDKVLSAYNKHRDKPIREQAENIIHLFTLTNLGAPAAFKYFDTTIDRKRYTSTKEVLDATLIHQSITGLYETRIDLSQLGGDGGGGGGSGGGGSGGMDPLQLLQPLEAEIKGTKLKAHWNSGATITCVPQAFLEEEVPIKNIWIKTIHGEKEQPVYYLTFKIQGRKVEAEVISSPYDYILVSPSDIPWLMKKPLQLTTLVPLQEYEERLLKQTMLTGSYKEKLQSLFLKYDALWQHWENQVGHRRIKPHHIATGTVNPRPQKQYPINPKAKASIQTVINDLLKQGVLIQQNSIMNTPVYPVPKPDGKWRMVLDYREVNKTIPLIAAQNQHSAGILSSIFRGKYKTTLDLSNGFWAHSITPESYWLTAFTWLGQQYCWTRLPQGFLNSPALFNADVVDLLKEVPNVQVYVDDIYISHDDPREHLEQLEKVFSLLLNAGYVVSLKKSEIAQHEVEFLGFNITKEGRGLTETFKQKLLNITPPRDLKQLQSILGLLNFARNFIPNFSELVKPLYNIIATAPGKYITWTTDNSQQLQNIISMLNSAENLEERNPEVRLIMKVNTSPSAGYIRFYNEFAKRPIMYLNYVYTKAEVKFTNTEKLLTTIHKGLIKALDLGMGQEILVYSPIVSMTKIQKTPLPERKALPIRWITWMSYLEDPRIQFHYDKTLPELQQVPTVTDDIIAKIKHPSEFSMVFYTDGSAIKHPNVNKSHNAGMGIAQVQFKPEFTVINTWSIPLGDHTAQLAEVAAVEFACKKALKIDGPVLIVTDSFYVAESVNKELPYWQSNGFFNNKKKPLKHVSKWKSIADCIQLKPDIIIIHEKGHQPTASTFHTEGNNLADKLATQGSYVVNAGKRTADGSEFEKRTADGSEFESPKKKAKVE

SEQ ID NO: 598 - protein, 2175 aa, synthetic construct
MPAAKRVKLDGGDKKYSIGLDIGTNSVGWAVITDEYKVPSKKFKVLGNTDRHSIKKNLIGALLFDSGETAEATRLKRTARRRYTRRKNRICYLQEIFSNEMAKVDDSFFHRLEESFLVEEDKKHERHPIFGNIVDEVAYHEKYPTIYHLRKKLVDSTDKADLRLIYLALAHMIKFRGHFLIEGDLNPDNSDVDKLFIQLVQTYNQLFEENPINASGVDAKAILSARLSKSRRLENLIAQLPGEKKNGLFGNLIALSLGLTPNFKSNFDLAEDAKLQLSKDTYDDDLDNLLAQIGDQYADLFLAAKNLSDAILLSDILRVNTEITKAPLSASMIKRYDEHHQDLTLLKALVRQQLPEKYKEIFFDQSKNGYAGYIDGGASQEEFYKFIKPILEKMDGTEELLVKLNREDLLRKQRTFDNGSIPHQIHLGELHAILRRQEDFYPFLKDNREKIEKILTFRIPYYVGPLARGNSRFAWMTRKSEETITPWNFEEVVDKGASAQSFIERMTNFDKNLPNEKVLPKHSLLYEYFTVYNELTKVKYVTEGMRKPAFLSGEQKKAIVDLLFKTNRKVTVKQLKEDYFKKIECFDSVEISGVEDRFNASLGTYHDLLKIIKDKDFLDNEENEDILEDIVLTLTLFEDREMIEERLKTYAHLFDDKVMKQLKRRRYTGWGRLSRKLINGIRDKQSGKTILDFLKSDGFANRNFMQLIHDDSLTFKEDIQKAQVSGQGDSLHEHIANLAGSPAIKKGILQTVKVVDELVKVMGRHKPENIVIEMARENQTTQKGQKNSRERMKRIEEGIKELGSQILKEHPVENTQLQNEKLYLYYLQNGRDMYVDQELDINRLSDYDVDHIVPQSFLKDDSIDNKVLTRSDKARGKSDNVPSEEVVKKMKNYWRQLLNAKLITQRKFDNLTKAERGGLSELDKAGFIKRQLVETRQITKHVAQILDSRMNTKYDENDKLIREVKVITLKSKLVSDFRKDFQFYKVREINNYHHAHDAYLNAVVGTALIKKYPKLESEFVYGDYKVYDVRKMIAKSEQEIGKATAKYFFYSNIMNFFKTEITLANGEIRKRPLIETNGETGEIVWDKGRDFATVRKVLSMPQVNIVKKTEVQTGGFSKESILPKRNSDKLIARKKDWDPKKYGGFDSPTVAYSVLVVAKVEKGKSKKLKSVKELLGITIMERSSFEKNPIDFLEAKGYKEVKKDLIIKLPKYSLFELENGRKRMLASAGELQKGNELALPSKYVNFLYLASHYEKLKGSPEDNEQKQLFVEQHKHYLDEIIEQISEFSKRVILADANLDKVLSAYNKHRDKPIREQAENIIHLFTLTNLGAPAAFKYFDTTIDRKRYTSTKEVLDATLIHQSITGLYETRIDLSQLGGDGGEAAAKEAAAKGGMDPLQLLQPLEAEIKGTKLKAHWNSGATITCVPQAFLEEEVPIKNIWIKTIHGEKEQPVYYLTFKIQGRKVEAEVISSPYDYILVSPSDIPWLMKKPLQLTTLVPLQEYEERLLKQTMLTGSYKEKLQSLFLKYDALWQHWENQVGHRRIKPHHIATGTVNPRPQKQYPINPKAKASIQTVINDLLKQGVLIQQNSIMNTPVYPVPKPDGKWRMVLDYREVNKTIPLIAAQNQHSAGILSSIFRGKYKTTLDLSNGFWAHSITPESYWLTAFTWLGQQYCWTRLPQGFLNSPALFNADVVDLLKEVPNVQVYVDDIYISHDDPREHLEQLEKVFSLLLNAGYVVSLKKSEIAQHEVEFLGFNITKEGRGLTETFKQKLLNITPPRDLKQLQSILGLLNFARNFIPNFSELVKPLYNIIATAPGKYITWTTDNSQQLQNIISMLNSAENLEERNPEVRLIMKVNTSPSAGYIRFYNEFAKRPIMYLNYVYTKAEVKFTNTEKLLTTIHKGLIKALDLGMGQEILVYSPIVSMTKIQKTPLPERKALPIRWITWMSYLEDPRIQFHYDKTLPELQQVPTVTDDIIAKIKHPSEFSMVFYTDGSAIKHPNVNKSHNAGMGIAQVQFKPEFTVINTWSIPLGDHTAQLAEVAAVEFACKKALKIDGPVLIVTDSFYVAESVNKELPYWQSNGFFNNKKKPLKHVSKWKSIADCIQLKPDIIIIHEKGHQPTASTFHTEGNNLADKLATQGSYVVNAGKRTADGSEFEKRTADGSEFESPKKKAKVE

SEQ ID NO: 599 - protein, 2176 aa, synthetic construct
MPAAKRVKLDGGDKKYSIGLDIGTNSVGWAVITDEYKVPSKKFKVLGNTDRHSIKKNLIGALLFDSGETAEATRLKRTARRRYTRRKNRICYLQEIFSNEMAKVDDSFFHRLEESFLVEEDKKHERHPIFGNIVDEVAYHEKYPTIYHLRKKLVDSTDKADLRLIYLALAHMIKFRGHFLIEGDLNPDNSDVDKLFIQLVQTYNQLFEENPINASGVDAKAILSARLSKSRRLENLIAQLPGEKKNGLFGNLIALSLGLTPNFKSNFDLAEDAKLQLSKDTYDDDLDNLLAQIGDQYADLFLAAKNLSDAILLSDILRVNTEITKAPLSASMIKRYDEHHQDLTLLKALVRQQLPEKYKEIFFDQSKNGYAGYIDGGASQEEFYKFIKPILEKMDGTEELLVKLNREDLLRKQRTFDNGSIPHQIHLGELHAILRRQEDFYPFLKDNREKIEKILTFRIPYYVGPLARGNSRFAWMTRKSEETITPWNFEEVVDKGASAQSFIERMTNFDKNLPNEKVLPKHSLLYEYFTVYNELTKVKYVTEGMRKPAFLSGEQKKAIVDLLFKTNRKVTVKQLKEDYFKKIECFDSVEISGVEDRFNASLGTYHDLLKIIKDKDFLDNEENEDILEDIVLTLTLFEDREMIEERLKTYAHLFDDKVMKQLKRRRYTGWGRLSRKLINGIRDKQSGKTILDFLKSDGFANRNFMQLIHDDSLTFKEDIQKAQVSGQGDSLHEHIANLAGSPAIKKGILQTVKVVDELVKVMGRHKPENIVIEMARENQTTQKGQKNSRERMKRIEEGIKELGSQILKEHPVENTQLQNEKLYLYYLQNGRDMYVDQELDINRLSDYDVDHIVPQSFLKDDSIDNKVLTRSDKARGKSDNVPSEEVVKKMKNYWRQLLNAKLITQRKFDNLTKAERGGLSELDKAGFIKRQLVETRQITKHVAQILDSRMNTKYDENDKLIREVKVITLKSKLVSDFRKDFQFYKVREINNYHHAHDAYLNAVVGTALIKKYPKLESEFVYGDYKVYDVRKMIAKSEQEIGKATAKYFFYSNIMNFFKTEITLANGEIRKRPLIETNGETGEIVWDKGRDFATVRKVLSMPQVNIVKKTEVQTGGFSKESILPKRNSDKLIARKKDWDPKKYGGFDSPTVAYSVLVVAKVEKGKSKKLKSVKELLGITIMERSSFEKNPIDFLEAKGYKEVKKDLIIKLPKYSLFELENGRKRMLASAGELQKGNELALPSKYVNFLYLASHYEKLKGSPEDNEQKQLFVEQHKHYLDEIIEQISEFSKRVILADANLDKVLSAYNKHRDKPIREQAENIIHLFTLTNLGAPAAFKYFDTTIDRKRYTSTKEVLDATLIHQSITGLYETRIDLSQLGGDGGGSSEAAAKGGGGGMDPLQLLQPLEAEIKGTKLKAHWNSGATITCVPQAFLEEEVPIKNIWIKTIHGEKEQPVYYLTFKIQGRKVEAEVISSPYDYILVSPSDIPWLMKKPLQLTTLVPLQEYEERLLKQTMLTGSYKEKLQSLFLKYDALWQHWENQVGHRRIKPHHIATGTVNPRPQKQYPINPKAKASIQTVINDLLKQGVLIQQNSIMNTPVYPVPKPDGKWRMVLDYREVNKTIPLIAAQNQHSAGILSSIFRGKYKTTLDLSNGFWAHSITPESYWLTAFTWLGQQYCWTRLPQGFLNSPALFNADVVDLLKEVPNVQVYVDDIYISHDDPREHLEQLEKVFSLLLNAGYVVSLKKSEIAQHEVEFLGFNITKEGRGLTETFKQKLLNITPPRDLKQLQSILGLLNFARNFIPNFSELVKPLYNIIATAPGKYITWTTDNSQQLQNIISMLNSAENLEERNPEVRLIMKVNTSPSAGYIRFYNEFAKRPIMYLNYVYTKAEVKFTNTEKLLTTIHKGLIKALDLGMGQEILVYSPIVSMTKIQKTPLPERKALPIRWITWMSYLEDPRIQFHYDKTLPELQQVPTVTDDIIAKIKHPSEFSMVFYTDGSAIKHPNVNKSHNAGMGIAQVQFKPEFTVINTWSIPLGDHTAQLAEVAAVEFACKKALKIDGPVLIVTDSFYVAESVNKELPYWQSNGFFNNKKKPLKHVSKWKSIADCIQLKPDIIIIHEKGHQPTASTFHTEGNNLADKLATQGSYVVNAGKRTADGSEFEKRTADGSEFESPKKKAKVE

SEQ ID NO: 600 - protein, 2174 aa, synthetic construct
MPAAKRVKLDGGDKKYSIGLDIGTNSVGWAVITDEYKVPSKKFKVLGNTDRHSIKKNLIGALLFDSGETAEATRLKRTARRRYTRRKNRICYLQEIFSNEMAKVDDSFFHRLEESFLVEEDKKHERHPIFGNIVDEVAYHEKYPTIYHLRKKLVDSTDKADLRLIYLALAHMIKFRGHFLIEGDLNPDNSDVDKLFIQLVQTYNQLFEENPINASGVDAKAILSARLSKSRRLENLIAQLPGEKKNGLFGNLIALSLGLTPNFKSNFDLAEDAKLQLSKDTYDDDLDNLLAQIGDQYADLFLAAKNLSDAILLSDILRVNTEITKAPLSASMIKRYDEHHQDLTLLKALVRQQLPEKYKEIFFDQSKNGYAGYIDGGASQEEFYKFIKPILEKMDGTEELLVKLNREDLLRKQRTFDNGSIPHQIHLGELHAILRRQEDFYPFLKDNREKIEKILTFRIPYYVGPLARGNSRFAWMTRKSEETITPWNFEEVVDKGASAQSFIERMTNFDKNLPNEKVLPKHSLLYEYFTVYNELTKVKYVTEGMRKPAFLSGEQKKAIVDLLFKTNRKVTVKQLKEDYFKKIECFDSVEISGVEDRFNASLGTYHDLLKIIKDKDFLDNEENEDILEDIVLTLTLFEDREMIEERLKTYAHLFDDKVMKQLKRRRYTGWGRLSRKLINGIRDKQSGKTILDFLKSDGFANRNFMQLIHDDSLTFKEDIQKAQVSGQGDSLHEHIANLAGSPAIKKGILQTVKVVDELVKVMGRHKPENIVIEMARENQTTQKGQKNSRERMKRIEEGIKELGSQILKEHPVENTQLQNEKLYLYYLQNGRDMYVDQELDINRLSDYDVDHIVPQSFLKDDSIDNKVLTRSDKARGKSDNVPSEEVVKKMKNYWRQLLNAKLITQRKFDNLTKAERGGLSELDKAGFIKRQLVETRQITKHVAQILDSRMNTKYDENDKLIREVKVITLKSKLVSDFRKDFQFYKVREINNYHHAHDAYLNAVVGTALIKKYPKLESEFVYGDYKVYDVRKMIAKSEQEIGKATAKYFFYSNIMNFFKTEITLANGEIRKRPLIETNGETGEIVWDKGRDFATVRKVLSMPQVNIVKKTEVQTGGFSKESILPKRNSDKLIARKKDWDPKKYGGFDSPTVAYSVLVVAKVEKGKSKKLKSVKELLGITIMERSSFEKNPIDFLEAKGYKEVKKDLIIKLPKYSLFELENGRKRMLASAGELQKGNELALPSKYVNFLYLASHYEKLKGSPEDNEQKQLFVEQHKHYLDEIIEQISEFSKRVILADANLDKVLSAYNKHRDKPIREQAENIIHLFTLTNLGAPAAFKYFDTTIDRKRYTSTKEVLDATLIHQSITGLYETRIDLSQLGGDGGPAPAPAPAPGGMDPLQLLQPLEAEIKGTKLKAHWNSGATITCVPQAFLEEEVPIKNIWIKTIHGEKEQPVYYLTFKIQGRKVEAEVISSPYDYILVSPSDIPWLMKKPLQLTTLVPLQEYEERLLKQTMLTGSYKEKLQSLFLKYDALWQHWENQVGHRRIKPHHIATGTVNPRPQKQYPINPKAKASIQTVINDLLKQGVLIQQNSIMNTPVYPVPKPDGKWRMVLDYREVNKTIPLIAAQNQHSAGILSSIFRGKYKTTLDLSNGFWAHSITPESYWLTAFTWLGQQYCWTRLPQGFLNSPALFNADVVDLLKEVPNVQVYVDDIYISHDDPREHLEQLEKVFSLLLNAGYVVSLKKSEIAQHEVEFLGFNITKEGRGLTETFKQKLLNITPPRDLKQLQSILGLLNFARNFIPNFSELVKPLYNIIATAPGKYITWTTDNSQQLQNIISMLNSAENLEERNPEVRLIMKVNTSPSAGYIRFYNEFAKRPIMYLNYVYTKAEVKFTNTEKLLTTIHKGLIKALDLGMGQEILVYSPIVSMTKIQKTPLPERKALPIRWITWMSYLEDPRIQFHYDKTLPELQQVPTVTDDIIAKIKHPSEFSMVFYTDGSAIKHPNVNKSHNAGMGIAQVQFKPEFTVINTWSIPLGDHTAQLAEVAAVEFACKKALKIDGPVLIVTDSFYVAESVNKELPYWQSNGFFNNKKKPLKHVSKWKSIADCIQLKPDIIIIHEKGHQPTASTFHTEGNNLADKLATQGSYVVNAGKRTADGSEFEKRTADGSEFESPKKKAKVE

SEQ ID NO: 601 - protein, 2180 aa, synthetic construct
MPAAKRVKLDGGDKKYSIGLDIGTNSVGWAVITDEYKVPSKKFKVLGNTDRHSIKKNLIGALLFDSGETAEATRLKRTARRRYTRRKNRICYLQEIFSNEMAKVDDSFFHRLEESFLVEEDKKHERHPIFGNIVDEVAYHEKYPTIYHLRKKLVDSTDKADLRLIYLALAHMIKFRGHFLIEGDLNPDNSDVDKLFIQLVQTYNQLFEENPINASGVDAKAILSARLSKSRRLENLIAQLPGEKKNGLFGNLIALSLGLTPNFKSNFDLAEDAKLQLSKDTYDDDLDNLLAQIGDQYADLFLAAKNLSDAILLSDILRVNTEITKAPLSASMIKRYDEHHQDLTLLKALVRQQLPEKYKEIFFDQSKNGYAGYIDGGASQEEFYKFIKPILEKMDGTEELLVKLNREDLLRKQRTFDNGSIPHQIHLGELHAILRRQEDFYPFLKDNREKIEKILTFRIPYYVGPLARGNSRFAWMTRKSEETITPWNFEEVVDKGASAQSFIERMTNFDKNLPNEKVLPKHSLLYEYFTVYNELTKVKYVTEGMRKPAFLSGEQKKAIVDLLFKTNRKVTVKQLKEDYFKKIECFDSVEISGVEDRFNASLGTYHDLLKIIKDKDFLDNEENEDILEDIVLTLTLFEDREMIEERLKTYAHLFDDKVMKQLKRRRYTGWGRLSRKLINGIRDKQSGKTILDFLKSDGFANRNFMQLIHDDSLTFKEDIQKAQVSGQGDSLHEHIANLAGSPAIKKGILQTVKVVDELVKVMGRHKPENIVIEMARENQTTQKGQKNSRERMKRIEEGIKELGSQILKEHPVENTQLQNEKLYLYYLQNGRDMYVDQELDINRLSDYDVDHIVPQSFLKDDSIDNKVLTRSDKARGKSDNVPSEEVVKKMKNYWRQLLNAKLITQRKFDNLTKAERGGLSELDKAGFIKRQLVETRQITKHVAQILDSRMNTKYDENDKLIREVKVITLKSKLVSDFRKDFQFYKVREINNYHHAHDAYLNAVVGTALIKKYPKLESEFVYGDYKVYDVRKMIAKSEQEIGKATAKYFFYSNIMNFFKTEITLANGEIRKRPLIETNGETGEIVWDKGRDFATVRKVLSMPQVNIVKKTEVQTGGFSKESILPKRNSDKLIARKKDWDPKKYGGFDSPTVAYSVLVVAKVEKGKSKKLKSVKELLGITIMERSSFEKNPIDFLEAKGYKEVKKDLIIKLPKYSLFELENGRKRMLASAGELQKGNELALPSKYVNFLYLASHYEKLKGSPEDNEQKQLFVEQHKHYLDEIIEQISEFSKRVILADANLDKVLSAYNKHRDKPIREQAENIIHLFTLTNLGAPAAFKYFDTTIDRKRYTSTKEVLDATLIHQSITGLYETRIDLSQLGGDGGGGGGSGGGGSGGGGSGGMDPLQLLQPLEAEIKGTKLKAHWNSGATITCVPQAFLEEEVPIKNIWIKTIHGEKEQPVYYLTFKIQGRKVEAEVISSPYDYILVSPSDIPWLMKKPLQLTTLVPLQEYEERLLKQTMLTGSYKEKLQSLFLKYDALWQHWENQVGHRRIKPHHIATGTVNPRPQKQYPINPKAKASIQTVINDLLKQGVLIQQNSIMNTPVYPVPKPDGKWRMVLDYREVNKTIPLIAAQNQHSAGILSSIFRGKYKTTLDLSNGFWAHSITPESYWLTAFTWLGQQYCWTRLPQGFLNSPALFNADVVDLLKEVPNVQVYVDDIYISHDDPREHLEQLEKVFSLLLNAGYVVSLKKSEIAQHEVEFLGFNITKEGRGLTETFKQKLLNITPPRDLKQLQSILGLLNFARNFIPNFSELVKPLYNIIATAPGKYITWTTDNSQQLQNIISMLNSAENLEERNPEVRLIMKVNTSPSAGYIRFYNEFAKRPIMYLNYVYTKAEVKFTNTEKLLTTIHKGLIKALDLGMGQEILVYSPIVSMTKIQKTPLPERKALPIRWITWMSYLEDPRIQFHYDKTLPELQQVPTVTDDIIAKIKHPSEFSMVFYTDGSAIKHPNVNKSHNAGMGIAQVQFKPEFTVINTWSIPLGDHTAQLAEVAAVEFACKKALKIDGPVLIVTDSFYVAESVNKELPYWQSNGFFNNKKKPLKHVSKWKSIADCIQLKPDIIIIHEKGHQPTASTFHTEGNNLADKLATQGSYVVNAGKRTADGSEFEKRTADGSEFESPKKKAKVE

SEQ ID NO: 602 - protein, 2176 aa, synthetic construct
MPAAKRVKLDGGDKKYSIGLDIGTNSVGWAVITDEYKVPSKKFKVLGNTDRHSIKKNLIGALLFDSGETAEATRLKRTARRRYTRRKNRICYLQEIFSNEMAKVDDSFFHRLEESFLVEEDKKHERHPIFGNIVDEVAYHEKYPTIYHLRKKLVDSTDKADLRLIYLALAHMIKFRGHFLIEGDLNPDNSDVDKLFIQLVQTYNQLFEENPINASGVDAKAILSARLSKSRRLENLIAQLPGEKKNGLFGNLIALSLGLTPNFKSNFDLAEDAKLQLSKDTYDDDLDNLLAQIGDQYADLFLAAKNLSDAILLSDILRVNTEITKAPLSASMIKRYDEHHQDLTLLKALVRQQLPEKYKEIFFDQSKNGYAGYIDGGASQEEFYKFIKPILEKMDGTEELLVKLNREDLLRKQRTFDNGSIPHQIHLGELHAILRRQEDFYPFLKDNREKIEKILTFRIPYYVGPLARGNSRFAWMTRKSEETITPWNFEEVVDKGASAQSFIERMTNFDKNLPNEKVLPKHSLLYEYFTVYNELTKVKYVTEGMRKPAFLSGEQKKAIVDLLFKTNRKVTVKQLKEDYFKKIECFDSVEISGVEDRFNASLGTYHDLLKIIKDKDFLDNEENEDILEDIVLTLTLFEDREMIEERLKTYAHLFDDKVMKQLKRRRYTGWGRLSRKLINGIRDKQSGKTILDFLKSDGFANRNFMQLIHDDSLTFKEDIQKAQVSGQGDSLHEHIANLAGSPAIKKGILQTVKVVDELVKVMGRHKPENIVIEMARENQTTQKGQKNSRERMKRIEEGIKELGSQILKEHPVENTQLQNEKLYLYYLQNGRDMYVDQELDINRLSDYDVDHIVPQSFLKDDSIDNKVLTRSDKARGKSDNVPSEEVVKKMKNYWRQLLNAKLITQRKFDNLTKAERGGLSELDKAGFIKRQLVETRQITKHVAQILDSRMNTKYDENDKLIREVKVITLKSKLVSDFRKDFQFYKVREINNYHHAHDAYLNAVVGTALIKKYPKLESEFVYGDYKVYDVRKMIAKSEQEIGKATAKYFFYSNIMNFFKTEITLANGEIRKRPLIETNGETGEIVWDKGRDFATVRKVLSMPQVNIVKKTEVQTGGFSKESILPKRNSDKLIARKKDWDPKKYGGFDSPTVAYSVLVVAKVEKGKSKKLKSVKELLGITIMERSSFEKNPIDFLEAKGYKEVKKDLIIKLPKYSLFELENGRKRMLASAGELQKGNELALPSKYVNFLYLASHYEKLKGSPEDNEQKQLFVEQHKHYLDEIIEQISEFSKRVILADANLDKVLSAYNKHRDKPIREQAENIIHLFTLTNLGAPAAFKYFDTTIDRKRYTSTKEVLDATLIHQSITGLYETRIDLSQLGGDGGPAPEAAAKGSSGGMDPLQLLQPLEAEIKGTKLKAHWNSGATITCVPQAFLEEEVPIKNIWIKTIHGEKEQPVYYLTFKIQGRKVEAEVISSPYDYILVSPSDIPWLMKKPLQLTTLVPLQEYEERLLKQTMLTGSYKEKLQSLFLKYDALWQHWENQVGHRRIKPHHIATGTVNPRPQKQYPINPKAKASIQTVINDLLKQGVLIQQNSIMNTPVYPVPKPDGKWRMVLDYREVNKTIPLIAAQNQHSAGILSSIFRGKYKTTLDLSNGFWAHSITPESYWLTAFTWLGQQYCWTRLPQGFLNSPALFNADVVDLLKEVPNVQVYVDDIYISHDDPREHLEQLEKVFSLLLNAGYVVSLKKSEIAQHEVEFLGFNITKEGRGLTETFKQKLLNITPPRDLKQLQSILGLLNFARNFIPNFSELVKPLYNIIATAPGKYITWTTDNSQQLQNIISMLNSAENLEERNPEVRLIMKVNTSPSAGYIRFYNEFAKRPIMYLNYVYTKAEVKFTNTEKLLTTIHKGLIKALDLGMGQEILVYSPIVSMTKIQKTPLPERKALPIRWITWMSYLEDPRIQFHYDKTLPELQQVPTVTDDIIAKIKHPSEFSMVFYTDGSAIKHPNVNKSHNAGMGIAQVQFKPEFTVINTWSIPLGDHTAQLAEVAAVEFACKKALKIDGPVLIVTDSFYVAESVNKELPYWQSNGFFNNKKKPLKHVSKWKSIADCIQLKPDIIIIHEKGHQPTASTFHTEGNNLADKLATQGSYVVNAGKRTADGSEFEKRTADGSEFESPKKKAKVE

SEQ ID NO: 603 - protein, 2173 aa, synthetic construct
MPAAKRVKLDGGDKKYSIGLDIGTNSVGWAVITDEYKVPSKKFKVLGNTDRHSIKKNLIGALLFDSGETAEATRLKRTARRRYTRRKNRICYLQEIFSNEMAKVDDSFFHRLEESFLVEEDKKHERHPIFGNIVDEVAYHEKYPTIYHLRKKLVDSTDKADLRLIYLALAHMIKFRGHFLIEGDLNPDNSDVDKLFIQLVQTYNQLFEENPINASGVDAKAILSARLSKSRRLENLIAQLPGEKKNGLFGNLIALSLGLTPNFKSNFDLAEDAKLQLSKDTYDDDLDNLLAQIGDQYADLFLAAKNLSDAILLSDILRVNTEITKAPLSASMIKRYDEHHQDLTLLKALVRQQLPEKYKEIFFDQSKNGYAGYIDGGASQEEFYKFIKPILEKMDGTEELLVKLNREDLLRKQRTFDNGSIPHQIHLGELHAILRRQEDFYPFLKDNREKIEKILTFRIPYYVGPLARGNSRFAWMTRKSEETITPWNFEEVVDKGASAQSFIERMTNFDKNLPNEKVLPKHSLLYEYFTVYNELTKVKYVTEGMRKPAFLSGEQKKAIVDLLFKTNRKVTVKQLKEDYFKKIECFDSVEISGVEDRFNASLGTYHDLLKIIKDKDFLDNEENEDILEDIVLTLTLFEDREMIEERLKTYAHLFDDKVMKQLKRRRYTGWGRLSRKLINGIRDKQSGKTILDFLKSDGFANRNFMQLIHDDSLTFKEDIQKAQVSGQGDSLHEHIANLAGSPAIKKGILQTVKVVDELVKVMGRHKPENIVIEMARENQTTQKGQKNSRERMKRIEEGIKELGSQILKEHPVENTQLQNEKLYLYYLQNGRDMYVDQELDINRLSDYDVDHIVPQSFLKDDSIDNKVLTRSDKARGKSDNVPSEEVVKKMKNYWRQLLNAKLITQRKFDNLTKAERGGLSELDKAGFIKRQLVETRQITKHVAQILDSRMNTKYDENDKLIREVKVITLKSKLVSDFRKDFQFYKVREINNYHHAHDAYLNAVVGTALIKKYPKLESEFVYGDYKVYDVRKMIAKSEQEIGKATAKYFFYSNIMNFFKTEITLANGEIRKRPLIETNGETGEIVWDKGRDFATVRKVLSMPQVNIVKKTEVQTGGFSKESILPKRNSDKLIARKKDWDPKKYGGFDSPTVAYSVLVVAKVEKGKSKKLKSVKELLGITIMERSSFEKNPIDFLEAKGYKEVKKDLIIKLPKYSLFELENGRKRMLASAGELQKGNELALPSKYVNFLYLASHYEKLKGSPEDNEQKQLFVEQHKHYLDEIIEQISEFSKRVILADANLDKVLSAYNKHRDKPIREQAENIIHLFTLTNLGAPAAFKYFDTTIDRKRYTSTKEVLDATLIHQSITGLYETRIDLSQLGGDGGGSSEAAAKGGMDPLQLLQPLEAEIKGTKLKAHWNSGATITCVPQAFLEEEVPIKNIWIKTIHGEKEQPVYYLTFKIQGRKVEAEVISSPYDYILVSPSDIPWLMKKPLQLTTLVPLQEYEERLLKQTMLTGSYKEKLQSLFLKYDALWQHWENQVGHRRIKPHHIATGTVNPRPQKQYPINPKAKASIQTVINDLLKQGVLIQQNSIMNTPVYPVPKPDGKWRMVLDYREVNKTIPLIAAQNQHSAGILSSIFRGKYKTTLDLSNGFWAHSITPESYWLTAFTWLGQQYCWTRLPQGFLNSPALFNADVVDLLKEVPNVQVYVDDIYISHDDPREHLEQLEKVFSLLLNAGYVVSLKKSEIAQHEVEFLGFNITKEGRGLTETFKQKLLNITPPRDLKQLQSILGLLNFARNFIPNFSELVKPLYNIIATAPGKYITWTTDNSQQLQNIISMLNSAENLEERNPEVRLIMKVNTSPSAGYIRFYNEFAKRPIMYLNYVYTKAEVKFTNTEKLLTTIHKGLIKALDLGMGQEILVYSPIVSMTKIQKTPLPERKALPIRWITWMSYLEDPRIQFHYDKTLPELQQVPTVTDDIIAKIKHPSEFSMVFYTDGSAIKHPNVNKSHNAGMGIAQVQFKPEFTVINTWSIPLGDHTAQLAEVAAVEFACKKALKIDGPVLIVTDSFYVAESVNKELPYWQSNGFFNNKKKPLKHVSKWKSIADCIQLKPDIIIIHEKGHQPTASTFHTEGNNLADKLATQGSYVVNAGKRTADGSEFEKRTADGSEFESPKKKAKVE

SEQ ID NO: 604 - protein, 2183 aa, synthetic construct
MPAAKRVKLDGGDKKYSIGLDIGTNSVGWAVITDEYKVPSKKFKVLGNTDRHSIKKNLIGALLFDSGETAEATRLKRTARRRYTRRKNRICYLQEIFSNEMAKVDDSFFHRLEESFLVEEDKKHERHPIFGNIVDEVAYHEKYPTIYHLRKKLVDSTDKADLRLIYLALAHMIKFRGHFLIEGDLNPDNSDVDKLFIQLVQTYNQLFEENPINASGVDAKAILSARLSKSRRLENLIAQLPGEKKNGLFGNLIALSLGLTPNFKSNFDLAEDAKLQLSKDTYDDDLDNLLAQIGDQYADLFLAAKNLSDAILLSDILRVNTEITKAPLSASMIKRYDEHHQDLTLLKALVRQQLPEKYKEIFFDQSKNGYAGYIDGGASQEEFYKFIKPILEKMDGTEELLVKLNREDLLRKQRTFDNGSIPHQIHLGELHAILRRQEDFYPFLKDNREKIEKILTFRIPYYVGPLARGNSRFAWMTRKSEETITPWNFEEVVDKGASAQSFIERMTNFDKNLPNEKVLPKHSLLYEYFTVYNELTKVKYVTEGMRKPAFLSGEQKKAIVDLLFKTNRKVTVKQLKEDYFKKIECFDSVEISGVEDRFNASLGTYHDLLKIIKDKDFLDNEENEDILEDIVLTLTLFEDREMIEERLKTYAHLFDDKVMKQLKRRRYTGWGRLSRKLINGIRDKQSGKTILDFLKSDGFANRNFMQLIHDDSLTFKEDIQKAQVSGQGDSLHEHIANLAGSPAIKKGILQTVKVVDELVKVMGRHKPENIVIEMARENQTTQKGQKNSRERMKRIEEGIKELGSQILKEHPVENTQLQNEKLYLYYLQNGRDMYVDQELDINRLSDYDVDHIVPQSFLKDDSIDNKVLTRSDKARGKSDNVPSEEVVKKMKNYWRQLLNAKLITQRKFDNLTKAERGGLSELDKAGFIKRQLVETRQITKHVAQILDSRMNTKYDENDKLIREVKVITLKSKLVSDFRKDFQFYKVREINNYHHAHDAYLNAVVGTALIKKYPKLESEFVYGDYKVYDVRKMIAKSEQEIGKATAKYFFYSNIMNFFKTEITLANGEIRKRPLIETNGETGEIVWDKGRDFATVRKVLSMPQVNIVKKTEVQTGGFSKESILPKRNSDKLIARKKDWDPKKYGGFDSPTVAYSVLVVAKVEKGKSKKLKSVKELLGITIMERSSFEKNPIDFLEAKGYKEVKKDLIIKLPKYSLFELENGRKRMLASAGELQKGNELALPSKYVNFLYLASHYEKLKGSPEDNEQKQLFVEQHKHYLDEIIEQISEFSKRVILADANLDKVLSAYNKHRDKPIREQAENIIHLFTLTNLGAPAAFKYFDTTIDRKRYTSTKEVLDATLIHQSITGLYETRIDLSQLGGDGGGGSGGSGGSGGSGGSGGSGGMDPLQLLQPLEAEIKGTKLKAHWNSGATITCVPQAFLEEEVPIKNIWIKTIHGEKEQPVYYLTFKIQGRKVEAEVISSPYDYILVSPSDIPWLMKKPLQLTTLVPLQEYEERLLKQTMLTGSYKEKLQSLFLKYDALWQHWENQVGHRRIKPHHIATGTVNPRPQKQYPINPKAKASIQTVINDLLKQGVLIQQNSIMNTPVYPVPKPDGKWRMVLDYREVNKTIPLIAAQNQHSAGILSSIFRGKYKTTLDLSNGFWAHSITPESYWLTAFTWLGQQYCWTRLPQGFLNSPALFNADVVDLLKEVPNVQVYVDDIYISHDDPREHLEQLEKVFSLLLNAGYVVSLKKSEIAQHEVEFLGFNITKEGRGLTETFKQKLLNITPPRDLKQLQSILGLLNFARNFIPNFSELVKPLYNIIATAPGKYITWTTDNSQQLQNIISMLNSAENLEERNPEVRLIMKVNTSPSAGYIRFYNEFAKRPIMYLNYVYTKAEVKFTNTEKLLTTIHKGLIKALDLGMGQEILVYSPIVSMTKIQKTPLPERKALPIRWITWMSYLEDPRIQFHYDKTLPELQQVPTVTDDIIAKIKHPSEFSMVFYTDGSAIKHPNVNKSHNAGMGIAQVQFKPEFTVINTWSIPLGDHTAQLAEVAAVEFACKKALKIDGPVLIVTDSFYVAESVNKELPYWQSNGFFNNKKKPLKHVSKWKSIADCIQLKPDIIIIHEKGHQPTASTFHTEGNNLADKLATQGSYVVNAGKRTADGSEFEKRTADGSEFESPKKKAKVE

SEQ ID NO: 605 - protein, 2171 aa, synthetic construct
MPAAKRVKLDGGDKKYSIGLDIGTNSVGWAVITDEYKVPSKKFKVLGNTDRHSIKKNLIGALLFDSGETAEATRLKRTARRRYTRRKNRICYLQEIFSNEMAKVDDSFFHRLEESFLVEEDKKHERHPIFGNIVDEVAYHEKYPTIYHLRKKLVDSTDKADLRLIYLALAHMIKFRGHFLIEGDLNPDNSDVDKLFIQLVQTYNQLFEENPINASGVDAKAILSARLSKSRRLENLIAQLPGEKKNGLFGNLIALSLGLTPNFKSNFDLAEDAKLQLSKDTYDDDLDNLLAQIGDQYADLFLAAKNLSDAILLSDILRVNTEITKAPLSASMIKRYDEHHQDLTLLKALVRQQLPEKYKEIFFDQSKNGYAGYIDGGASQEEFYKFIKPILEKMDGTEELLVKLNREDLLRKQRTFDNGSIPHQIHLGELHAILRRQEDFYPFLKDNREKIEKILTFRIPYYVGPLARGNSRFAWMTRKSEETITPWNFEEVVDKGASAQSFIERMTNFDKNLPNEKVLPKHSLLYEYFTVYNELTKVKYVTEGMRKPAFLSGEQKKAIVDLLFKTNRKVTVKQLKEDYFKKIECFDSVEISGVEDRFNASLGTYHDLLKIIKDKDFLDNEENEDILEDIVLTLTLFEDREMIEERLKTYAHLFDDKVMKQLKRRRYTGWGRLSRKLINGIRDKQSGKTILDFLKSDGFANRNFMQLIHDDSLTFKEDIQKAQVSGQGDSLHEHIANLAGSPAIKKGILQTVKVVDELVKVMGRHKPENIVIEMARENQTTQKGQKNSRERMKRIEEGIKELGSQILKEHPVENTQLQNEKLYLYYLQNGRDMYVDQELDINRLSDYDVDHIVPQSFLKDDSIDNKVLTRSDKARGKSDNVPSEEVVKKMKNYWRQLLNAKLITQRKFDNLTKAERGGLSELDKAGFIKRQLVETRQITKHVAQILDSRMNTKYDENDKLIREVKVITLKSKLVSDFRKDFQFYKVREINNYHHAHDAYLNAVVGTALIKKYPKLESEFVYGDYKVYDVRKMIAKSEQEIGKATAKYFFYSNIMNFFKTEITLANGEIRKRPLIETNGETGEIVWDKGRDFATVRKVLSMPQVNIVKKTEVQTGGFSKESILPKRNSDKLIARKKDWDPKKYGGFDSPTVAYSVLVVAKVEKGKSKKLKSVKELLGITIMERSSFEKNPIDFLEAKGYKEVKKDLIIKLPKYSLFELENGRKRMLASAGELQKGNELALPSKYVNFLYLASHYEKLKGSPEDNEQKQLFVEQHKHYLDEIIEQISEFSKRVILADANLDKVLSAYNKHRDKPIREQAENIIHLFTLTNLGAPAAFKYFDTTIDRKRYTSTKEVLDATLIHQSITGLYETRIDLSQLGGDGGGGGGSSGGMDPLQLLQPLEAEIKGTKLKAHWNSGATITCVPQAFLEEEVPIKNIWIKTIHGEKEQPVYYLTFKIQGRKVEAEVISSPYDYILVSPSDIPWLMKKPLQLTTLVPLQEYEERLLKQTMLTGSYKEKLQSLFLKYDALWQHWENQVGHRRIKPHHIATGTVNPRPQKQYPINPKAKASIQTVINDLLKQGVLIQQNSIMNTPVYPVPKPDGKWRMVLDYREVNKTIPLIAAQNQHSAGILSSIFRGKYKTTLDLSNGFWAHSITPESYWLTAFTWLGQQYCWTRLPQGFLNSPALFNADVVDLLKEVPNVQVYVDDIYISHDDPREHLEQLEKVFSLLLNAGYVVSLKKSEIAQHEVEFLGFNITKEGRGLTETFKQKLLNITPPRDLKQLQSILGLLNFARNFIPNFSELVKPLYNIIATAPGKYITWTTDNSQQLQNIISMLNSAENLEERNPEVRLIMKVNTSPSAGYIRFYNEFAKRPIMYLNYVYTKAEVKFTNTEKLLTTIHKGLIKALDLGMGQEILVYSPIVSMTKIQKTPLPERKALPIRWITWMSYLEDPRIQFHYDKTLPELQQVPTVTDDIIAKIKHPSEFSMVFYTDGSAIKHPNVNKSHNAGMGIAQVQFKPEFTVINTWSIPLGDHTAQLAEVAAVEFACKKALKIDGPVLIVTDSFYVAESVNKELPYWQSNGFFNNKKKPLKHVSKWKSIADCIQLKPDIIIIHEKGHQPTASTFHTEGNNLADKLATQGSYVVNAGKRTADGSEFEKRTADGSEFESPKKKAKVE

SEQ ID NO: 606 - protein, 2174 aa, synthetic construct
MPAAKRVKLDGGDKKYSIGLDIGTNSVGWAVITDEYKVPSKKFKVLGNTDRHSIKKNLIGALLFDSGETAEATRLKRTARRRYTRRKNRICYLQEIFSNEMAKVDDSFFHRLEESFLVEEDKKHERHPIFGNIVDEVAYHEKYPTIYHLRKKLVDSTDKADLRLIYLALAHMIKFRGHFLIEGDLNPDNSDVDKLFIQLVQTYNQLFEENPINASGVDAKAILSARLSKSRRLENLIAQLPGEKKNGLFGNLIALSLGLTPNFKSNFDLAEDAKLQLSKDTYDDDLDNLLAQIGDQYADLFLAAKNLSDAILLSDILRVNTEITKAPLSASMIKRYDEHHQDLTLLKALVRQQLPEKYKEIFFDQSKNGYAGYIDGGASQEEFYKFIKPILEKMDGTEELLVKLNREDLLRKQRTFDNGSIPHQIHLGELHAILRRQEDFYPFLKDNREKIEKILTFRIPYYVGPLARGNSRFAWMTRKSEETITPWNFEEVVDKGASAQSFIERMTNFDKNLPNEKVLPKHSLLYEYFTVYNELTKVKYVTEGMRKPAFLSGEQKKAIVDLLFKTNRKVTVKQLKEDYFKKIECFDSVEISGVEDRFNASLGTYHDLLKIIKDKDFLDNEENEDILEDIVLTLTLFEDREMIEERLKTYAHLFDDKVMKQLKRRRYTGWGRLSRKLINGIRDKQSGKTILDFLKSDGFANRNFMQLIHDDSLTFKEDIQKAQVSGQGDSLHEHIANLAGSPAIKKGILQTVKVVDELVKVMGRHKPENIVIEMARENQTTQKGQKNSRERMKRIEEGIKELGSQILKEHPVENTQLQNEKLYLYYLQNGRDMYVDQELDINRLSDYDVDHIVPQSFLKDDSIDNKVLTRSDKARGKSDNVPSEEVVKKMKNYWRQLLNAKLITQRKFDNLTKAERGGLSELDKAGFIKRQLVETRQITKHVAQILDSRMNTKYDENDKLIREVKVITLKSKLVSDFRKDFQFYKVREINNYHHAHDAYLNAVVGTALIKKYPKLESEFVYGDYKVYDVRKMIAKSEQEIGKATAKYFFYSNIMNFFKTEITLANGEIRKRPLIETNGETGEIVWDKGRDFATVRKVLSMPQVNIVKKTEVQTGGFSKESILPKRNSDKLIARKKDWDPKKYGGFDSPTVAYSVLVVAKVEKGKSKKLKSVKELLGITIMERSSFEKNPIDFLEAKGYKEVKKDLIIKLPKYSLFELENGRKRMLASAGELQKGNELALPSKYVNFLYLASHYEKLKGSPEDNEQKQLFVEQHKHYLDEIIEQISEFSKRVILADANLDKVLSAYNKHRDKPIREQAENIIHLFTLTNLGAPAAFKYFDTTIDRKRYTSTKEVLDATLIHQSITGLYETRIDLSQLGGDGGGGSGGSGGSGGMDPLQLLQPLEAEIKGTKLKAHWNSGATITCVPQAFLEEEVPIKNIWIKTIHGEKEQPVYYLTFKIQGRKVEAEVISSPYDYILVSPSDIPWLMKKPLQLTTLVPLQEYEERLLKQTMLTGSYKEKLQSLFLKYDALWQHWENQVGHRRIKPHHIATGTVNPRPQKQYPINPKAKASIQTVINDLLKQGVLIQQNSIMNTPVYPVPKPDGKWRMVLDYREVNKTIPLIAAQNQHSAGILSSIFRGKYKTTLDLSNGFWAHSITPESYWLTAFTWLGQQYCWTRLPQGFLNSPALFNADVVDLLKEVPNVQVYVDDIYISHDDPREHLEQLEKVFSLLLNAGYVVSLKKSEIAQHEVEFLGFNITKEGRGLTETFKQKLLNITPPRDLKQLQSILGLLNFARNFIPNFSELVKPLYNIIATAPGKYITWTTDNSQQLQNIISMLNSAENLEERNPEVRLIMKVNTSPSAGYIRFYNEFAKRPIMYLNYVYTKAEVKFTNTEKLLTTIHKGLIKALDLGMGQEILVYSPIVSMTKIQKTPLPERKALPIRWITWMSYLEDPRIQFHYDKTLPELQQVPTVTDDIIAKIKHPSEFSMVFYTDGSAIKHPNVNKSHNAGMGIAQVQFKPEFTVINTWSIPLGDHTAQLAEVAAVEFACKKALKIDGPVLIVTDSFYVAESVNKELPYWQSNGFFNNKKKPLKHVSKWKSIADCIQLKPDIIIIHEKGHQPTASTFHTEGNNLADKLATQGSYVVNAGKRTADGSEFEKRTADGSEFESPKKKAKVE

SEQ ID NO: 607 - protein, 2173 aa, synthetic construct
MPAAKRVKLDGGDKKYSIGLDIGTNSVGWAVITDEYKVPSKKFKVLGNTDRHSIKKNLIGALLFDSGETAEATRLKRTARRRYTRRKNRICYLQEIFSNEMAKVDDSFFHRLEESFLVEEDKKHERHPIFGNIVDEVAYHEKYPTIYHLRKKLVDSTDKADLRLIYLALAHMIKFRGHFLIEGDLNPDNSDVDKLFIQLVQTYNQLFEENPINASGVDAKAILSARLSKSRRLENLIAQLPGEKKNGLFGNLIALSLGLTPNFKSNFDLAEDAKLQLSKDTYDDDLDNLLAQIGDQYADLFLAAKNLSDAILLSDILRVNTEITKAPLSASMIKRYDEHHQDLTLLKALVRQQLPEKYKEIFFDQSKNGYAGYIDGGASQEEFYKFIKPILEKMDGTEELLVKLNREDLLRKQRTFDNGSIPHQIHLGELHAILRRQEDFYPFLKDNREKIEKILTFRIPYYVGPLARGNSRFAWMTRKSEETITPWNFEEVVDKGASAQSFIERMTNFDKNLPNEKVLPKHSLLYEYFTVYNELTKVKYVTEGMRKPAFLSGEQKKAIVDLLFKTNRKVTVKQLKEDYFKKIECFDSVEISGVEDRFNASLGTYHDLLKIIKDKDFLDNEENEDILEDIVLTLTLFEDREMIEERLKTYAHLFDDKVMKQLKRRRYTGWGRLSRKLINGIRDKQSGKTILDFLKSDGFANRNFMQLIHDDSLTFKEDIQKAQVSGQGDSLHEHIANLAGSPAIKKGILQTVKVVDELVKVMGRHKPENIVIEMARENQTTQKGQKNSRERMKRIEEGIKELGSQILKEHPVENTQLQNEKLYLYYLQNGRDMYVDQELDINRLSDYDVDHIVPQSFLKDDSIDNKVLTRSDKARGKSDNVPSEEVVKKMKNYWRQLLNAKLITQRKFDNLTKAERGGLSELDKAGFIKRQLVETRQITKHVAQILDSRMNTKYDENDKLIREVKVITLKSKLVSDFRKDFQFYKVREINNYHHAHDAYLNAVVGTALIKKYPKLESEFVYGDYKVYDVRKMIAKSEQEIGKATAKYFFYSNIMNFFKTEITLANGEIRKRPLIETNGETGEIVWDKGRDFATVRKVLSMPQVNIVKKTEVQTGGFSKESILPKRNSDKLIARKKDWDPKKYGGFDSPTVAYSVLVVAKVEKGKSKKLKSVKELLGITIMERSSFEKNPIDFLEAKGYKEVKKDLIIKLPKYSLFELENGRKRMLASAGELQKGNELALPSKYVNFLYLASHYEKLKGSPEDNEQKQLFVEQHKHYLDEIIEQISEFSKRVILADANLDKVLSAYNKHRDKPIREQAENIIHLFTLTNLGAPAAFKYFDTTIDRKRYTSTKEVLDATLIHQSITGLYETRIDLSQLGGDGGGGSEAAAKGGMDPLQLLQPLEAEIKGTKLKAHWNSGATITCVPQAFLEEEVPIKNIWIKTIHGEKEQPVYYLTFKIQGRKVEAEVISSPYDYILVSPSDIPWLMKKPLQLTTLVPLQEYEERLLKQTMLTGSYKEKLQSLFLKYDALWQHWENQVGHRRIKPHHIATGTVNPRPQKQYPINPKAKASIQTVINDLLKQGVLIQQNSIMNTPVYPVPKPDGKWRMVLDYREVNKTIPLIAAQNQHSAGILSSIFRGKYKTTLDLSNGFWAHSITPESYWLTAFTWLGQQYCWTRLPQGFLNSPALFNADVVDLLKEVPNVQVYVDDIYISHDDPREHLEQLEKVFSLLLNAGYVVSLKKSEIAQHEVEFLGFNITKEGRGLTETFKQKLLNITPPRDLKQLQSILGLLNFARNFIPNFSELVKPLYNIIATAPGKYITWTTDNSQQLQNIISMLNSAENLEERNPEVRLIMKVNTSPSAGYIRFYNEFAKRPIMYLNYVYTKAEVKFTNTEKLLTTIHKGLIKALDLGMGQEILVYSPIVSMTKIQKTPLPERKALPIRWITWMSYLEDPRIQFHYDKTLPELQQVPTVTDDIIAKIKHPSEFSMVFYTDGSAIKHPNVNKSHNAGMGIAQVQFKPEFTVINTWSIPLGDHTAQLAEVAAVEFACKKALKIDGPVLIVTDSFYVAESVNKELPYWQSNGFFNNKKKPLKHVSKWKSIADCIQLKPDIIIIHEKGHQPTASTFHTEGNNLADKLATQGSYVVNAGKRTADGSEFEKRTADGSEFESPKKKAKVE

SEQ ID NO: 608 - protein, 2170 aa, synthetic construct
MPAAKRVKLDGGDKKYSIGLDIGTNSVGWAVITDEYKVPSKKFKVLGNTDRHSIKKNLIGALLFDSGETAEATRLKRTARRRYTRRKNRICYLQEIFSNEMAKVDDSFFHRLEESFLVEEDKKHERHPIFGNIVDEVAYHEKYPTIYHLRKKLVDSTDKADLRLIYLALAHMIKFRGHFLIEGDLNPDNSDVDKLFIQLVQTYNQLFEENPINASGVDAKAILSARLSKSRRLENLIAQLPGEKKNGLFGNLIALSLGLTPNFKSNFDLAEDAKLQLSKDTYDDDLDNLLAQIGDQYADLFLAAKNLSDAILLSDILRVNTEITKAPLSASMIKRYDEHHQDLTLLKALVRQQLPEKYKEIFFDQSKNGYAGYIDGGASQEEFYKFIKPILEKMDGTEELLVKLNREDLLRKQRTFDNGSIPHQIHLGELHAILRRQEDFYPFLKDNREKIEKILTFRIPYYVGPLARGNSRFAWMTRKSEETITPWNFEEVVDKGASAQSFIERMTNFDKNLPNEKVLPKHSLLYEYFTVYNELTKVKYVTEGMRKPAFLSGEQKKAIVDLLFKTNRKVTVKQLKEDYFKKIECFDSVEISGVEDRFNASLGTYHDLLKIIKDKDFLDNEENEDILEDIVLTLTLFEDREMIEERLKTYAHLFDDKVMKQLKRRRYTGWGRLSRKLINGIRDKQSGKTILDFLKSDGFANRNFMQLIHDDSLTFKEDIQKAQVSGQGDSLHEHIANLAGSPAIKKGILQTVKVVDELVKVMGRHKPENIVIEMARENQTTQKGQKNSRERMKRIEEGIKELGSQILKEHPVENTQLQNEKLYLYYLQNGRDMYVDQELDINRLSDYDVDHIVPQSFLKDDSIDNKVLTRSDKARGKSDNVPSEEVVKKMKNYWRQLLNAKLITQRKFDNLTKAERGGLSELDKAGFIKRQLVETRQITKHVAQILDSRMNTKYDENDKLIREVKVITLKSKLVSDFRKDFQFYKVREINNYHHAHDAYLNAVVGTALIKKYPKLESEFVYGDYKVYDVRKMIAKSEQEIGKATAKYFFYSNIMNFFKTEITLANGEIRKRPLIETNGETGEIVWDKGRDFATVRKVLSMPQVNIVKKTEVQTGGFSKESILPKRNSDKLIARKKDWDPKKYGGFDSPTVAYSVLVVAKVEKGKSKKLKSVKELLGITIMERSSFEKNPIDFLEAKGYKEVKKDLIIKLPKYSLFELENGRKRMLASAGELQKGNELALPSKYVNFLYLASHYEKLKGSPEDNEQKQLFVEQHKHYLDEIIEQISEFSKRVILADANLDKVLSAYNKHRDKPIREQAENIIHLFTLTNLGAPAAFKYFDTTIDRKRYTSTKEVLDATLIHQSITGLYETRIDLSQLGGDGGEAAAKGGMDPLQLLQPLEAEIKGTKLKAHWNSGATITCVPQAFLEEEVPIKNIWIKTIHGEKEQPVYYLTFKIQGRKVEAEVISSPYDYILVSPSDIPWLMKKPLQLTTLVPLQEYEERLLKQTMLTGSYKEKLQSLFLKYDALWQHWENQVGHRRIKPHHIATGTVNPRPQKQYPINPKAKASIQTVINDLLKQGVLIQQNSIMNTPVYPVPKPDGKWRMVLDYREVNKTIPLIAAQNQHSAGILSSIFRGKYKTTLDLSNGFWAHSITPESYWLTAFTWLGQQYCWTRLPQGFLNSPALFNADVVDLLKEVPNVQVYVDDIYISHDDPREHLEQLEKVFSLLLNAGYVVSLKKSEIAQHEVEFLGFNITKEGRGLTETFKQKLLNITPPRDLKQLQSILGLLNFARNFIPNFSELVKPLYNIIATAPGKYITWTTDNSQQLQNIISMLNSAENLEERNPEVRLIMKVNTSPSAGYIRFYNEFAKRPIMYLNYVYTKAEVKFTNTEKLLTTIHKGLIKALDLGMGQEILVYSPIVSMTKIQKTPLPERKALPIRWITWMSYLEDPRIQFHYDKTLPELQQVPTVTDDIIAKIKHPSEFSMVFYTDGSAIKHPNVNKSHNAGMGIAQVQFKPEFTVINTWSIPLGDHTAQLAEVAAVEFACKKALKIDGPVLIVTDSFYVAESVNKELPYWQSNGFFNNKKKPLKHVSKWKSIADCIQLKPDIIIIHEKGHQPTASTFHTEGNNLADKLATQGSYVVNAGKRTADGSEFEKRTADGSEFESPKKKAKVE

SEQ ID NO: 609 - protein, 2174 aa, synthetic construct
MPAAKRVKLDGGDKKYSIGLDIGTNSVGWAVITDEYKVPSKKFKVLGNTDRHSIKKNLIGALLFDSGETAEATRLKRTARRRYTRRKNRICYLQEIFSNEMAKVDDSFFHRLEESFLVEEDKKHERHPIFGNIVDEVAYHEKYPTIYHLRKKLVDSTDKADLRLIYLALAHMIKFRGHFLIEGDLNPDNSDVDKLFIQLVQTYNQLFEENPINASGVDAKAILSARLSKSRRLENLIAQLPGEKKNGLFGNLIALSLGLTPNFKSNFDLAEDAKLQLSKDTYDDDLDNLLAQIGDQYADLFLAAKNLSDAILLSDILRVNTEITKAPLSASMIKRYDEHHQDLTLLKALVRQQLPEKYKEIFFDQSKNGYAGYIDGGASQEEFYKFIKPILEKMDGTEELLVKLNREDLLRKQRTFDNGSIPHQIHLGELHAILRRQEDFYPFLKDNREKIEKILTFRIPYYVGPLARGNSRFAWMTRKSEETITPWNFEEVVDKGASAQSFIERMTNFDKNLPNEKVLPKHSLLYEYFTVYNELTKVKYVTEGMRKPAFLSGEQKKAIVDLLFKTNRKVTVKQLKEDYFKKIECFDSVEISGVEDRFNASLGTYHDLLKIIKDKDFLDNEENEDILEDIVLTLTLFEDREMIEERLKTYAHLFDDKVMKQLKRRRYTGWGRLSRKLINGIRDKQSGKTILDFLKSDGFANRNFMQLIHDDSLTFKEDIQKAQVSGQGDSLHEHIANLAGSPAIKKGILQTVKVVDELVKVMGRHKPENIVIEMARENQTTQKGQKNSRERMKRIEEGIKELGSQILKEHPVENTQLQNEKLYLYYLQNGRDMYVDQELDINRLSDYDVDHIVPQSFLKDDSIDNKVLTRSDKARGKSDNVPSEEVVKKMKNYWRQLLNAKLITQRKFDNLTKAERGGLSELDKAGFIKRQLVETRQITKHVAQILDSRMNTKYDENDKLIREVKVITLKSKLVSDFRKDFQFYKVREINNYHHAHDAYLNAVVGTALIKKYPKLESEFVYGDYKVYDVRKMIAKSEQEIGKATAKYFFYSNIMNFFKTEITLANGEIRKRPLIETNGETGEIVWDKGRDFATVRKVLSMPQVNIVKKTEVQTGGFSKESILPKRNSDKLIARKKDWDPKKYGGFDSPTVAYSVLVVAKVEKGKSKKLKSVKELLGITIMERSSFEKNPIDFLEAKGYKEVKKDLIIKLPKYSLFELENGRKRMLASAGELQKGNELALPSKYVNFLYLASHYEKLKGSPEDNEQKQLFVEQHKHYLDEIIEQISEFSKRVILADANLDKVLSAYNKHRDKPIREQAENIIHLFTLTNLGAPAAFKYFDTTIDRKRYTSTKEVLDATLIHQSITGLYETRIDLSQLGGDGGGGSPAPGSSGGMDPLQLLQPLEAEIKGTKLKAHWNSGATITCVPQAFLEEEVPIKNIWIKTIHGEKEQPVYYLTFKIQGRKVEAEVISSPYDYILVSPSDIPWLMKKPLQLTTLVPLQEYEERLLKQTMLTGSYKEKLQSLFLKYDALWQHWENQVGHRRIKPHHIATGTVNPRPQKQYPINPKAKASIQTVINDLLKQGVLIQQNSIMNTPVYPVPKPDGKWRMVLDYREVNKTIPLIAAQNQHSAGILSSIFRGKYKTTLDLSNGFWAHSITPESYWLTAFTWLGQQYCWTRLPQGFLNSPALFNADVVDLLKEVPNVQVYVDDIYISHDDPREHLEQLEKVFSLLLNAGYVVSLKKSEIAQHEVEFLGFNITKEGRGLTETFKQKLLNITPPRDLKQLQSILGLLNFARNFIPNFSELVKPLYNIIATAPGKYITWTTDNSQQLQNIISMLNSAENLEERNPEVRLIMKVNTSPSAGYIRFYNEFAKRPIMYLNYVYTKAEVKFTNTEKLLTTIHKGLIKALDLGMGQEILVYSPIVSMTKIQKTPLPERKALPIRWITWMSYLEDPRIQFHYDKTLPELQQVPTVTDDIIAKIKHPSEFSMVFYTDGSAIKHPNVNKSHNAGMGIAQVQFKPEFTVINTWSIPLGDHTAQLAEVAAVEFACKKALKIDGPVLIVTDSFYVAESVNKELPYWQSNGFFNNKKKPLKHVSKWKSIADCIQLKPDIIIIHEKGHQPTASTFHTEGNNLADKLATQGSYVVNAGKRTADGSEFEKRTADGSEFESPKKKAKVE

SEQ ID NO: 610 - protein, 2174 aa, synthetic construct
MPAAKRVKLDGGDKKYSIGLDIGTNSVGWAVITDEYKVPSKKFKVLGNTDRHSIKKNLIGALLFDSGETAEATRLKRTARRRYTRRKNRICYLQEIFSNEMAKVDDSFFHRLEESFLVEEDKKHERHPIFGNIVDEVAYHEKYPTIYHLRKKLVDSTDKADLRLIYLALAHMIKFRGHFLIEGDLNPDNSDVDKLFIQLVQTYNQLFEENPINASGVDAKAILSARLSKSRRLENLIAQLPGEKKNGLFGNLIALSLGLTPNFKSNFDLAEDAKLQLSKDTYDDDLDNLLAQIGDQYADLFLAAKNLSDAILLSDILRVNTEITKAPLSASMIKRYDEHHQDLTLLKALVRQQLPEKYKEIFFDQSKNGYAGYIDGGASQEEFYKFIKPILEKMDGTEELLVKLNREDLLRKQRTFDNGSIPHQIHLGELHAILRRQEDFYPFLKDNREKIEKILTFRIPYYVGPLARGNSRFAWMTRKSEETITPWNFEEVVDKGASAQSFIERMTNFDKNLPNEKVLPKHSLLYEYFTVYNELTKVKYVTEGMRKPAFLSGEQKKAIVDLLFKTNRKVTVKQLKEDYFKKIECFDSVEISGVEDRFNASLGTYHDLLKIIKDKDFLDNEENEDILEDIVLTLTLFEDREMIEERLKTYAHLFDDKVMKQLKRRRYTGWGRLSRKLINGIRDKQSGKTILDFLKSDGFANRNFMQLIHDDSLTFKEDIQKAQVSGQGDSLHEHIANLAGSPAIKKGILQTVKVVDELVKVMGRHKPENIVIEMARENQTTQKGQKNSRERMKRIEEGIKELGSQILKEHPVENTQLQNEKLYLYYLQNGRDMYVDQELDINRLSDYDVDHIVPQSFLKDDSIDNKVLTRSDKARGKSDNVPSEEVVKKMKNYWRQLLNAKLITQRKFDNLTKAERGGLSELDKAGFIKRQLVETRQITKHVAQILDSRMNTKYDENDKLIREVKVITLKSKLVSDFRKDFQFYKVREINNYHHAHDAYLNAVVGTALIKKYPKLESEFVYGDYKVYDVRKMIAKSEQEIGKATAKYFFYSNIMNFFKTEITLANGEIRKRPLIETNGETGEIVWDKGRDFATVRKVLSMPQVNIVKKTEVQTGGFSKESILPKRNSDKLIARKKDWDPKKYGGFDSPTVAYSVLVVAKVEKGKSKKLKSVKELLGITIMERSSFEKNPIDFLEAKGYKEVKKDLIIKLPKYSLFELENGRKRMLASAGELQKGNELALPSKYVNFLYLASHYEKLKGSPEDNEQKQLFVEQHKHYLDEIIEQISEFSKRVILADANLDKVLSAYNKHRDKPIREQAENIIHLFTLTNLGAPAAFKYFDTTIDRKRYTSTKEVLDATLIHQSITGLYETRIDLSQLGGDGGGSSGGGGGSGGMDPLQLLQPLEAEIKGTKLKAHWNSGATITCVPQAFLEEEVPIKNIWIKTIHGEKEQPVYYLTFKIQGRKVEAEVISSPYDYILVSPSDIPWLMKKPLQLTTLVPLQEYEERLLKQTMLTGSYKEKLQSLFLKYDALWQHWENQVGHRRIKPHHIATGTVNPRPQKQYPINPKAKASIQTVINDLLKQGVLIQQNSIMNTPVYPVPKPDGKWRMVLDYREVNKTIPLIAAQNQHSAGILSSIFRGKYKTTLDLSNGFWAHSITPESYWLTAFTWLGQQYCWTRLPQGFLNSPALFNADVVDLLKEVPNVQVYVDDIYISHDDPREHLEQLEKVFSLLLNAGYVVSLKKSEIAQHEVEFLGFNITKEGRGLTETFKQKLLNITPPRDLKQLQSILGLLNFARNFIPNFSELVKPLYNIIATAPGKYITWTTDNSQQLQNIISMLNSAENLEERNPEVRLIMKVNTSPSAGYIRFYNEFAKRPIMYLNYVYTKAEVKFTNTEKLLTTIHKGLIKALDLGMGQEILVYSPIVSMTKIQKTPLPERKALPIRWITWMSYLEDPRIQFHYDKTLPELQQVPTVTDDIIAKIKHPSEFSMVFYTDGSAIKHPNVNKSHNAGMGIAQVQFKPEFTVINTWSIPLGDHTAQLAEVAAVEFACKKALKIDGPVLIVTDSFYVAESVNKELPYWQSNGFFNNKKKPLKHVSKWKSIADCIQLKPDIIIIHEKGHQPTASTFHTEGNNLADKLATQGSYVVNAGKRTADGSEFEKRTADGSEFESPKKKAKVE

SEQ ID NO: 611 - protein, 2180 aa, synthetic construct
MPAAKRVKLDGGDKKYSIGLDIGTNSVGWAVITDEYKVPSKKFKVLGNTDRHSIKKNLIGALLFDSGETAEATRLKRTARRRYTRRKNRICYLQEIFSNEMAKVDDSFFHRLEESFLVEEDKKHERHPIFGNIVDEVAYHEKYPTIYHLRKKLVDSTDKADLRLIYLALAHMIKFRGHFLIEGDLNPDNSDVDKLFIQLVQTYNQLFEENPINASGVDAKAILSARLSKSRRLENLIAQLPGEKKNGLFGNLIALSLGLTPNFKSNFDLAEDAKLQLSKDTYDDDLDNLLAQIGDQYADLFLAAKNLSDAILLSDILRVNTEITKAPLSASMIKRYDEHHQDLTLLKALVRQQLPEKYKEIFFDQSKNGYAGYIDGGASQEEFYKFIKPILEKMDGTEELLVKLNREDLLRKQRTFDNGSIPHQIHLGELHAILRRQEDFYPFLKDNREKIEKILTFRIPYYVGPLARGNSRFAWMTRKSEETITPWNFEEVVDKGASAQSFIERMTNFDKNLPNEKVLPKHSLLYEYFTVYNELTKVKYVTEGMRKPAFLSGEQKKAIVDLLFKTNRKVTVKQLKEDYFKKIECFDSVEISGVEDRFNASLGTYHDLLKIIKDKDFLDNEENEDILEDIVLTLTLFEDREMIEERLKTYAHLFDDKVMKQLKRRRYTGWGRLSRKLINGIRDKQSGKTILDFLKSDGFANRNFMQLIHDDSLTFKEDIQKAQVSGQGDSLHEHIANLAGSPAIKKGILQTVKVVDELVKVMGRHKPENIVIEMARENQTTQKGQKNSRERMKRIEEGIKELGSQILKEHPVENTQLQNEKLYLYYLQNGRDMYVDQELDINRLSDYDVDHIVPQSFLKDDSIDNKVLTRSDKARGKSDNVPSEEVVKKMKNYWRQLLNAKLITQRKFDNLTKAERGGLSELDKAGFIKRQLVETRQITKHVAQILDSRMNTKYDENDKLIREVKVITLKSKLVSDFRKDFQFYKVREINNYHHAHDAYLNAVVGTALIKKYPKLESEFVYGDYKVYDVRKMIAKSEQEIGKATAKYFFYSNIMNFFKTEITLANGEIRKRPLIETNGETGEIVWDKGRDFATVRKVLSMPQVNIVKKTEVQTGGFSKESILPKRNSDKLIARKKDWDPKKYGGFDSPTVAYSVLVVAKVEKGKSKKLKSVKELLGITIMERSSFEKNPIDFLEAKGYKEVKKDLIIKLPKYSLFELENGRKRMLASAGELQKGNELALPSKYVNFLYLASHYEKLKGSPEDNEQKQLFVEQHKHYLDEIIEQISEFSKRVILADANLDKVLSAYNKHRDKPIREQAENIIHLFTLTNLGAPAAFKYFDTTIDRKRYTSTKEVLDATLIHQSITGLYETRIDLSQLGGDGGGGGGSEAAAKGGGGSGGMDPLQLLQPLEAEIKGTKLKAHWNSGATITCVPQAFLEEEVPIKNIWIKTIHGEKEQPVYYLTFKIQGRKVEAEVISSPYDYILVSPSDIPWLMKKPLQLTTLVPLQEYEERLLKQTMLTGSYKEKLQSLFLKYDALWQHWENQVGHRRIKPHHIATGTVNPRPQKQYPINPKAKASIQTVINDLLKQGVLIQQNSIMNTPVYPVPKPDGKWRMVLDYREVNKTIPLIAAQNQHSAGILSSIFRGKYKTTLDLSNGFWAHSITPESYWLTAFTWLGQQYCWTRLPQGFLNSPALFNADVVDLLKEVPNVQVYVDDIYISHDDPREHLEQLEKVFSLLLNAGYVVSLKKSEIAQHEVEFLGFNITKEGRGLTETFKQKLLNITPPRDLKQLQSILGLLNFARNFIPNFSELVKPLYNIIATAPGKYITWTTDNSQQLQNIISMLNSAENLEERNPEVRLIMKVNTSPSAGYIRFYNEFAKRPIMYLNYVYTKAEVKFTNTEKLLTTIHKGLIKALDLGMGQEILVYSPIVSMTKIQKTPLPERKALPIRWITWMSYLEDPRIQFHYDKTLPELQQVPTVTDDIIAKIKHPSEFSMVFYTDGSAIKHPNVNKSHNAGMGIAQVQFKPEFTVINTWSIPLGDHTAQLAEVAAVEFACKKALKIDGPVLIVTDSFYVAESVNKELPYWQSNGFFNNKKKPLKHVSKWKSIADCIQLKPDIIIIHEKGHQPTASTFHTEGNNLADKLATQGSYVVNAGKRTADGSEFEKRTADGSEFESPKKKAKVE

SEQ ID NO: 612 - protein, 2174 aa, synthetic construct
MPAAKRVKLDGGDKKYSIGLDIGTNSVGWAVITDEYKVPSKKFKVLGNTDRHSIKKNLIGALLFDSGETAEATRLKRTARRRYTRRKNRICYLQEIFSNEMAKVDDSFFHRLEESFLVEEDKKHERHPIFGNIVDEVAYHEKYPTIYHLRKKLVDSTDKADLRLIYLALAHMIKFRGHFLIEGDLNPDNSDVDKLFIQLVQTYNQLFEENPINASGVDAKAILSARLSKSRRLENLIAQLPGEKKNGLFGNLIALSLGLTPNFKSNFDLAEDAKLQLSKDTYDDDLDNLLAQIGDQYADLFLAAKNLSDAILLSDILRVNTEITKAPLSASMIKRYDEHHQDLTLLKALVRQQLPEKYKEIFFDQSKNGYAGYIDGGASQEEFYKFIKPILEKMDGTEELLVKLNREDLLRKQRTFDNGSIPHQIHLGELHAILRRQEDFYPFLKDNREKIEKILTFRIPYYVGPLARGNSRFAWMTRKSEETITPWNFEEVVDKGASAQSFIERMTNFDKNLPNEKVLPKHSLLYEYFTVYNELTKVKYVTEGMRKPAFLSGEQKKAIVDLLFKTNRKVTVKQLKEDYFKKIECFDSVEISGVEDRFNASLGTYHDLLKIIKDKDFLDNEENEDILEDIVLTLTLFEDREMIEERLKTYAHLFDDKVMKQLKRRRYTGWGRLSRKLINGIRDKQSGKTILDFLKSDGFANRNFMQLIHDDSLTFKEDIQKAQVSGQGDSLHEHIANLAGSPAIKKGILQTVKVVDELVKVMGRHKPENIVIEMARENQTTQKGQKNSRERMKRIEEGIKELGSQILKEHPVENTQLQNEKLYLYYLQNGRDMYVDQELDINRLSDYDVDHIVPQSFLKDDSIDNKVLTRSDKARGKSDNVPSEEVVKKMKNYWRQLLNAKLITQRKFDNLTKAERGGLSELDKAGFIKRQLVETRQITKHVAQILDSRMNTKYDENDKLIREVKVITLKSKLVSDFRKDFQFYKVREINNYHHAHDAYLNAVVGTALIKKYPKLESEFVYGDYKVYDVRKMIAKSEQEIGKATAKYFFYSNIMNFFKTEITLANGEIRKRPLIETNGETGEIVWDKGRDFATVRKVLSMPQVNIVKKTEVQTGGFSKESILPKRNSDKLIARKKDWDPKKYGGFDSPTVAYSVLVVAKVEKGKSKKLKSVKELLGITIMERSSFEKNPIDFLEAKGYKEVKKDLIIKLPKYSLFELENGRKRMLASAGELQKGNELALPSKYVNFLYLASHYEKLKGSPEDNEQKQLFVEQHKHYLDEIIEQISEFSKRVILADANLDKVLSAYNKHRDKPIREQAENIIHLFTLTNLGAPAAFKYFDTTIDRKRYTSTKEVLDATLIHQSITGLYETRIDLSQLGGDGGGSSPAPGGGGGMDPLQLLQPLEAEIKGTKLKAHWNSGATITCVPQAFLEEEVPIKNIWIKTIHGEKEQPVYYLTFKIQGRKVEAEVISSPYDYILVSPSDIPWLMKKPLQLTTLVPLQEYEERLLKQTMLTGSYKEKLQSLFLKYDALWQHWENQVGHRRIKPHHIATGTVNPRPQKQYPINPKAKASIQTVINDLLKQGVLIQQNSIMNTPVYPVPKPDGKWRMVLDYREVNKTIPLIAAQNQHSAGILSSIFRGKYKTTLDLSNGFWAHSITPESYWLTAFTWLGQQYCWTRLPQGFLNSPALFNADVVDLLKEVPNVQVYVDDIYISHDDPREHLEQLEKVFSLLLNAGYVVSLKKSEIAQHEVEFLGFNITKEGRGLTETFKQKLLNITPPRDLKQLQSILGLLNFARNFIPNFSELVKPLYNIIATAPGKYITWTTDNSQQLQNIISMLNSAENLEERNPEVRLIMKVNTSPSAGYIRFYNEFAKRPIMYLNYVYTKAEVKFTNTEKLLTTIHKGLIKALDLGMGQEILVYSPIVSMTKIQKTPLPERKALPIRWITWMSYLEDPRIQFHYDKTLPELQQVPTVTDDIIAKIKHPSEFSMVFYTDGSAIKHPNVNKSHNAGMGIAQVQFKPEFTVINTWSIPLGDHTAQLAEVAAVEFACKKALKIDGPVLIVTDSFYVAESVNKELPYWQSNGFFNNKKKPLKHVSKWKSIADCIQLKPDIIIIHEKGHQPTASTFHTEGNNLADKLATQGSYVVNAGKRTADGSEFEKRTADGSEFESPKKKAKVE

SEQ ID NO: 613 - protein, 2176 aa, synthetic construct
MPAAKRVKLDGGDKKYSIGLDIGTNSVGWAVITDEYKVPSKKFKVLGNTDRHSIKKNLIGALLFDSGETAEATRLKRTARRRYTRRKNRICYLQEIFSNEMAKVDDSFFHRLEESFLVEEDKKHERHPIFGNIVDEVAYHEKYPTIYHLRKKLVDSTDKADLRLIYLALAHMIKFRGHFLIEGDLNPDNSDVDKLFIQLVQTYNQLFEENPINASGVDAKAILSARLSKSRRLENLIAQLPGEKKNGLFGNLIALSLGLTPNFKSNFDLAEDAKLQLSKDTYDDDLDNLLAQIGDQYADLFLAAKNLSDAILLSDILRVNTEITKAPLSASMIKRYDEHHQDLTLLKALVRQQLPEKYKEIFFDQSKNGYAGYIDGGASQEEFYKFIKPILEKMDGTEELLVKLNREDLLRKQRTFDNGSIPHQIHLGELHAILRRQEDFYPFLKDNREKIEKILTFRIPYYVGPLARGNSRFAWMTRKSEETITPWNFEEVVDKGASAQSFIERMTNFDKNLPNEKVLPKHSLLYEYFTVYNELTKVKYVTEGMRKPAFLSGEQKKAIVDLLFKTNRKVTVKQLKEDYFKKIECFDSVEISGVEDRFNASLGTYHDLLKIIKDKDFLDNEENEDILEDIVLTLTLFEDREMIEERLKTYAHLFDDKVMKQLKRRRYTGWGRLSRKLINGIRDKQSGKTILDFLKSDGFANRNFMQLIHDDSLTFKEDIQKAQVSGQGDSLHEHIANLAGSPAIKKGILQTVKVVDELVKVMGRHKPENIVIEMARENQTTQKGQKNSRERMKRIEEGIKELGSQILKEHPVENTQLQNEKLYLYYLQNGRDMYVDQELDINRLSDYDVDHIVPQSFLKDDSIDNKVLTRSDKARGKSDNVPSEEVVKKMKNYWRQLLNAKLITQRKFDNLTKAERGGLSELDKAGFIKRQLVETRQITKHVAQILDSRMNTKYDENDKLIREVKVITLKSKLVSDFRKDFQFYKVREINNYHHAHDAYLNAVVGTALIKKYPKLESEFVYGDYKVYDVRKMIAKSEQEIGKATAKYFFYSNIMNFFKTEITLANGEIRKRPLIETNGETGEIVWDKGRDFATVRKVLSMPQVNIVKKTEVQTGGFSKESILPKRNSDKLIARKKDWDPKKYGGFDSPTVAYSVLVVAKVEKGKSKKLKSVKELLGITIMERSSFEKNPIDFLEAKGYKEVKKDLIIKLPKYSLFELENGRKRMLASAGELQKGNELALPSKYVNFLYLASHYEKLKGSPEDNEQKQLFVEQHKHYLDEIIEQISEFSKRVILADANLDKVLSAYNKHRDKPIREQAENIIHLFTLTNLGAPAAFKYFDTTIDRKRYTSTKEVLDATLIHQSITGLYETRIDLSQLGGDGGGGGGSSEAAAKGGMDPLQLLQPLEAEIKGTKLKAHWNSGATITCVPQAFLEEEVPIKNIWIKTIHGEKEQPVYYLTFKIQGRKVEAEVISSPYDYILVSPSDIPWLMKKPLQLTTLVPLQEYEERLLKQTMLTGSYKEKLQSLFLKYDALWQHWENQVGHRRIKPHHIATGTVNPRPQKQYPINPKAKASIQTVINDLLKQGVLIQQNSIMNTPVYPVPKPDGKWRMVLDYREVNKTIPLIAAQNQHSAGILSSIFRGKYKTTLDLSNGFWAHSITPESYWLTAFTWLGQQYCWTRLPQGFLNSPALFNADVVDLLKEVPNVQVYVDDIYISHDDPREHLEQLEKVFSLLLNAGYVVSLKKSEIAQHEVEFLGFNITKEGRGLTETFKQKLLNITPPRDLKQLQSILGLLNFARNFIPNFSELVKPLYNIIATAPGKYITWTTDNSQQLQNIISMLNSAENLEERNPEVRLIMKVNTSPSAGYIRFYNEFAKRPIMYLNYVYTKAEVKFTNTEKLLTTIHKGLIKALDLGMGQEILVYSPIVSMTKIQKTPLPERKALPIRWITWMSYLEDPRIQFHYDKTLPELQQVPTVTDDIIAKIKHPSEFSMVFYTDGSAIKHPNVNKSHNAGMGIAQVQFKPEFTVINTWSIPLGDHTAQLAEVAAVEFACKKALKIDGPVLIVTDSFYVAESVNKELPYWQSNGFFNNKKKPLKHVSKWKSIADCIQLKPDIIIIHEKGHQPTASTFHTEGNNLADKLATQGSYVVNAGKRTADGSEFEKRTADGSEFESPKKKAKVE

SEQ ID NO: 614 - protein, 2176 aa, synthetic construct
MPAAKRVKLDGGDKKYSIGLDIGTNSVGWAVITDEYKVPSKKFKVLGNTDRHSIKKNLIGALLFDSGETAEATRLKRTARRRYTRRKNRICYLQEIFSNEMAKVDDSFFHRLEESFLVEEDKKHERHPIFGNIVDEVAYHEKYPTIYHLRKKLVDSTDKADLRLIYLALAHMIKFRGHFLIEGDLNPDNSDVDKLFIQLVQTYNQLFEENPINASGVDAKAILSARLSKSRRLENLIAQLPGEKKNGLFGNLIALSLGLTPNFKSNFDLAEDAKLQLSKDTYDDDLDNLLAQIGDQYADLFLAAKNLSDAILLSDILRVNTEITKAPLSASMIKRYDEHHQDLTLLKALVRQQLPEKYKEIFFDQSKNGYAGYIDGGASQEEFYKFIKPILEKMDGTEELLVKLNREDLLRKQRTFDNGSIPHQIHLGELHAILRRQEDFYPFLKDNREKIEKILTFRIPYYVGPLARGNSRFAWMTRKSEETITPWNFEEVVDKGASAQSFIERMTNFDKNLPNEKVLPKHSLLYEYFTVYNELTKVKYVTEGMRKPAFLSGEQKKAIVDLLFKTNRKVTVKQLKEDYFKKIECFDSVEISGVEDRFNASLGTYHDLLKIIKDKDFLDNEENEDILEDIVLTLTLFEDREMIEERLKTYAHLFDDKVMKQLKRRRYTGWGRLSRKLINGIRDKQSGKTILDFLKSDGFANRNFMQLIHDDSLTFKEDIQKAQVSGQGDSLHEHIANLAGSPAIKKGILQTVKVVDELVKVMGRHKPENIVIEMARENQTTQKGQKNSRERMKRIEEGIKELGSQILKEHPVENTQLQNEKLYLYYLQNGRDMYVDQELDINRLSDYDVDHIVPQSFLKDDSIDNKVLTRSDKARGKSDNVPSEEVVKKMKNYWRQLLNAKLITQRKFDNLTKAERGGLSELDKAGFIKRQLVETRQITKHVAQILDSRMNTKYDENDKLIREVKVITLKSKLVSDFRKDFQFYKVREINNYHHAHDAYLNAVVGTALIKKYPKLESEFVYGDYKVYDVRKMIAKSEQEIGKATAKYFFYSNIMNFFKTEITLANGEIRKRPLIETNGETGEIVWDKGRDFATVRKVLSMPQVNIVKKTEVQTGGFSKESILPKRNSDKLIARKKDWDPKKYGGFDSPTVAYSVLVVAKVEKGKSKKLKSVKELLGITIMERSSFEKNPIDFLEAKGYKEVKKDLIIKLPKYSLFELENGRKRMLASAGELQKGNELALPSKYVNFLYLASHYEKLKGSPEDNEQKQLFVEQHKHYLDEIIEQISEFSKRVILADANLDKVLSAYNKHRDKPIREQAENIIHLFTLTNLGAPAAFKYFDTTIDRKRYTSTKEVLDATLIHQSITGLYETRIDLSQLGGDGGGGSGSSEAAAKGGMDPLQLLQPLEAEIKGTKLKAHWNSGATITCVPQAFLEEEVPIKNIWIKTIHGEKEQPVYYLTFKIQGRKVEAEVISSPYDYILVSPSDIPWLMKKPLQLTTLVPLQEYEERLLKQTMLTGSYKEKLQSLFLKYDALWQHWENQVGHRRIKPHHIATGTVNPRPQKQYPINPKAKASIQTVINDLLKQGVLIQQNSIMNTPVYPVPKPDGKWRMVLDYREVNKTIPLIAAQNQHSAGILSSIFRGKYKTTLDLSNGFWAHSITPESYWLTAFTWLGQQYCWTRLPQGFLNSPALFNADVVDLLKEVPNVQVYVDDIYISHDDPREHLEQLEKVFSLLLNAGYVVSLKKSEIAQHEVEFLGFNITKEGRGLTETFKQKLLNITPPRDLKQLQSILGLLNFARNFIPNFSELVKPLYNIIATAPGKYITWTTDNSQQLQNIISMLNSAENLEERNPEVRLIMKVNTSPSAGYIRFYNEFAKRPIMYLNYVYTKAEVKFTNTEKLLTTIHKGLIKALDLGMGQEILVYSPIVSMTKIQKTPLPERKALPIRWITWMSYLEDPRIQFHYDKTLPELQQVPTVTDDIIAKIKHPSEFSMVFYTDGSAIKHPNVNKSHNAGMGIAQVQFKPEFTVINTWSIPLGDHTAQLAEVAAVEFACKKALKIDGPVLIVTDSFYVAESVNKELPYWQSNGFFNNKKKPLKHVSKWKSIADCIQLKPDIIIIHEKGHQPTASTFHTEGNNLADKLATQGSYVVNAGKRTADGSEFEKRTADGSEFESPKKKAKVE

SEQ ID NO: 615 - protein, 2185 aa, synthetic construct
MPAAKRVKLDGGDKKYSIGLDIGTNSVGWAVITDEYKVPSKKFKVLGNTDRHSIKKNLIGALLFDSGETAEATRLKRTARRRYTRRKNRICYLQEIFSNEMAKVDDSFFHRLEESFLVEEDKKHERHPIFGNIVDEVAYHEKYPTIYHLRKKLVDSTDKADLRLIYLALAHMIKFRGHFLIEGDLNPDNSDVDKLFIQLVQTYNQLFEENPINASGVDAKAILSARLSKSRRLENLIAQLPGEKKNGLFGNLIALSLGLTPNFKSNFDLAEDAKLQLSKDTYDDDLDNLLAQIGDQYADLFLAAKNLSDAILLSDILRVNTEITKAPLSASMIKRYDEHHQDLTLLKALVRQQLPEKYKEIFFDQSKNGYAGYIDGGASQEEFYKFIKPILEKMDGTEELLVKLNREDLLRKQRTFDNGSIPHQIHLGELHAILRRQEDFYPFLKDNREKIEKILTFRIPYYVGPLARGNSRFAWMTRKSEETITPWNFEEVVDKGASAQSFIERMTNFDKNLPNEKVLPKHSLLYEYFTVYNELTKVKYVTEGMRKPAFLSGEQKKAIVDLLFKTNRKVTVKQLKEDYFKKIECFDSVEISGVEDRFNASLGTYHDLLKIIKDKDFLDNEENEDILEDIVLTLTLFEDREMIEERLKTYAHLFDDKVMKQLKRRRYTGWGRLSRKLINGIRDKQSGKTILDFLKSDGFANRNFMQLIHDDSLTFKEDIQKAQVSGQGDSLHEHIANLAGSPAIKKGILQTVKVVDELVKVMGRHKPENIVIEMARENQTTQKGQKNSRERMKRIEEGIKELGSQILKEHPVENTQLQNEKLYLYYLQNGRDMYVDQELDINRLSDYDVDHIVPQSFLKDDSIDNKVLTRSDKARGKSDNVPSEEVVKKMKNYWRQLLNAKLITQRKFDNLTKAERGGLSELDKAGFIKRQLVETRQITKHVAQILDSRMNTKYDENDKLIREVKVITLKSKLVSDFRKDFQFYKVREINNYHHAHDAYLNAVVGTALIKKYPKLESEFVYGDYKVYDVRKMIAKSEQEIGKATAKYFFYSNIMNFFKTEITLANGEIRKRPLIETNGETGEIVWDKGRDFATVRKVLSMPQVNIVKKTEVQTGGFSKESILPKRNSDKLIARKKDWDPKKYGGFDSPTVAYSVLVVAKVEKGKSKKLKSVKELLGITIMERSSFEKNPIDFLEAKGYKEVKKDLIIKLPKYSLFELENGRKRMLASAGELQKGNELALPSKYVNFLYLASHYEKLKGSPEDNEQKQLFVEQHKHYLDEIIEQISEFSKRVILADANLDKVLSAYNKHRDKPIREQAENIIHLFTLTNLGAPAAFKYFDTTIDRKRYTSTKEVLDATLIHQSITGLYETRIDLSQLGGDGGGGGGSGGGGSGGGGSGGGGSGGMDPLQLLQPLEAEIKGTKLKAHWNSGATITCVPQAFLEEEVPIKNIWIKTIHGEKEQPVYYLTFKIQGRKVEAEVISSPYDYILVSPSDIPWLMKKPLQLTTLVPLQEYEERLLKQTMLTGSYKEKLQSLFLKYDALWQHWENQVGHRRIKPHHIATGTVNPRPQKQYPINPKAKASIQTVINDLLKQGVLIQQNSIMNTPVYPVPKPDGKWRMVLDYREVNKTIPLIAAQNQHSAGILSSIFRGKYKTTLDLSNGFWAHSITPESYWLTAFTWLGQQYCWTRLPQGFLNSPALFNADVVDLLKEVPNVQVYVDDIYISHDDPREHLEQLEKVFSLLLNAGYVVSLKKSEIAQHEVEFLGFNITKEGRGLTETFKQKLLNITPPRDLKQLQSILGLLNFARNFIPNFSELVKPLYNIIATAPGKYITWTTDNSQQLQNIISMLNSAENLEERNPEVRLIMKVNTSPSAGYIRFYNEFAKRPIMYLNYVYTKAEVKFTNTEKLLTTIHKGLIKALDLGMGQEILVYSPIVSMTKIQKTPLPERKALPIRWITWMSYLEDPRIQFHYDKTLPELQQVPTVTDDIIAKIKHPSEFSMVFYTDGSAIKHPNVNKSHNAGMGIAQVQFKPEFTVINTWSIPLGDHTAQLAEVAAVEFACKKALKIDGPVLIVTDSFYVAESVNKELPYWQSNGFFNNKKKPLKHVSKWKSIADCIQLKPDIIIIHEKGHQPTASTFHTEGNNLADKLATQGSYVVNAGKRTADGSEFEKRTADGSEFESPKKKAKVE

SEQ ID NO: 616 - protein, 2176 aa, synthetic construct
MPAAKRVKLDGGDKKYSIGLDIGTNSVGWAVITDEYKVPSKKFKVLGNTDRHSIKKNLIGALLFDSGETAEATRLKRTARRRYTRRKNRICYLQEIFSNEMAKVDDSFFHRLEESFLVEEDKKHERHPIFGNIVDEVAYHEKYPTIYHLRKKLVDSTDKADLRLIYLALAHMIKFRGHFLIEGDLNPDNSDVDKLFIQLVQTYNQLFEENPINASGVDAKAILSARLSKSRRLENLIAQLPGEKKNGLFGNLIALSLGLTPNFKSNFDLAEDAKLQLSKDTYDDDLDNLLAQIGDQYADLFLAAKNLSDAILLSDILRVNTEITKAPLSASMIKRYDEHHQDLTLLKALVRQQLPEKYKEIFFDQSKNGYAGYIDGGASQEEFYKFIKPILEKMDGTEELLVKLNREDLLRKQRTFDNGSIPHQIHLGELHAILRRQEDFYPFLKDNREKIEKILTFRIPYYVGPLARGNSRFAWMTRKSEETITPWNFEEVVDKGASAQSFIERMTNFDKNLPNEKVLPKHSLLYEYFTVYNELTKVKYVTEGMRKPAFLSGEQKKAIVDLLFKTNRKVTVKQLKEDYFKKIECFDSVEISGVEDRFNASLGTYHDLLKIIKDKDFLDNEENEDILEDIVLTLTLFEDREMIEERLKTYAHLFDDKVMKQLKRRRYTGWGRLSRKLINGIRDKQSGKTILDFLKSDGFANRNFMQLIHDDSLTFKEDIQKAQVSGQGDSLHEHIANLAGSPAIKKGILQTVKVVDELVKVMGRHKPENIVIEMARENQTTQKGQKNSRERMKRIEEGIKELGSQILKEHPVENTQLQNEKLYLYYLQNGRDMYVDQELDINRLSDYDVDHIVPQSFLKDDSIDNKVLTRSDKARGKSDNVPSEEVVKKMKNYWRQLLNAKLITQRKFDNLTKAERGGLSELDKAGFIKRQLVETRQITKHVAQILDSRMNTKYDENDKLIREVKVITLKSKLVSDFRKDFQFYKVREINNYHHAHDAYLNAVVGTALIKKYPKLESEFVYGDYKVYDVRKMIAKSEQEIGKATAKYFFYSNIMNFFKTEITLANGEIRKRPLIETNGETGEIVWDKGRDFATVRKVLSMPQVNIVKKTEVQTGGFSKESILPKRNSDKLIARKKDWDPKKYGGFDSPTVAYSVLVVAKVEKGKSKKLKSVKELLGITIMERSSFEKNPIDFLEAKGYKEVKKDLIIKLPKYSLFELENGRKRMLASAGELQKGNELALPSKYVNFLYLASHYEKLKGSPEDNEQKQLFVEQHKHYLDEIIEQISEFSKRVILADANLDKVLSAYNKHRDKPIREQAENIIHLFTLTNLGAPAAFKYFDTTIDRKRYTSTKEVLDATLIHQSITGLYETRIDLSQLGGDGGPAPEAAAKGGGGGMDPLQLLQPLEAEIKGTKLKAHWNSGATITCVPQAFLEEEVPIKNIWIKTIHGEKEQPVYYLTFKIQGRKVEAEVISSPYDYILVSPSDIPWLMKKPLQLTTLVPLQEYEERLLKQTMLTGSYKEKLQSLFLKYDALWQHWENQVGHRRIKPHHIATGTVNPRPQKQYPINPKAKASIQTVINDLLKQGVLIQQNSIMNTPVYPVPKPDGKWRMVLDYREVNKTIPLIAAQNQHSAGILSSIFRGKYKTTLDLSNGFWAHSITPESYWLTAFTWLGQQYCWTRLPQGFLNSPALFNADVVDLLKEVPNVQVYVDDIYISHDDPREHLEQLEKVFSLLLNAGYVVSLKKSEIAQHEVEFLGFNITKEGRGLTETFKQKLLNITPPRDLKQLQSILGLLNFARNFIPNFSELVKPLYNIIATAPGKYITWTTDNSQQLQNIISMLNSAENLEERNPEVRLIMKVNTSPSAGYIRFYNEFAKRPIMYLNYVYTKAEVKFTNTEKLLTTIHKGLIKALDLGMGQEILVYSPIVSMTKIQKTPLPERKALPIRWITWMSYLEDPRIQFHYDKTLPELQQVPTVTDDIIAKIKHPSEFSMVFYTDGSAIKHPNVNKSHNAGMGIAQVQFKPEFTVINTWSIPLGDHTAQLAEVAAVEFACKKALKIDGPVLIVTDSFYVAESVNKELPYWQSNGFFNNKKKPLKHVSKWKSIADCIQLKPDIIIIHEKGHQPTASTFHTEGNNLADKLATQGSYVVNAGKRTADGSEFEKRTADGSEFESPKKKAKVE

SEQ ID NO: 617 - protein, 2174 aa, synthetic construct
MPAAKRVKLDGGDKKYSIGLDIGTNSVGWAVITDEYKVPSKKFKVLGNTDRHSIKKNLIGALLFDSGETAEATRLKRTARRRYTRRKNRICYLQEIFSNEMAKVDDSFFHRLEESFLVEEDKKHERHPIFGNIVDEVAYHEKYPTIYHLRKKLVDSTDKADLRLIYLALAHMIKFRGHFLIEGDLNPDNSDVDKLFIQLVQTYNQLFEENPINASGVDAKAILSARLSKSRRLENLIAQLPGEKKNGLFGNLIALSLGLTPNFKSNFDLAEDAKLQLSKDTYDDDLDNLLAQIGDQYADLFLAAKNLSDAILLSDILRVNTEITKAPLSASMIKRYDEHHQDLTLLKALVRQQLPEKYKEIFFDQSKNGYAGYIDGGASQEEFYKFIKPILEKMDGTEELLVKLNREDLLRKQRTFDNGSIPHQIHLGELHAILRRQEDFYPFLKDNREKIEKILTFRIPYYVGPLARGNSRFAWMTRKSEETITPWNFEEVVDKGASAQSFIERMTNFDKNLPNEKVLPKHSLLYEYFTVYNELTKVKYVTEGMRKPAFLSGEQKKAIVDLLFKTNRKVTVKQLKEDYFKKIECFDSVEISGVEDRFNASLGTYHDLLKIIKDKDFLDNEENEDILEDIVLTLTLFEDREMIEERLKTYAHLFDDKVMKQLKRRRYTGWGRLSRKLINGIRDKQSGKTILDFLKSDGFANRNFMQLIHDDSLTFKEDIQKAQVSGQGDSLHEHIANLAGSPAIKKGILQTVKVVDELVKVMGRHKPENIVIEMARENQTTQKGQKNSRERMKRIEEGIKELGSQILKEHPVENTQLQNEKLYLYYLQNGRDMYVDQELDINRLSDYDVDHIVPQSFLKDDSIDNKVLTRSDKARGKSDNVPSEEVVKKMKNYWRQLLNAKLITQRKFDNLTKAERGGLSELDKAGFIKRQLVETRQITKHVAQILDSRMNTKYDENDKLIREVKVITLKSKLVSDFRKDFQFYKVREINNYHHAHDAYLNAVVGTALIKKYPKLESEFVYGDYKVYDVRKMIAKSEQEIGKATAKYFFYSNIMNFFKTEITLANGEIRKRPLIETNGETGEIVWDKGRDFATVRKVLSMPQVNIVKKTEVQTGGFSKESILPKRNSDKLIARKKDWDPKKYGGFDSPTVAYSVLVVAKVEKGKSKKLKSVKELLGITIMERSSFEKNPIDFLEAKGYKEVKKDLIIKLPKYSLFELENGRKRMLASAGELQKGNELALPSKYVNFLYLASHYEKLKGSPEDNEQKQLFVEQHKHYLDEIIEQISEFSKRVILADANLDKVLSAYNKHRDKPIREQAENIIHLFTLTNLGAPAAFKYFDTTIDRKRYTSTKEVLDATLIHQSITGLYETRIDLSQLGGDGGPAPGSSGGGGGMDPLQLLQPLEAEIKGTKLKAHWNSGATITCVPQAFLEEEVPIKNIWIKTIHGEKEQPVYYLTFKIQGRKVEAEVISSPYDYILVSPSDIPWLMKKPLQLTTLVPLQEYEERLLKQTMLTGSYKEKLQSLFLKYDALWQHWENQVGHRRIKPHHIATGTVNPRPQKQYPINPKAKASIQTVINDLLKQGVLIQQNSIMNTPVYPVPKPDGKWRMVLDYREVNKTIPLIAAQNQHSAGILSSIFRGKYKTTLDLSNGFWAHSITPESYWLTAFTWLGQQYCWTRLPQGFLNSPALFNADVVDLLKEVPNVQVYVDDIYISHDDPREHLEQLEKVFSLLLNAGYVVSLKKSEIAQHEVEFLGFNITKEGRGLTETFKQKLLNITPPRDLKQLQSILGLLNFARNFIPNFSELVKPLYNIIATAPGKYITWTTDNSQQLQNIISMLNSAENLEERNPEVRLIMKVNTSPSAGYIRFYNEFAKRPIMYLNYVYTKAEVKFTNTEKLLTTIHKGLIKALDLGMGQEILVYSPIVSMTKIQKTPLPERKALPIRWITWMSYLEDPRIQFHYDKTLPELQQVPTVTDDIIAKIKHPSEFSMVFYTDGSAIKHPNVNKSHNAGMGIAQVQFKPEFTVINTWSIPLGDHTAQLAEVAAVEFACKKALKIDGPVLIVTDSFYVAESVNKELPYWQSNGFFNNKKKPLKHVSKWKSIADCIQLKPDIIIIHEKGHQPTASTFHTEGNNLADKLATQGSYVVNAGKRTADGSEFEKRTADGSEFESPKKKAKVE

SEQ ID NO: 618 - protein, 2174 aa, synthetic construct
MPAAKRVKLDGGDKKYSIGLDIGTNSVGWAVITDEYKVPSKKFKVLGNTDRHSIKKNLIGALLFDSGETAEATRLKRTARRRYTRRKNRICYLQEIFSNEMAKVDDSFFHRLEESFLVEEDKKHERHPIFGNIVDEVAYHEKYPTIYHLRKKLVDSTDKADLRLIYLALAHMIKFRGHFLIEGDLNPDNSDVDKLFIQLVQTYNQLFEENPINASGVDAKAILSARLSKSRRLENLIAQLPGEKKNGLFGNLIALSLGLTPNFKSNFDLAEDAKLQLSKDTYDDDLDNLLAQIGDQYADLFLAAKNLSDAILLSDILRVNTEITKAPLSASMIKRYDEHHQDLTLLKALVRQQLPEKYKEIFFDQSKNGYAGYIDGGASQEEFYKFIKPILEKMDGTEELLVKLNREDLLRKQRTFDNGSIPHQIHLGELHAILRRQEDFYPFLKDNREKIEKILTFRIPYYVGPLARGNSRFAWMTRKSEETITPWNFEEVVDKGASAQSFIERMTNFDKNLPNEKVLPKHSLLYEYFTVYNELTKVKYVTEGMRKPAFLSGEQKKAIVDLLFKTNRKVTVKQLKEDYFKKIECFDSVEISGVEDRFNASLGTYHDLLKIIKDKDFLDNEENEDILEDIVLTLTLFEDREMIEERLKTYAHLFDDKVMKQLKRRRYTGWGRLSRKLINGIRDKQSGKTILDFLKSDGFANRNFMQLIHDDSLTFKEDIQKAQVSGQGDSLHEHIANLAGSPAIKKGILQTVKVVDELVKVMGRHKPENIVIEMARENQTTQKGQKNSRERMKRIEEGIKELGSQILKEHPVENTQLQNEKLYLYYLQNGRDMYVDQELDINRLSDYDVDHIVPQSFLKDDSIDNKVLTRSDKARGKSDNVPSEEVVKKMKNYWRQLLNAKLITQRKFDNLTKAERGGLSELDKAGFIKRQLVETRQITKHVAQILDSRMNTKYDENDKLIREVKVITLKSKLVSDFRKDFQFYKVREINNYHHAHDAYLNAVVGTALIKKYPKLESEFVYGDYKVYDVRKMIAKSEQEIGKATAKYFFYSNIMNFFKTEITLANGEIRKRPLIETNGETGEIVWDKGRDFATVRKVLSMPQVNIVKKTEVQTGGFSKESILPKRNSDKLIARKKDWDPKKYGGFDSPTVAYSVLVVAKVEKGKSKKLKSVKELLGITIMERSSFEKNPIDFLEAKGYKEVKKDLIIKLPKYSLFELENGRKRMLASAGELQKGNELALPSKYVNFLYLASHYEKLKGSPEDNEQKQLFVEQHKHYLDEIIEQISEFSKRVILADANLDKVLSAYNKHRDKPIREQAENIIHLFTLTNLGAPAAFKYFDTTIDRKRYTSTKEVLDATLIHQSITGLYETRIDLSQLGGDGGPAPGGSGGGGGMDPLQLLQPLEAEIKGTKLKAHWNSGATITCVPQAFLEEEVPIKNIWIKTIHGEKEQPVYYLTFKIQGRKVEAEVISSPYDYILVSPSDIPWLMKKPLQLTTLVPLQEYEERLLKQTMLTGSYKEKLQSLFLKYDALWQHWENQVGHRRIKPHHIATGTVNPRPQKQYPINPKAKASIQTVINDLLKQGVLIQQNSIMNTPVYPVPKPDGKWRMVLDYREVNKTIPLIAAQNQHSAGILSSIFRGKYKTTLDLSNGFWAHSITPESYWLTAFTWLGQQYCWTRLPQGFLNSPALFNADVVDLLKEVPNVQVYVDDIYISHDDPREHLEQLEKVFSLLLNAGYVVSLKKSEIAQHEVEFLGFNITKEGRGLTETFKQKLLNITPPRDLKQLQSILGLLNFARNFIPNFSELVKPLYNIIATAPGKYITWTTDNSQQLQNIISMLNSAENLEERNPEVRLIMKVNTSPSAGYIRFYNEFAKRPIMYLNYVYTKAEVKFTNTEKLLTTIHKGLIKALDLGMGQEILVYSPIVSMTKIQKTPLPERKALPIRWITWMSYLEDPRIQFHYDKTLPELQQVPTVTDDIIAKIKHPSEFSMVFYTDGSAIKHPNVNKSHNAGMGIAQVQFKPEFTVINTWSIPLGDHTAQLAEVAAVEFACKKALKIDGPVLIVTDSFYVAESVNKELPYWQSNGFFNNKKKPLKHVSKWKSIADCIQLKPDIIIIHEKGHQPTASTFHTEGNNLADKLATQGSYVVNAGKRTADGSEFEKRTADGSEFESPKKKAKVE

SEQ ID NO: 619 - protein, 2173 aa, synthetic construct
MPAAKRVKLDGGDKKYSIGLDIGTNSVGWAVITDEYKVPSKKFKVLGNTDRHSIKKNLIGALLFDSGETAEATRLKRTARRRYTRRKNRICYLQEIFSNEMAKVDDSFFHRLEESFLVEEDKKHERHPIFGNIVDEVAYHEKYPTIYHLRKKLVDSTDKADLRLIYLALAHMIKFRGHFLIEGDLNPDNSDVDKLFIQLVQTYNQLFEENPINASGVDAKAILSARLSKSRRLENLIAQLPGEKKNGLFGNLIALSLGLTPNFKSNFDLAEDAKLQLSKDTYDDDLDNLLAQIGDQYADLFLAAKNLSDAILLSDILRVNTEITKAPLSASMIKRYDEHHQDLTLLKALVRQQLPEKYKEIFFDQSKNGYAGYIDGGASQEEFYKFIKPILEKMDGTEELLVKLNREDLLRKQRTFDNGSIPHQIHLGELHAILRRQEDFYPFLKDNREKIEKILTFRIPYYVGPLARGNSRFAWMTRKSEETITPWNFEEVVDKGASAQSFIERMTNFDKNLPNEKVLPKHSLLYEYFTVYNELTKVKYVTEGMRKPAFLSGEQKKAIVDLLFKTNRKVTVKQLKEDYFKKIECFDSVEISGVEDRFNASLGTYHDLLKIIKDKDFLDNEENEDILEDIVLTLTLFEDREMIEERLKTYAHLFDDKVMKQLKRRRYTGWGRLSRKLINGIRDKQSGKTILDFLKSDGFANRNFMQLIHDDSLTFKEDIQKAQVSGQGDSLHEHIANLAGSPAIKKGILQTVKVVDELVKVMGRHKPENIVIEMARENQTTQKGQKNSRERMKRIEEGIKELGSQILKEHPVENTQLQNEKLYLYYLQNGRDMYVDQELDINRLSDYDVDHIVPQSFLKDDSIDNKVLTRSDKARGKSDNVPSEEVVKKMKNYWRQLLNAKLITQRKFDNLTKAERGGLSELDKAGFIKRQLVETRQITKHVAQILDSRMNTKYDENDKLIREVKVITLKSKLVSDFRKDFQFYKVREINNYHHAHDAYLNAVVGTALIKKYPKLESEFVYGDYKVYDVRKMIAKSEQEIGKATAKYFFYSNIMNFFKTEITLANGEIRKRPLIETNGETGEIVWDKGRDFATVRKVLSMPQVNIVKKTEVQTGGFSKESILPKRNSDKLIARKKDWDPKKYGGFDSPTVAYSVLVVAKVEKGKSKKLKSVKELLGITIMERSSFEKNPIDFLEAKGYKEVKKDLIIKLPKYSLFELENGRKRMLASAGELQKGNELALPSKYVNFLYLASHYEKLKGSPEDNEQKQLFVEQHKHYLDEIIEQISEFSKRVILADANLDKVLSAYNKHRDKPIREQAENIIHLFTLTNLGAPAAFKYFDTTIDRKRYTSTKEVLDATLIHQSITGLYETRIDLSQLGGDGGEAAAKPAPGGMDPLQLLQPLEAEIKGTKLKAHWNSGATITCVPQAFLEEEVPIKNIWIKTIHGEKEQPVYYLTFKIQGRKVEAEVISSPYDYILVSPSDIPWLMKKPLQLTTLVPLQEYEERLLKQTMLTGSYKEKLQSLFLKYDALWQHWENQVGHRRIKPHHIATGTVNPRPQKQYPINPKAKASIQTVINDLLKQGVLIQQNSIMNTPVYPVPKPDGKWRMVLDYREVNKTIPLIAAQNQHSAGILSSIFRGKYKTTLDLSNGFWAHSITPESYWLTAFTWLGQQYCWTRLPQGFLNSPALFNADVVDLLKEVPNVQVYVDDIYISHDDPREHLEQLEKVFSLLLNAGYVVSLKKSEIAQHEVEFLGFNITKEGRGLTETFKQKLLNITPPRDLKQLQSILGLLNFARNFIPNFSELVKPLYNIIATAPGKYITWTTDNSQQLQNIISMLNSAENLEERNPEVRLIMKVNTSPSAGYIRFYNEFAKRPIMYLNYVYTKAEVKFTNTEKLLTTIHKGLIKALDLGMGQEILVYSPIVSMTKIQKTPLPERKALPIRWITWMSYLEDPRIQFHYDKTLPELQQVPTVTDDIIAKIKHPSEFSMVFYTDGSAIKHPNVNKSHNAGMGIAQVQFKPEFTVINTWSIPLGDHTAQLAEVAAVEFACKKALKIDGPVLIVTDSFYVAESVNKELPYWQSNGFFNNKKKPLKHVSKWKSIADCIQLKPDIIIIHEKGHQPTASTFHTEGNNLADKLATQGSYVVNAGKRTADGSEFEKRTADGSEFESPKKKAKVE

SEQ ID NO: 620 - protein, 2176 aa, synthetic construct
MPAAKRVKLDGGDKKYSIGLDIGTNSVGWAVITDEYKVPSKKFKVLGNTDRHSIKKNLIGALLFDSGETAEATRLKRTARRRYTRRKNRICYLQEIFSNEMAKVDDSFFHRLEESFLVEEDKKHERHPIFGNIVDEVAYHEKYPTIYHLRKKLVDSTDKADLRLIYLALAHMIKFRGHFLIEGDLNPDNSDVDKLFIQLVQTYNQLFEENPINASGVDAKAILSARLSKSRRLENLIAQLPGEKKNGLFGNLIALSLGLTPNFKSNFDLAEDAKLQLSKDTYDDDLDNLLAQIGDQYADLFLAAKNLSDAILLSDILRVNTEITKAPLSASMIKRYDEHHQDLTLLKALVRQQLPEKYKEIFFDQSKNGYAGYIDGGASQEEFYKFIKPILEKMDGTEELLVKLNREDLLRKQRTFDNGSIPHQIHLGELHAILRRQEDFYPFLKDNREKIEKILTFRIPYYVGPLARGNSRFAWMTRKSEETITPWNFEEVVDKGASAQSFIERMTNFDKNLPNEKVLPKHSLLYEYFTVYNELTKVKYVTEGMRKPAFLSGEQKKAIVDLLFKTNRKVTVKQLKEDYFKKIECFDSVEISGVEDRFNASLGTYHDLLKIIKDKDFLDNEENEDILEDIVLTLTLFEDREMIEERLKTYAHLFDDKVMKQLKRRRYTGWGRLSRKLINGIRDKQSGKTILDFLKSDGFANRNFMQLIHDDSLTFKEDIQKAQVSGQGDSLHEHIANLAGSPAIKKGILQTVKVVDELVKVMGRHKPENIVIEMARENQTTQKGQKNSRERMKRIEEGIKELGSQILKEHPVENTQLQNEKLYLYYLQNGRDMYVDQELDINRLSDYDVDHIVPQSFLKDDSIDNKVLTRSDKARGKSDNVPSEEVVKKMKNYWRQLLNAKLITQRKFDNLTKAERGGLSELDKAGFIKRQLVETRQITKHVAQILDSRMNTKYDENDKLIREVKVITLKSKLVSDFRKDFQFYKVREINNYHHAHDAYLNAVVGTALIKKYPKLESEFVYGDYKVYDVRKMIAKSEQEIGKATAKYFFYSNIMNFFKTEITLANGEIRKRPLIETNGETGEIVWDKGRDFATVRKVLSMPQVNIVKKTEVQTGGFSKESILPKRNSDKLIARKKDWDPKKYGGFDSPTVAYSVLVVAKVEKGKSKKLKSVKELLGITIMERSSFEKNPIDFLEAKGYKEVKKDLIIKLPKYSLFELENGRKRMLASAGELQKGNELALPSKYVNFLYLASHYEKLKGSPEDNEQKQLFVEQHKHYLDEIIEQISEFSKRVILADANLDKVLSAYNKHRDKPIREQAENIIHLFTLTNLGAPAAFKYFDTTIDRKRYTSTKEVLDATLIHQSITGLYETRIDLSQLGGDGGGGGEAAAKGSSGGMDPLQLLQPLEAEIKGTKLKAHWNSGATITCVPQAFLEEEVPIKNIWIKTIHGEKEQPVYYLTFKIQGRKVEAEVISSPYDYILVSPSDIPWLMKKPLQLTTLVPLQEYEERLLKQTMLTGSYKEKLQSLFLKYDALWQHWENQVGHRRIKPHHIATGTVNPRPQKQYPINPKAKASIQTVINDLLKQGVLIQQNSIMNTPVYPVPKPDGKWRMVLDYREVNKTIPLIAAQNQHSAGILSSIFRGKYKTTLDLSNGFWAHSITPESYWLTAFTWLGQQYCWTRLPQGFLNSPALFNADVVDLLKEVPNVQVYVDDIYISHDDPREHLEQLEKVFSLLLNAGYVVSLKKSEIAQHEVEFLGFNITKEGRGLTETFKQKLLNITPPRDLKQLQSILGLLNFARNFIPNFSELVKPLYNIIATAPGKYITWTTDNSQQLQNIISMLNSAENLEERNPEVRLIMKVNTSPSAGYIRFYNEFAKRPIMYLNYVYTKAEVKFTNTEKLLTTIHKGLIKALDLGMGQEILVYSPIVSMTKIQKTPLPERKALPIRWITWMSYLEDPRIQFHYDKTLPELQQVPTVTDDIIAKIKHPSEFSMVFYTDGSAIKHPNVNKSHNAGMGIAQVQFKPEFTVINTWSIPLGDHTAQLAEVAAVEFACKKALKIDGPVLIVTDSFYVAESVNKELPYWQSNGFFNNKKKPLKHVSKWKSIADCIQLKPDIIIIHEKGHQPTASTFHTEGNNLADKLATQGSYVVNAGKRTADGSEFEKRTADGSEFESPKKKAKVE

SEQ ID NO: 621 - protein, 2176 aa, synthetic construct
MPAAKRVKLDGGDKKYSIGLDIGTNSVGWAVITDEYKVPSKKFKVLGNTDRHSIKKNLIGALLFDSGETAEATRLKRTARRRYTRRKNRICYLQEIFSNEMAKVDDSFFHRLEESFLVEEDKKHERHPIFGNIVDEVAYHEKYPTIYHLRKKLVDSTDKADLRLIYLALAHMIKFRGHFLIEGDLNPDNSDVDKLFIQLVQTYNQLFEENPINASGVDAKAILSARLSKSRRLENLIAQLPGEKKNGLFGNLIALSLGLTPNFKSNFDLAEDAKLQLSKDTYDDDLDNLLAQIGDQYADLFLAAKNLSDAILLSDILRVNTEITKAPLSASMIKRYDEHHQDLTLLKALVRQQLPEKYKEIFFDQSKNGYAGYIDGGASQEEFYKFIKPILEKMDGTEELLVKLNREDLLRKQRTFDNGSIPHQIHLGELHAILRRQEDFYPFLKDNREKIEKILTFRIPYYVGPLARGNSRFAWMTRKSEETITPWNFEEVVDKGASAQSFIERMTNFDKNLPNEKVLPKHSLLYEYFTVYNELTKVKYVTEGMRKPAFLSGEQKKAIVDLLFKTNRKVTVKQLKEDYFKKIECFDSVEISGVEDRFNASLGTYHDLLKIIKDKDFLDNEENEDILEDIVLTLTLFEDREMIEERLKTYAHLFDDKVMKQLKRRRYTGWGRLSRKLINGIRDKQSGKTILDFLKSDGFANRNFMQLIHDDSLTFKEDIQKAQVSGQGDSLHEHIANLAGSPAIKKGILQTVKVVDELVKVMGRHKPENIVIEMARENQTTQKGQKNSRERMKRIEEGIKELGSQILKEHPVENTQLQNEKLYLYYLQNGRDMYVDQELDINRLSDYDVDHIVPQSFLKDDSIDNKVLTRSDKARGKSDNVPSEEVVKKMKNYWRQLLNAKLITQRKFDNLTKAERGGLSELDKAGFIKRQLVETRQITKHVAQILDSRMNTKYDENDKLIREVKVITLKSKLVSDFRKDFQFYKVREINNYHHAHDAYLNAVVGTALIKKYPKLESEFVYGDYKVYDVRKMIAKSEQEIGKATAKYFFYSNIMNFFKTEITLANGEIRKRPLIETNGETGEIVWDKGRDFATVRKVLSMPQVNIVKKTEVQTGGFSKESILPKRNSDKLIARKKDWDPKKYGGFDSPTVAYSVLVVAKVEKGKSKKLKSVKELLGITIMERSSFEKNPIDFLEAKGYKEVKKDLIIKLPKYSLFELENGRKRMLASAGELQKGNELALPSKYVNFLYLASHYEKLKGSPEDNEQKQLFVEQHKHYLDEIIEQISEFSKRVILADANLDKVLSAYNKHRDKPIREQAENIIHLFTLTNLGAPAAFKYFDTTIDRKRYTSTKEVLDATLIHQSITGLYETRIDLSQLGGDGGGGGEAAAKPAPGGMDPLQLLQPLEAEIKGTKLKAHWNSGATITCVPQAFLEEEVPIKNIWIKTIHGEKEQPVYYLTFKIQGRKVEAEVISSPYDYILVSPSDIPWLMKKPLQLTTLVPLQEYEERLLKQTMLTGSYKEKLQSLFLKYDALWQHWENQVGHRRIKPHHIATGTVNPRPQKQYPINPKAKASIQTVINDLLKQGVLIQQNSIMNTPVYPVPKPDGKWRMVLDYREVNKTIPLIAAQNQHSAGILSSIFRGKYKTTLDLSNGFWAHSITPESYWLTAFTWLGQQYCWTRLPQGFLNSPALFNADVVDLLKEVPNVQVYVDDIYISHDDPREHLEQLEKVFSLLLNAGYVVSLKKSEIAQHEVEFLGFNITKEGRGLTETFKQKLLNITPPRDLKQLQSILGLLNFARNFIPNFSELVKPLYNIIATAPGKYITWTTDNSQQLQNIISMLNSAENLEERNPEVRLIMKVNTSPSAGYIRFYNEFAKRPIMYLNYVYTKAEVKFTNTEKLLTTIHKGLIKALDLGMGQEILVYSPIVSMTKIQKTPLPERKALPIRWITWMSYLEDPRIQFHYDKTLPELQQVPTVTDDIIAKIKHPSEFSMVFYTDGSAIKHPNVNKSHNAGMGIAQVQFKPEFTVINTWSIPLGDHTAQLAEVAAVEFACKKALKIDGPVLIVTDSFYVAESVNKELPYWQSNGFFNNKKKPLKHVSKWKSIADCIQLKPDIIIIHEKGHQPTASTFHTEGNNLADKLATQGSYVVNAGKRTADGSEFEKRTADGSEFESPKKKAKVE

SEQ ID NO: 622 - protein, 2176 aa, synthetic construct
MPAAKRVKLDGGDKKYSIGLDIGTNSVGWAVITDEYKVPSKKFKVLGNTDRHSIKKNLIGALLFDSGETAEATRLKRTARRRYTRRKNRICYLQEIFSNEMAKVDDSFFHRLEESFLVEEDKKHERHPIFGNIVDEVAYHEKYPTIYHLRKKLVDSTDKADLRLIYLALAHMIKFRGHFLIEGDLNPDNSDVDKLFIQLVQTYNQLFEENPINASGVDAKAILSARLSKSRRLENLIAQLPGEKKNGLFGNLIALSLGLTPNFKSNFDLAEDAKLQLSKDTYDDDLDNLLAQIGDQYADLFLAAKNLSDAILLSDILRVNTEITKAPLSASMIKRYDEHHQDLTLLKALVRQQLPEKYKEIFFDQSKNGYAGYIDGGASQEEFYKFIKPILEKMDGTEELLVKLNREDLLRKQRTFDNGSIPHQIHLGELHAILRRQEDFYPFLKDNREKIEKILTFRIPYYVGPLARGNSRFAWMTRKSEETITPWNFEEVVDKGASAQSFIERMTNFDKNLPNEKVLPKHSLLYEYFTVYNELTKVKYVTEGMRKPAFLSGEQKKAIVDLLFKTNRKVTVKQLKEDYFKKIECFDSVEISGVEDRFNASLGTYHDLLKIIKDKDFLDNEENEDILEDIVLTLTLFEDREMIEERLKTYAHLFDDKVMKQLKRRRYTGWGRLSRKLINGIRDKQSGKTILDFLKSDGFANRNFMQLIHDDSLTFKEDIQKAQVSGQGDSLHEHIANLAGSPAIKKGILQTVKVVDELVKVMGRHKPENIVIEMARENQTTQKGQKNSRERMKRIEEGIKELGSQILKEHPVENTQLQNEKLYLYYLQNGRDMYVDQELDINRLSDYDVDHIVPQSFLKDDSIDNKVLTRSDKARGKSDNVPSEEVVKKMKNYWRQLLNAKLITQRKFDNLTKAERGGLSELDKAGFIKRQLVETRQITKHVAQILDSRMNTKYDENDKLIREVKVITLKSKLVSDFRKDFQFYKVREINNYHHAHDAYLNAVVGTALIKKYPKLESEFVYGDYKVYDVRKMIAKSEQEIGKATAKYFFYSNIMNFFKTEITLANGEIRKRPLIETNGETGEIVWDKGRDFATVRKVLSMPQVNIVKKTEVQTGGFSKESILPKRNSDKLIARKKDWDPKKYGGFDSPTVAYSVLVVAKVEKGKSKKLKSVKELLGITIMERSSFEKNPIDFLEAKGYKEVKKDLIIKLPKYSLFELENGRKRMLASAGELQKGNELALPSKYVNFLYLASHYEKLKGSPEDNEQKQLFVEQHKHYLDEIIEQISEFSKRVILADANLDKVLSAYNKHRDKPIREQAENIIHLFTLTNLGAPAAFKYFDTTIDRKRYTSTKEVLDATLIHQSITGLYETRIDLSQLGGDGGPAPGGGEAAAKGGMDPLQLLQPLEAEIKGTKLKAHWNSGATITCVPQAFLEEEVPIKNIWIKTIHGEKEQPVYYLTFKIQGRKVEAEVISSPYDYILVSPSDIPWLMKKPLQLTTLVPLQEYEERLLKQTMLTGSYKEKLQSLFLKYDALWQHWENQVGHRRIKPHHIATGTVNPRPQKQYPINPKAKASIQTVINDLLKQGVLIQQNSIMNTPVYPVPKPDGKWRMVLDYREVNKTIPLIAAQNQHSAGILSSIFRGKYKTTLDLSNGFWAHSITPESYWLTAFTWLGQQYCWTRLPQGFLNSPALFNADVVDLLKEVPNVQVYVDDIYISHDDPREHLEQLEKVFSLLLNAGYVVSLKKSEIAQHEVEFLGFNITKEGRGLTETFKQKLLNITPPRDLKQLQSILGLLNFARNFIPNFSELVKPLYNIIATAPGKYITWTTDNSQQLQNIISMLNSAENLEERNPEVRLIMKVNTSPSAGYIRFYNEFAKRPIMYLNYVYTKAEVKFTNTEKLLTTIHKGLIKALDLGMGQEILVYSPIVSMTKIQKTPLPERKALPIRWITWMSYLEDPRIQFHYDKTLPELQQVPTVTDDIIAKIKHPSEFSMVFYTDGSAIKHPNVNKSHNAGMGIAQVQFKPEFTVINTWSIPLGDHTAQLAEVAAVEFACKKALKIDGPVLIVTDSFYVAESVNKELPYWQSNGFFNNKKKPLKHVSKWKSIADCIQLKPDIIIIHEKGHQPTASTFHTEGNNLADKLATQGSYVVNAGKRTADGSEFEKRTADGSEFESPKKKAKVE

SEQ ID NO: 623 - protein, 2168 aa, synthetic construct
MPAAKRVKLDGGDKKYSIGLDIGTNSVGWAVITDEYKVPSKKFKVLGNTDRHSIKKNLIGALLFDSGETAEATRLKRTARRRYTRRKNRICYLQEIFSNEMAKVDDSFFHRLEESFLVEEDKKHERHPIFGNIVDEVAYHEKYPTIYHLRKKLVDSTDKADLRLIYLALAHMIKFRGHFLIEGDLNPDNSDVDKLFIQLVQTYNQLFEENPINASGVDAKAILSARLSKSRRLENLIAQLPGEKKNGLFGNLIALSLGLTPNFKSNFDLAEDAKLQLSKDTYDDDLDNLLAQIGDQYADLFLAAKNLSDAILLSDILRVNTEITKAPLSASMIKRYDEHHQDLTLLKALVRQQLPEKYKEIFFDQSKNGYAGYIDGGASQEEFYKFIKPILEKMDGTEELLVKLNREDLLRKQRTFDNGSIPHQIHLGELHAILRRQEDFYPFLKDNREKIEKILTFRIPYYVGPLARGNSRFAWMTRKSEETITPWNFEEVVDKGASAQSFIERMTNFDKNLPNEKVLPKHSLLYEYFTVYNELTKVKYVTEGMRKPAFLSGEQKKAIVDLLFKTNRKVTVKQLKEDYFKKIECFDSVEISGVEDRFNASLGTYHDLLKIIKDKDFLDNEENEDILEDIVLTLTLFEDREMIEERLKTYAHLFDDKVMKQLKRRRYTGWGRLSRKLINGIRDKQSGKTILDFLKSDGFANRNFMQLIHDDSLTFKEDIQKAQVSGQGDSLHEHIANLAGSPAIKKGILQTVKVVDELVKVMGRHKPENIVIEMARENQTTQKGQKNSRERMKRIEEGIKELGSQILKEHPVENTQLQNEKLYLYYLQNGRDMYVDQELDINRLSDYDVDHIVPQSFLKDDSIDNKVLTRSDKARGKSDNVPSEEVVKKMKNYWRQLLNAKLITQRKFDNLTKAERGGLSELDKAGFIKRQLVETRQITKHVAQILDSRMNTKYDENDKLIREVKVITLKSKLVSDFRKDFQFYKVREINNYHHAHDAYLNAVVGTALIKKYPKLESEFVYGDYKVYDVRKMIAKSEQEIGKATAKYFFYSNIMNFFKTEITLANGEIRKRPLIETNGETGEIVWDKGRDFATVRKVLSMPQVNIVKKTEVQTGGFSKESILPKRNSDKLIARKKDWDPKKYGGFDSPTVAYSVLVVAKVEKGKSKKLKSVKELLGITIMERSSFEKNPIDFLEAKGYKEVKKDLIIKLPKYSLFELENGRKRMLASAGELQKGNELALPSKYVNFLYLASHYEKLKGSPEDNEQKQLFVEQHKHYLDEIIEQISEFSKRVILADANLDKVLSAYNKHRDKPIREQAENIIHLFTLTNLGAPAAFKYFDTTIDRKRYTSTKEVLDATLIHQSITGLYETRIDLSQLGGDGGGGGGGMDPLQLLQPLEAEIKGTKLKAHWNSGATITCVPQAFLEEEVPIKNIWIKTIHGEKEQPVYYLTFKIQGRKVEAEVISSPYDYILVSPSDIPWLMKKPLQLTTLVPLQEYEERLLKQTMLTGSYKEKLQSLFLKYDALWQHWENQVGHRRIKPHHIATGTVNPRPQKQYPINPKAKASIQTVINDLLKQGVLIQQNSIMNTPVYPVPKPDGKWRMVLDYREVNKTIPLIAAQNQHSAGILSSIFRGKYKTTLDLSNGFWAHSITPESYWLTAFTWLGQQYCWTRLPQGFLNSPALFNADVVDLLKEVPNVQVYVDDIYISHDDPREHLEQLEKVFSLLLNAGYVVSLKKSEIAQHEVEFLGFNITKEGRGLTETFKQKLLNITPPRDLKQLQSILGLLNFARNFIPNFSELVKPLYNIIATAPGKYITWTTDNSQQLQNIISMLNSAENLEERNPEVRLIMKVNTSPSAGYIRFYNEFAKRPIMYLNYVYTKAEVKFTNTEKLLTTIHKGLIKALDLGMGQEILVYSPIVSMTKIQKTPLPERKALPIRWITWMSYLEDPRIQFHYDKTLPELQQVPTVTDDIIAKIKHPSEFSMVFYTDGSAIKHPNVNKSHNAGMGIAQVQFKPEFTVINTWSIPLGDHTAQLAEVAAVEFACKKALKIDGPVLIVTDSFYVAESVNKELPYWQSNGFFNNKKKPLKHVSKWKSIADCIQLKPDIIIIHEKGHQPTASTFHTEGNNLADKLATQGSYVVNAGKRTADGSEFEKRTADGSEFESPKKKAKVE

SEQ ID NO: 624 - protein, 2180 aa, synthetic construct
MPAAKRVKLDGGDKKYSIGLDIGTNSVGWAVITDEYKVPSKKFKVLGNTDRHSIKKNLIGALLFDSGETAEATRLKRTARRRYTRRKNRICYLQEIFSNEMAKVDDSFFHRLEESFLVEEDKKHERHPIFGNIVDEVAYHEKYPTIYHLRKKLVDSTDKADLRLIYLALAHMIKFRGHFLIEGDLNPDNSDVDKLFIQLVQTYNQLFEENPINASGVDAKAILSARLSKSRRLENLIAQLPGEKKNGLFGNLIALSLGLTPNFKSNFDLAEDAKLQLSKDTYDDDLDNLLAQIGDQYADLFLAAKNLSDAILLSDILRVNTEITKAPLSASMIKRYDEHHQDLTLLKALVRQQLPEKYKEIFFDQSKNGYAGYIDGGASQEEFYKFIKPILEKMDGTEELLVKLNREDLLRKQRTFDNGSIPHQIHLGELHAILRRQEDFYPFLKDNREKIEKILTFRIPYYVGPLARGNSRFAWMTRKSEETITPWNFEEVVDKGASAQSFIERMTNFDKNLPNEKVLPKHSLLYEYFTVYNELTKVKYVTEGMRKPAFLSGEQKKAIVDLLFKTNRKVTVKQLKEDYFKKIECFDSVEISGVEDRFNASLGTYHDLLKIIKDKDFLDNEENEDILEDIVLTLTLFEDREMIEERLKTYAHLFDDKVMKQLKRRRYTGWGRLSRKLINGIRDKQSGKTILDFLKSDGFANRNFMQLIHDDSLTFKEDIQKAQVSGQGDSLHEHIANLAGSPAIKKGILQTVKVVDELVKVMGRHKPENIVIEMARENQTTQKGQKNSRERMKRIEEGIKELGSQILKEHPVENTQLQNEKLYLYYLQNGRDMYVDQELDINRLSDYDVDHIVPQSFLKDDSIDNKVLTRSDKARGKSDNVPSEEVVKKMKNYWRQLLNAKLITQRKFDNLTKAERGGLSELDKAGFIKRQLVETRQITKHVAQILDSRMNTKYDENDKLIREVKVITLKSKLVSDFRKDFQFYKVREINNYHHAHDAYLNAVVGTALIKKYPKLESEFVYGDYKVYDVRKMIAKSEQEIGKATAKYFFYSNIMNFFKTEITLANGEIRKRPLIETNGETGEIVWDKGRDFATVRKVLSMPQVNIVKKTEVQTGGFSKESILPKRNSDKLIARKKDWDPKKYGGFDSPTVAYSVLVVAKVEKGKSKKLKSVKELLGITIMERSSFEKNPIDFLEAKGYKEVKKDLIIKLPKYSLFELENGRKRMLASAGELQKGNELALPSKYVNFLYLASHYEKLKGSPEDNEQKQLFVEQHKHYLDEIIEQISEFSKRVILADANLDKVLSAYNKHRDKPIREQAENIIHLFTLTNLGAPAAFKYFDTTIDRKRYTSTKEVLDATLIHQSITGLYETRIDLSQLGGDGGEAAAKEAAAKEAAAKGGMDPLQLLQPLEAEIKGTKLKAHWNSGATITCVPQAFLEEEVPIKNIWIKTIHGEKEQPVYYLTFKIQGRKVEAEVISSPYDYILVSPSDIPWLMKKPLQLTTLVPLQEYEERLLKQTMLTGSYKEKLQSLFLKYDALWQHWENQVGHRRIKPHHIATGTVNPRPQKQYPINPKAKASIQTVINDLLKQGVLIQQNSIMNTPVYPVPKPDGKWRMVLDYREVNKTIPLIAAQNQHSAGILSSIFRGKYKTTLDLSNGFWAHSITPESYWLTAFTWLGQQYCWTRLPQGFLNSPALFNADVVDLLKEVPNVQVYVDDIYISHDDPREHLEQLEKVFSLLLNAGYVVSLKKSEIAQHEVEFLGFNITKEGRGLTETFKQKLLNITPPRDLKQLQSILGLLNFARNFIPNFSELVKPLYNIIATAPGKYITWTTDNSQQLQNIISMLNSAENLEERNPEVRLIMKVNTSPSAGYIRFYNEFAKRPIMYLNYVYTKAEVKFTNTEKLLTTIHKGLIKALDLGMGQEILVYSPIVSMTKIQKTPLPERKALPIRWITWMSYLEDPRIQFHYDKTLPELQQVPTVTDDIIAKIKHPSEFSMVFYTDGSAIKHPNVNKSHNAGMGIAQVQFKPEFTVINTWSIPLGDHTAQLAEVAAVEFACKKALKIDGPVLIVTDSFYVAESVNKELPYWQSNGFFNNKKKPLKHVSKWKSIADCIQLKPDIIIIHEKGHQPTASTFHTEGNNLADKLATQGSYVVNAGKRTADGSEFEKRTADGSEFESPKKKAKVE

SEQ ID NO: 625 - protein, 2173 aa, synthetic construct
MPAAKRVKLDGGDKKYSIGLDIGTNSVGWAVITDEYKVPSKKFKVLGNTDRHSIKKNLIGALLFDSGETAEATRLKRTARRRYTRRKNRICYLQEIFSNEMAKVDDSFFHRLEESFLVEEDKKHERHPIFGNIVDEVAYHEKYPTIYHLRKKLVDSTDKADLRLIYLALAHMIKFRGHFLIEGDLNPDNSDVDKLFIQLVQTYNQLFEENPINASGVDAKAILSARLSKSRRLENLIAQLPGEKKNGLFGNLIALSLGLTPNFKSNFDLAEDAKLQLSKDTYDDDLDNLLAQIGDQYADLFLAAKNLSDAILLSDILRVNTEITKAPLSASMIKRYDEHHQDLTLLKALVRQQLPEKYKEIFFDQSKNGYAGYIDGGASQEEFYKFIKPILEKMDGTEELLVKLNREDLLRKQRTFDNGSIPHQIHLGELHAILRRQEDFYPFLKDNREKIEKILTFRIPYYVGPLARGNSRFAWMTRKSEETITPWNFEEVVDKGASAQSFIERMTNFDKNLPNEKVLPKHSLLYEYFTVYNELTKVKYVTEGMRKPAFLSGEQKKAIVDLLFKTNRKVTVKQLKEDYFKKIECFDSVEISGVEDRFNASLGTYHDLLKIIKDKDFLDNEENEDILEDIVLTLTLFEDREMIEERLKTYAHLFDDKVMKQLKRRRYTGWGRLSRKLINGIRDKQSGKTILDFLKSDGFANRNFMQLIHDDSLTFKEDIQKAQVSGQGDSLHEHIANLAGSPAIKKGILQTVKVVDELVKVMGRHKPENIVIEMARENQTTQKGQKNSRERMKRIEEGIKELGSQILKEHPVENTQLQNEKLYLYYLQNGRDMYVDQELDINRLSDYDVDHIVPQSFLKDDSIDNKVLTRSDKARGKSDNVPSEEVVKKMKNYWRQLLNAKLITQRKFDNLTKAERGGLSELDKAGFIKRQLVETRQITKHVAQILDSRMNTKYDENDKLIREVKVITLKSKLVSDFRKDFQFYKVREINNYHHAHDAYLNAVVGTALIKKYPKLESEFVYGDYKVYDVRKMIAKSEQEIGKATAKYFFYSNIMNFFKTEITLANGEIRKRPLIETNGETGEIVWDKGRDFATVRKVLSMPQVNIVKKTEVQTGGFSKESILPKRNSDKLIARKKDWDPKKYGGFDSPTVAYSVLVVAKVEKGKSKKLKSVKELLGITIMERSSFEKNPIDFLEAKGYKEVKKDLIIKLPKYSLFELENGRKRMLASAGELQKGNELALPSKYVNFLYLASHYEKLKGSPEDNEQKQLFVEQHKHYLDEIIEQISEFSKRVILADANLDKVLSAYNKHRDKPIREQAENIIHLFTLTNLGAPAAFKYFDTTIDRKRYTSTKEVLDATLIHQSITGLYETRIDLSQLGGDGGEAAAKGGGGGMDPLQLLQPLEAEIKGTKLKAHWNSGATITCVPQAFLEEEVPIKNIWIKTIHGEKEQPVYYLTFKIQGRKVEAEVISSPYDYILVSPSDIPWLMKKPLQLTTLVPLQEYEERLLKQTMLTGSYKEKLQSLFLKYDALWQHWENQVGHRRIKPHHIATGTVNPRPQKQYPINPKAKASIQTVINDLLKQGVLIQQNSIMNTPVYPVPKPDGKWRMVLDYREVNKTIPLIAAQNQHSAGILSSIFRGKYKTTLDLSNGFWAHSITPESYWLTAFTWLGQQYCWTRLPQGFLNSPALFNADVVDLLKEVPNVQVYVDDIYISHDDPREHLEQLEKVFSLLLNAGYVVSLKKSEIAQHEVEFLGFNITKEGRGLTETFKQKLLNITPPRDLKQLQSILGLLNFARNFIPNFSELVKPLYNIIATAPGKYITWTTDNSQQLQNIISMLNSAENLEERNPEVRLIMKVNTSPSAGYIRFYNEFAKRPIMYLNYVYTKAEVKFTNTEKLLTTIHKGLIKALDLGMGQEILVYSPIVSMTKIQKTPLPERKALPIRWITWMSYLEDPRIQFHYDKTLPELQQVPTVTDDIIAKIKHPSEFSMVFYTDGSAIKHPNVNKSHNAGMGIAQVQFKPEFTVINTWSIPLGDHTAQLAEVAAVEFACKKALKIDGPVLIVTDSFYVAESVNKELPYWQSNGFFNNKKKPLKHVSKWKSIADCIQLKPDIIIIHEKGHQPTASTFHTEGNNLADKLATQGSYVVNAGKRTADGSEFEKRTADGSEFESPKKKAKVE

SEQ ID NO: 626 - protein, 2176 aa, synthetic construct
MPAAKRVKLDGGDKKYSIGLDIGTNSVGWAVITDEYKVPSKKFKVLGNTDRHSIKKNLIGALLFDSGETAEATRLKRTARRRYTRRKNRICYLQEIFSNEMAKVDDSFFHRLEESFLVEEDKKHERHPIFGNIVDEVAYHEKYPTIYHLRKKLVDSTDKADLRLIYLALAHMIKFRGHFLIEGDLNPDNSDVDKLFIQLVQTYNQLFEENPINASGVDAKAILSARLSKSRRLENLIAQLPGEKKNGLFGNLIALSLGLTPNFKSNFDLAEDAKLQLSKDTYDDDLDNLLAQIGDQYADLFLAAKNLSDAILLSDILRVNTEITKAPLSASMIKRYDEHHQDLTLLKALVRQQLPEKYKEIFFDQSKNGYAGYIDGGASQEEFYKFIKPILEKMDGTEELLVKLNREDLLRKQRTFDNGSIPHQIHLGELHAILRRQEDFYPFLKDNREKIEKILTFRIPYYVGPLARGNSRFAWMTRKSEETITPWNFEEVVDKGASAQSFIERMTNFDKNLPNEKVLPKHSLLYEYFTVYNELTKVKYVTEGMRKPAFLSGEQKKAIVDLLFKTNRKVTVKQLKEDYFKKIECFDSVEISGVEDRFNASLGTYHDLLKIIKDKDFLDNEENEDILEDIVLTLTLFEDREMIEERLKTYAHLFDDKVMKQLKRRRYTGWGRLSRKLINGIRDKQSGKTILDFLKSDGFANRNFMQLIHDDSLTFKEDIQKAQVSGQGDSLHEHIANLAGSPAIKKGILQTVKVVDELVKVMGRHKPENIVIEMARENQTTQKGQKNSRERMKRIEEGIKELGSQILKEHPVENTQLQNEKLYLYYLQNGRDMYVDQELDINRLSDYDVDHIVPQSFLKDDSIDNKVLTRSDKARGKSDNVPSEEVVKKMKNYWRQLLNAKLITQRKFDNLTKAERGGLSELDKAGFIKRQLVETRQITKHVAQILDSRMNTKYDENDKLIREVKVITLKSKLVSDFRKDFQFYKVREINNYHHAHDAYLNAVVGTALIKKYPKLESEFVYGDYKVYDVRKMIAKSEQEIGKATAKYFFYSNIMNFFKTEITLANGEIRKRPLIETNGETGEIVWDKGRDFATVRKVLSMPQVNIVKKTEVQTGGFSKESILPKRNSDKLIARKKDWDPKKYGGFDSPTVAYSVLVVAKVEKGKSKKLKSVKELLGITIMERSSFEKNPIDFLEAKGYKEVKKDLIIKLPKYSLFELENGRKRMLASAGELQKGNELALPSKYVNFLYLASHYEKLKGSPEDNEQKQLFVEQHKHYLDEIIEQISEFSKRVILADANLDKVLSAYNKHRDKPIREQAENIIHLFTLTNLGAPAAFKYFDTTIDRKRYTSTKEVLDATLIHQSITGLYETRIDLSQLGGDGGEAAAKGGGGGSGGMDPLQLLQPLEAEIKGTKLKAHWNSGATITCVPQAFLEEEVPIKNIWIKTIHGEKEQPVYYLTFKIQGRKVEAEVISSPYDYILVSPSDIPWLMKKPLQLTTLVPLQEYEERLLKQTMLTGSYKEKLQSLFLKYDALWQHWENQVGHRRIKPHHIATGTVNPRPQKQYPINPKAKASIQTVINDLLKQGVLIQQNSIMNTPVYPVPKPDGKWRMVLDYREVNKTIPLIAAQNQHSAGILSSIFRGKYKTTLDLSNGFWAHSITPESYWLTAFTWLGQQYCWTRLPQGFLNSPALFNADVVDLLKEVPNVQVYVDDIYISHDDPREHLEQLEKVFSLLLNAGYVVSLKKSEIAQHEVEFLGFNITKEGRGLTETFKQKLLNITPPRDLKQLQSILGLLNFARNFIPNFSELVKPLYNIIATAPGKYITWTTDNSQQLQNIISMLNSAENLEERNPEVRLIMKVNTSPSAGYIRFYNEFAKRPIMYLNYVYTKAEVKFTNTEKLLTTIHKGLIKALDLGMGQEILVYSPIVSMTKIQKTPLPERKALPIRWITWMSYLEDPRIQFHYDKTLPELQQVPTVTDDIIAKIKHPSEFSMVFYTDGSAIKHPNVNKSHNAGMGIAQVQFKPEFTVINTWSIPLGDHTAQLAEVAAVEFACKKALKIDGPVLIVTDSFYVAESVNKELPYWQSNGFFNNKKKPLKHVSKWKSIADCIQLKPDIIIIHEKGHQPTASTFHTEGNNLADKLATQGSYVVNAGKRTADGSEFEKRTADGSEFESPKKKAKVE

SEQ ID NO: 627 - protein, 2177 aa, synthetic construct
MPAAKRVKLDGGDKKYSIGLDIGTNSVGWAVITDEYKVPSKKFKVLGNTDRHSIKKNLIGALLFDSGETAEATRLKRTARRRYTRRKNRICYLQEIFSNEMAKVDDSFFHRLEESFLVEEDKKHERHPIFGNIVDEVAYHEKYPTIYHLRKKLVDSTDKADLRLIYLALAHMIKFRGHFLIEGDLNPDNSDVDKLFIQLVQTYNQLFEENPINASGVDAKAILSARLSKSRRLENLIAQLPGEKKNGLFGNLIALSLGLTPNFKSNFDLAEDAKLQLSKDTYDDDLDNLLAQIGDQYADLFLAAKNLSDAILLSDILRVNTEITKAPLSASMIKRYDEHHQDLTLLKALVRQQLPEKYKEIFFDQSKNGYAGYIDGGASQEEFYKFIKPILEKMDGTEELLVKLNREDLLRKQRTFDNGSIPHQIHLGELHAILRRQEDFYPFLKDNREKIEKILTFRIPYYVGPLARGNSRFAWMTRKSEETITPWNFEEVVDKGASAQSFIERMTNFDKNLPNEKVLPKHSLLYEYFTVYNELTKVKYVTEGMRKPAFLSGEQKKAIVDLLFKTNRKVTVKQLKEDYFKKIECFDSVEISGVEDRFNASLGTYHDLLKIIKDKDFLDNEENEDILEDIVLTLTLFEDREMIEERLKTYAHLFDDKVMKQLKRRRYTGWGRLSRKLINGIRDKQSGKTILDFLKSDGFANRNFMQLIHDDSLTFKEDIQKAQVSGQGDSLHEHIANLAGSPAIKKGILQTVKVVDELVKVMGRHKPENIVIEMARENQTTQKGQKNSRERMKRIEEGIKELGSQILKEHPVENTQLQNEKLYLYYLQNGRDMYVDQELDINRLSDYDVDHIVPQSFLKDDSIDNKVLTRSDKARGKSDNVPSEEVVKKMKNYWRQLLNAKLITQRKFDNLTKAERGGLSELDKAGFIKRQLVETRQITKHVAQILDSRMNTKYDENDKLIREVKVITLKSKLVSDFRKDFQFYKVREINNYHHAHDAYLNAVVGTALIKKYPKLESEFVYGDYKVYDVRKMIAKSEQEIGKATAKYFFYSNIMNFFKTEITLANGEIRKRPLIETNGETGEIVWDKGRDFATVRKVLSMPQVNIVKKTEVQTGGFSKESILPKRNSDKLIARKKDWDPKKYGGFDSPTVAYSVLVVAKVEKGKSKKLKSVKELLGITIMERSSFEKNPIDFLEAKGYKEVKKDLIIKLPKYSLFELENGRKRMLASAGELQKGNELALPSKYVNFLYLASHYEKLKGSPEDNEQKQLFVEQHKHYLDEIIEQISEFSKRVILADANLDKVLSAYNKHRDKPIREQAENIIHLFTLTNLGAPAAFKYFDTTIDRKRYTSTKEVLDATLIHQSITGLYETRIDLSQLGGDGGGSSGSSGSSGSSGGMDPLQLLQPLEAEIKGTKLKAHWNSGATITCVPQAFLEEEVPIKNIWIKTIHGEKEQPVYYLTFKIQGRKVEAEVISSPYDYILVSPSDIPWLMKKPLQLTTLVPLQEYEERLLKQTMLTGSYKEKLQSLFLKYDALWQHWENQVGHRRIKPHHIATGTVNPRPQKQYPINPKAKASIQTVINDLLKQGVLIQQNSIMNTPVYPVPKPDGKWRMVLDYREVNKTIPLIAAQNQHSAGILSSIFRGKYKTTLDLSNGFWAHSITPESYWLTAFTWLGQQYCWTRLPQGFLNSPALFNADVVDLLKEVPNVQVYVDDIYISHDDPREHLEQLEKVFSLLLNAGYVVSLKKSEIAQHEVEFLGFNITKEGRGLTETFKQKLLNITPPRDLKQLQSILGLLNFARNFIPNFSELVKPLYNIIATAPGKYITWTTDNSQQLQNIISMLNSAENLEERNPEVRLIMKVNTSPSAGYIRFYNEFAKRPIMYLNYVYTKAEVKFTNTEKLLTTIHKGLIKALDLGMGQEILVYSPIVSMTKIQKTPLPERKALPIRWITWMSYLEDPRIQFHYDKTLPELQQVPTVTDDIIAKIKHPSEFSMVFYTDGSAIKHPNVNKSHNAGMGIAQVQFKPEFTVINTWSIPLGDHTAQLAEVAAVEFACKKALKIDGPVLIVTDSFYVAESVNKELPYWQSNGFFNNKKKPLKHVSKWKSIADCIQLKPDIIIIHEKGHQPTASTFHTEGNNLADKLATQGSYVVNAGKRTADGSEFEKRTADGSEFESPKKKAKVE

SEQ ID NO: 628 - protein, 2176 aa, synthetic construct
MPAAKRVKLDGGDKKYSIGLDIGTNSVGWAVITDEYKVPSKKFKVLGNTDRHSIKKNLIGALLFDSGETAEATRLKRTARRRYTRRKNRICYLQEIFSNEMAKVDDSFFHRLEESFLVEEDKKHERHPIFGNIVDEVAYHEKYPTIYHLRKKLVDSTDKADLRLIYLALAHMIKFRGHFLIEGDLNPDNSDVDKLFIQLVQTYNQLFEENPINASGVDAKAILSARLSKSRRLENLIAQLPGEKKNGLFGNLIALSLGLTPNFKSNFDLAEDAKLQLSKDTYDDDLDNLLAQIGDQYADLFLAAKNLSDAILLSDILRVNTEITKAPLSASMIKRYDEHHQDLTLLKALVRQQLPEKYKEIFFDQSKNGYAGYIDGGASQEEFYKFIKPILEKMDGTEELLVKLNREDLLRKQRTFDNGSIPHQIHLGELHAILRRQEDFYPFLKDNREKIEKILTFRIPYYVGPLARGNSRFAWMTRKSEETITPWNFEEVVDKGASAQSFIERMTNFDKNLPNEKVLPKHSLLYEYFTVYNELTKVKYVTEGMRKPAFLSGEQKKAIVDLLFKTNRKVTVKQLKEDYFKKIECFDSVEISGVEDRFNASLGTYHDLLKIIKDKDFLDNEENEDILEDIVLTLTLFEDREMIEERLKTYAHLFDDKVMKQLKRRRYTGWGRLSRKLINGIRDKQSGKTILDFLKSDGFANRNFMQLIHDDSLTFKEDIQKAQVSGQGDSLHEHIANLAGSPAIKKGILQTVKVVDELVKVMGRHKPENIVIEMARENQTTQKGQKNSRERMKRIEEGIKELGSQILKEHPVENTQLQNEKLYLYYLQNGRDMYVDQELDINRLSDYDVDHIVPQSFLKDDSIDNKVLTRSDKARGKSDNVPSEEVVKKMKNYWRQLLNAKLITQRKFDNLTKAERGGLSELDKAGFIKRQLVETRQITKHVAQILDSRMNTKYDENDKLIREVKVITLKSKLVSDFRKDFQFYKVREINNYHHAHDAYLNAVVGTALIKKYPKLESEFVYGDYKVYDVRKMIAKSEQEIGKATAKYFFYSNIMNFFKTEITLANGEIRKRPLIETNGETGEIVWDKGRDFATVRKVLSMPQVNIVKKTEVQTGGFSKESILPKRNSDKLIARKKDWDPKKYGGFDSPTVAYSVLVVAKVEKGKSKKLKSVKELLGITIMERSSFEKNPIDFLEAKGYKEVKKDLIIKLPKYSLFELENGRKRMLASAGELQKGNELALPSKYVNFLYLASHYEKLKGSPEDNEQKQLFVEQHKHYLDEIIEQISEFSKRVILADANLDKVLSAYNKHRDKPIREQAENIIHLFTLTNLGAPAAFKYFDTTIDRKRYTSTKEVLDATLIHQSITGLYETRIDLSQLGGDGGGSSEAAAKGGSGGMDPLQLLQPLEAEIKGTKLKAHWNSGATITCVPQAFLEEEVPIKNIWIKTIHGEKEQPVYYLTFKIQGRKVEAEVISSPYDYILVSPSDIPWLMKKPLQLTTLVPLQEYEERLLKQTMLTGSYKEKLQSLFLKYDALWQHWENQVGHRRIKPHHIATGTVNPRPQKQYPINPKAKASIQTVINDLLKQGVLIQQNSIMNTPVYPVPKPDGKWRMVLDYREVNKTIPLIAAQNQHSAGILSSIFRGKYKTTLDLSNGFWAHSITPESYWLTAFTWLGQQYCWTRLPQGFLNSPALFNADVVDLLKEVPNVQVYVDDIYISHDDPREHLEQLEKVFSLLLNAGYVVSLKKSEIAQHEVEFLGFNITKEGRGLTETFKQKLLNITPPRDLKQLQSILGLLNFARNFIPNFSELVKPLYNIIATAPGKYITWTTDNSQQLQNIISMLNSAENLEERNPEVRLIMKVNTSPSAGYIRFYNEFAKRPIMYLNYVYTKAEVKFTNTEKLLTTIHKGLIKALDLGMGQEILVYSPIVSMTKIQKTPLPERKALPIRWITWMSYLEDPRIQFHYDKTLPELQQVPTVTDDIIAKIKHPSEFSMVFYTDGSAIKHPNVNKSHNAGMGIAQVQFKPEFTVINTWSIPLGDHTAQLAEVAAVEFACKKALKIDGPVLIVTDSFYVAESVNKELPYWQSNGFFNNKKKPLKHVSKWKSIADCIQLKPDIIIIHEKGHQPTASTFHTEGNNLADKLATQGSYVVNAGKRTADGSEFEKRTADGSEFESPKKKAKVE

SEQ ID NO: 629 - protein, 2176 aa, synthetic construct
MPAAKRVKLDGGDKKYSIGLDIGTNSVGWAVITDEYKVPSKKFKVLGNTDRHSIKKNLIGALLFDSGETAEATRLKRTARRRYTRRKNRICYLQEIFSNEMAKVDDSFFHRLEESFLVEEDKKHERHPIFGNIVDEVAYHEKYPTIYHLRKKLVDSTDKADLRLIYLALAHMIKFRGHFLIEGDLNPDNSDVDKLFIQLVQTYNQLFEENPINASGVDAKAILSARLSKSRRLENLIAQLPGEKKNGLFGNLIALSLGLTPNFKSNFDLAEDAKLQLSKDTYDDDLDNLLAQIGDQYADLFLAAKNLSDAILLSDILRVNTEITKAPLSASMIKRYDEHHQDLTLLKALVRQQLPEKYKEIFFDQSKNGYAGYIDGGASQEEFYKFIKPILEKMDGTEELLVKLNREDLLRKQRTFDNGSIPHQIHLGELHAILRRQEDFYPFLKDNREKIEKILTFRIPYYVGPLARGNSRFAWMTRKSEETITPWNFEEVVDKGASAQSFIERMTNFDKNLPNEKVLPKHSLLYEYFTVYNELTKVKYVTEGMRKPAFLSGEQKKAIVDLLFKTNRKVTVKQLKEDYFKKIECFDSVEISGVEDRFNASLGTYHDLLKIIKDKDFLDNEENEDILEDIVLTLTLFEDREMIEERLKTYAHLFDDKVMKQLKRRRYTGWGRLSRKLINGIRDKQSGKTILDFLKSDGFANRNFMQLIHDDSLTFKEDIQKAQVSGQGDSLHEHIANLAGSPAIKKGILQTVKVVDELVKVMGRHKPENIVIEMARENQTTQKGQKNSRERMKRIEEGIKELGSQILKEHPVENTQLQNEKLYLYYLQNGRDMYVDQELDINRLSDYDVDHIVPQSFLKDDSIDNKVLTRSDKARGKSDNVPSEEVVKKMKNYWRQLLNAKLITQRKFDNLTKAERGGLSELDKAGFIKRQLVETRQITKHVAQILDSRMNTKYDENDKLIREVKVITLKSKLVSDFRKDFQFYKVREINNYHHAHDAYLNAVVGTALIKKYPKLESEFVYGDYKVYDVRKMIAKSEQEIGKATAKYFFYSNIMNFFKTEITLANGEIRKRPLIETNGETGEIVWDKGRDFATVRKVLSMPQVNIVKKTEVQTGGFSKESILPKRNSDKLIARKKDWDPKKYGGFDSPTVAYSVLVVAKVEKGKSKKLKSVKELLGITIMERSSFEKNPIDFLEAKGYKEVKKDLIIKLPKYSLFELENGRKRMLASAGELQKGNELALPSKYVNFLYLASHYEKLKGSPEDNEQKQLFVEQHKHYLDEIIEQISEFSKRVILADANLDKVLSAYNKHRDKPIREQAENIIHLFTLTNLGAPAAFKYFDTTIDRKRYTSTKEVLDATLIHQSITGLYETRIDLSQLGGDGGEAAAKGGSPAPGGMDPLQLLQPLEAEIKGTKLKAHWNSGATITCVPQAFLEEEVPIKNIWIKTIHGEKEQPVYYLTFKIQGRKVEAEVISSPYDYILVSPSDIPWLMKKPLQLTTLVPLQEYEERLLKQTMLTGSYKEKLQSLFLKYDALWQHWENQVGHRRIKPHHIATGTVNPRPQKQYPINPKAKASIQTVINDLLKQGVLIQQNSIMNTPVYPVPKPDGKWRMVLDYREVNKTIPLIAAQNQHSAGILSSIFRGKYKTTLDLSNGFWAHSITPESYWLTAFTWLGQQYCWTRLPQGFLNSPALFNADVVDLLKEVPNVQVYVDDIYISHDDPREHLEQLEKVFSLLLNAGYVVSLKKSEIAQHEVEFLGFNITKEGRGLTETFKQKLLNITPPRDLKQLQSILGLLNFARNFIPNFSELVKPLYNIIATAPGKYITWTTDNSQQLQNIISMLNSAENLEERNPEVRLIMKVNTSPSAGYIRFYNEFAKRPIMYLNYVYTKAEVKFTNTEKLLTTIHKGLIKALDLGMGQEILVYSPIVSMTKIQKTPLPERKALPIRWITWMSYLEDPRIQFHYDKTLPELQQVPTVTDDIIAKIKHPSEFSMVFYTDGSAIKHPNVNKSHNAGMGIAQVQFKPEFTVINTWSIPLGDHTAQLAEVAAVEFACKKALKIDGPVLIVTDSFYVAESVNKELPYWQSNGFFNNKKKPLKHVSKWKSIADCIQLKPDIIIIHEKGHQPTASTFHTEGNNLADKLATQGSYVVNAGKRTADGSEFEKRTADGSEFESPKKKAKVE

SEQ ID NO: 630 - protein, 2176 aa, synthetic construct
MPAAKRVKLDGGDKKYSIGLDIGTNSVGWAVITDEYKVPSKKFKVLGNTDRHSIKKNLIGALLFDSGETAEATRLKRTARRRYTRRKNRICYLQEIFSNEMAKVDDSFFHRLEESFLVEEDKKHERHPIFGNIVDEVAYHEKYPTIYHLRKKLVDSTDKADLRLIYLALAHMIKFRGHFLIEGDLNPDNSDVDKLFIQLVQTYNQLFEENPINASGVDAKAILSARLSKSRRLENLIAQLPGEKKNGLFGNLIALSLGLTPNFKSNFDLAEDAKLQLSKDTYDDDLDNLLAQIGDQYADLFLAAKNLSDAILLSDILRVNTEITKAPLSASMIKRYDEHHQDLTLLKALVRQQLPEKYKEIFFDQSKNGYAGYIDGGASQEEFYKFIKPILEKMDGTEELLVKLNREDLLRKQRTFDNGSIPHQIHLGELHAILRRQEDFYPFLKDNREKIEKILTFRIPYYVGPLARGNSRFAWMTRKSEETITPWNFEEVVDKGASAQSFIERMTNFDKNLPNEKVLPKHSLLYEYFTVYNELTKVKYVTEGMRKPAFLSGEQKKAIVDLLFKTNRKVTVKQLKEDYFKKIECFDSVEISGVEDRFNASLGTYHDLLKIIKDKDFLDNEENEDILEDIVLTLTLFEDREMIEERLKTYAHLFDDKVMKQLKRRRYTGWGRLSRKLINGIRDKQSGKTILDFLKSDGFANRNFMQLIHDDSLTFKEDIQKAQVSGQGDSLHEHIANLAGSPAIKKGILQTVKVVDELVKVMGRHKPENIVIEMARENQTTQKGQKNSRERMKRIEEGIKELGSQILKEHPVENTQLQNEKLYLYYLQNGRDMYVDQELDINRLSDYDVDHIVPQSFLKDDSIDNKVLTRSDKARGKSDNVPSEEVVKKMKNYWRQLLNAKLITQRKFDNLTKAERGGLSELDKAGFIKRQLVETRQITKHVAQILDSRMNTKYDENDKLIREVKVITLKSKLVSDFRKDFQFYKVREINNYHHAHDAYLNAVVGTALIKKYPKLESEFVYGDYKVYDVRKMIAKSEQEIGKATAKYFFYSNIMNFFKTEITLANGEIRKRPLIETNGETGEIVWDKGRDFATVRKVLSMPQVNIVKKTEVQTGGFSKESILPKRNSDKLIARKKDWDPKKYGGFDSPTVAYSVLVVAKVEKGKSKKLKSVKELLGITIMERSSFEKNPIDFLEAKGYKEVKKDLIIKLPKYSLFELENGRKRMLASAGELQKGNELALPSKYVNFLYLASHYEKLKGSPEDNEQKQLFVEQHKHYLDEIIEQISEFSKRVILADANLDKVLSAYNKHRDKPIREQAENIIHLFTLTNLGAPAAFKYFDTTIDRKRYTSTKEVLDATLIHQSITGLYETRIDLSQLGGDGGGGGGGSEAAAKGGMDPLQLLQPLEAEIKGTKLKAHWNSGATITCVPQAFLEEEVPIKNIWIKTIHGEKEQPVYYLTFKIQGRKVEAEVISSPYDYILVSPSDIPWLMKKPLQLTTLVPLQEYEERLLKQTMLTGSYKEKLQSLFLKYDALWQHWENQVGHRRIKPHHIATGTVNPRPQKQYPINPKAKASIQTVINDLLKQGVLIQQNSIMNTPVYPVPKPDGKWRMVLDYREVNKTIPLIAAQNQHSAGILSSIFRGKYKTTLDLSNGFWAHSITPESYWLTAFTWLGQQYCWTRLPQGFLNSPALFNADVVDLLKEVPNVQVYVDDIYISHDDPREHLEQLEKVFSLLLNAGYVVSLKKSEIAQHEVEFLGFNITKEGRGLTETFKQKLLNITPPRDLKQLQSILGLLNFARNFIPNFSELVKPLYNIIATAPGKYITWTTDNSQQLQNIISMLNSAENLEERNPEVRLIMKVNTSPSAGYIRFYNEFAKRPIMYLNYVYTKAEVKFTNTEKLLTTIHKGLIKALDLGMGQEILVYSPIVSMTKIQKTPLPERKALPIRWITWMSYLEDPRIQFHYDKTLPELQQVPTVTDDIIAKIKHPSEFSMVFYTDGSAIKHPNVNKSHNAGMGIAQVQFKPEFTVINTWSIPLGDHTAQLAEVAAVEFACKKALKIDGPVLIVTDSFYVAESVNKELPYWQSNGFFNNKKKPLKHVSKWKSIADCIQLKPDIIIIHEKGHQPTASTFHTEGNNLADKLATQGSYVVNAGKRTADGSEFEKRTADGSEFESPKKKAKVE

SEQ ID NO: 631 - protein, 2174 aa, synthetic construct
MPAAKRVKLDGGDKKYSIGLDIGTNSVGWAVITDEYKVPSKKFKVLGNTDRHSIKKNLIGALLFDSGETAEATRLKRTARRRYTRRKNRICYLQEIFSNEMAKVDDSFFHRLEESFLVEEDKKHERHPIFGNIVDEVAYHEKYPTIYHLRKKLVDSTDKADLRLIYLALAHMIKFRGHFLIEGDLNPDNSDVDKLFIQLVQTYNQLFEENPINASGVDAKAILSARLSKSRRLENLIAQLPGEKKNGLFGNLIALSLGLTPNFKSNFDLAEDAKLQLSKDTYDDDLDNLLAQIGDQYADLFLAAKNLSDAILLSDILRVNTEITKAPLSASMIKRYDEHHQDLTLLKALVRQQLPEKYKEIFFDQSKNGYAGYIDGGASQEEFYKFIKPILEKMDGTEELLVKLNREDLLRKQRTFDNGSIPHQIHLGELHAILRRQEDFYPFLKDNREKIEKILTFRIPYYVGPLARGNSRFAWMTRKSEETITPWNFEEVVDKGASAQSFIERMTNFDKNLPNEKVLPKHSLLYEYFTVYNELTKVKYVTEGMRKPAFLSGEQKKAIVDLLFKTNRKVTVKQLKEDYFKKIECFDSVEISGVEDRFNASLGTYHDLLKIIKDKDFLDNEENEDILEDIVLTLTLFEDREMIEERLKTYAHLFDDKVMKQLKRRRYTGWGRLSRKLINGIRDKQSGKTILDFLKSDGFANRNFMQLIHDDSLTFKEDIQKAQVSGQGDSLHEHIANLAGSPAIKKGILQTVKVVDELVKVMGRHKPENIVIEMARENQTTQKGQKNSRERMKRIEEGIKELGSQILKEHPVENTQLQNEKLYLYYLQNGRDMYVDQELDINRLSDYDVDHIVPQSFLKDDSIDNKVLTRSDKARGKSDNVPSEEVVKKMKNYWRQLLNAKLITQRKFDNLTKAERGGLSELDKAGFIKRQLVETRQITKHVAQILDSRMNTKYDENDKLIREVKVITLKSKLVSDFRKDFQFYKVREINNYHHAHDAYLNAVVGTALIKKYPKLESEFVYGDYKVYDVRKMIAKSEQEIGKATAKYFFYSNIMNFFKTEITLANGEIRKRPLIETNGETGEIVWDKGRDFATVRKVLSMPQVNIVKKTEVQTGGFSKESILPKRNSDKLIARKKDWDPKKYGGFDSPTVAYSVLVVAKVEKGKSKKLKSVKELLGITIMERSSFEKNPIDFLEAKGYKEVKKDLIIKLPKYSLFELENGRKRMLASAGELQKGNELALPSKYVNFLYLASHYEKLKGSPEDNEQKQLFVEQHKHYLDEIIEQISEFSKRVILADANLDKVLSAYNKHRDKPIREQAENIIHLFTLTNLGAPAAFKYFDTTIDRKRYTSTKEVLDATLIHQSITGLYETRIDLSQLGGDGGGGGGSSPAPGGMDPLQLLQPLEAEIKGTKLKAHWNSGATITCVPQAFLEEEVPIKNIWIKTIHGEKEQPVYYLTFKIQGRKVEAEVISSPYDYILVSPSDIPWLMKKPLQLTTLVPLQEYEERLLKQTMLTGSYKEKLQSLFLKYDALWQHWENQVGHRRIKPHHIATGTVNPRPQKQYPINPKAKASIQTVINDLLKQGVLIQQNSIMNTPVYPVPKPDGKWRMVLDYREVNKTIPLIAAQNQHSAGILSSIFRGKYKTTLDLSNGFWAHSITPESYWLTAFTWLGQQYCWTRLPQGFLNSPALFNADVVDLLKEVPNVQVYVDDIYISHDDPREHLEQLEKVFSLLLNAGYVVSLKKSEIAQHEVEFLGFNITKEGRGLTETFKQKLLNITPPRDLKQLQSILGLLNFARNFIPNFSELVKPLYNIIATAPGKYITWTTDNSQQLQNIISMLNSAENLEERNPEVRLIMKVNTSPSAGYIRFYNEFAKRPIMYLNYVYTKAEVKFTNTEKLLTTIHKGLIKALDLGMGQEILVYSPIVSMTKIQKTPLPERKALPIRWITWMSYLEDPRIQFHYDKTLPELQQVPTVTDDIIAKIKHPSEFSMVFYTDGSAIKHPNVNKSHNAGMGIAQVQFKPEFTVINTWSIPLGDHTAQLAEVAAVEFACKKALKIDGPVLIVTDSFYVAESVNKELPYWQSNGFFNNKKKPLKHVSKWKSIADCIQLKPDIIIIHEKGHQPTASTFHTEGNNLADKLATQGSYVVNAGKRTADGSEFEKRTADGSEFESPKKKAKVE

SEQ ID NO: 632 - protein, 2176 aa, synthetic construct
MPAAKRVKLDGGDKKYSIGLDIGTNSVGWAVITDEYKVPSKKFKVLGNTDRHSIKKNLIGALLFDSGETAEATRLKRTARRRYTRRKNRICYLQEIFSNEMAKVDDSFFHRLEESFLVEEDKKHERHPIFGNIVDEVAYHEKYPTIYHLRKKLVDSTDKADLRLIYLALAHMIKFRGHFLIEGDLNPDNSDVDKLFIQLVQTYNQLFEENPINASGVDAKAILSARLSKSRRLENLIAQLPGEKKNGLFGNLIALSLGLTPNFKSNFDLAEDAKLQLSKDTYDDDLDNLLAQIGDQYADLFLAAKNLSDAILLSDILRVNTEITKAPLSASMIKRYDEHHQDLTLLKALVRQQLPEKYKEIFFDQSKNGYAGYIDGGASQEEFYKFIKPILEKMDGTEELLVKLNREDLLRKQRTFDNGSIPHQIHLGELHAILRRQEDFYPFLKDNREKIEKILTFRIPYYVGPLARGNSRFAWMTRKSEETITPWNFEEVVDKGASAQSFIERMTNFDKNLPNEKVLPKHSLLYEYFTVYNELTKVKYVTEGMRKPAFLSGEQKKAIVDLLFKTNRKVTVKQLKEDYFKKIECFDSVEISGVEDRFNASLGTYHDLLKIIKDKDFLDNEENEDILEDIVLTLTLFEDREMIEERLKTYAHLFDDKVMKQLKRRRYTGWGRLSRKLINGIRDKQSGKTILDFLKSDGFANRNFMQLIHDDSLTFKEDIQKAQVSGQGDSLHEHIANLAGSPAIKKGILQTVKVVDELVKVMGRHKPENIVIEMARENQTTQKGQKNSRERMKRIEEGIKELGSQILKEHPVENTQLQNEKLYLYYLQNGRDMYVDQELDINRLSDYDVDHIVPQSFLKDDSIDNKVLTRSDKARGKSDNVPSEEVVKKMKNYWRQLLNAKLITQRKFDNLTKAERGGLSELDKAGFIKRQLVETRQITKHVAQILDSRMNTKYDENDKLIREVKVITLKSKLVSDFRKDFQFYKVREINNYHHAHDAYLNAVVGTALIKKYPKLESEFVYGDYKVYDVRKMIAKSEQEIGKATAKYFFYSNIMNFFKTEITLANGEIRKRPLIETNGETGEIVWDKGRDFATVRKVLSMPQVNIVKKTEVQTGGFSKESILPKRNSDKLIARKKDWDPKKYGGFDSPTVAYSVLVVAKVEKGKSKKLKSVKELLGITIMERSSFEKNPIDFLEAKGYKEVKKDLIIKLPKYSLFELENGRKRMLASAGELQKGNELALPSKYVNFLYLASHYEKLKGSPEDNEQKQLFVEQHKHYLDEIIEQISEFSKRVILADANLDKVLSAYNKHRDKPIREQAENIIHLFTLTNLGAPAAFKYFDTTIDRKRYTSTKEVLDATLIHQSITGLYETRIDLSQLGGDGGEAAAKPAPGSSGGMDPLQLLQPLEAEIKGTKLKAHWNSGATITCVPQAFLEEEVPIKNIWIKTIHGEKEQPVYYLTFKIQGRKVEAEVISSPYDYILVSPSDIPWLMKKPLQLTTLVPLQEYEERLLKQTMLTGSYKEKLQSLFLKYDALWQHWENQVGHRRIKPHHIATGTVNPRPQKQYPINPKAKASIQTVINDLLKQGVLIQQNSIMNTPVYPVPKPDGKWRMVLDYREVNKTIPLIAAQNQHSAGILSSIFRGKYKTTLDLSNGFWAHSITPESYWLTAFTWLGQQYCWTRLPQGFLNSPALFNADVVDLLKEVPNVQVYVDDIYISHDDPREHLEQLEKVFSLLLNAGYVVSLKKSEIAQHEVEFLGFNITKEGRGLTETFKQKLLNITPPRDLKQLQSILGLLNFARNFIPNFSELVKPLYNIIATAPGKYITWTTDNSQQLQNIISMLNSAENLEERNPEVRLIMKVNTSPSAGYIRFYNEFAKRPIMYLNYVYTKAEVKFTNTEKLLTTIHKGLIKALDLGMGQEILVYSPIVSMTKIQKTPLPERKALPIRWITWMSYLEDPRIQFHYDKTLPELQQVPTVTDDIIAKIKHPSEFSMVFYTDGSAIKHPNVNKSHNAGMGIAQVQFKPEFTVINTWSIPLGDHTAQLAEVAAVEFACKKALKIDGPVLIVTDSFYVAESVNKELPYWQSNGFFNNKKKPLKHVSKWKSIADCIQLKPDIIIIHEKGHQPTASTFHTEGNNLADKLATQGSYVVNAGKRTADGSEFEKRTADGSEFESPKKKAKVE

SEQ ID NO: 633 - protein, 2176 aa, synthetic construct
MPAAKRVKLDGGDKKYSIGLDIGTNSVGWAVITDEYKVPSKKFKVLGNTDRHSIKKNLIGALLFDSGETAEATRLKRTARRRYTRRKNRICYLQEIFSNEMAKVDDSFFHRLEESFLVEEDKKHERHPIFGNIVDEVAYHEKYPTIYHLRKKLVDSTDKADLRLIYLALAHMIKFRGHFLIEGDLNPDNSDVDKLFIQLVQTYNQLFEENPINASGVDAKAILSARLSKSRRLENLIAQLPGEKKNGLFGNLIALSLGLTPNFKSNFDLAEDAKLQLSKDTYDDDLDNLLAQIGDQYADLFLAAKNLSDAILLSDILRVNTEITKAPLSASMIKRYDEHHQDLTLLKALVRQQLPEKYKEIFFDQSKNGYAGYIDGGASQEEFYKFIKPILEKMDGTEELLVKLNREDLLRKQRTFDNGSIPHQIHLGELHAILRRQEDFYPFLKDNREKIEKILTFRIPYYVGPLARGNSRFAWMTRKSEETITPWNFEEVVDKGASAQSFIERMTNFDKNLPNEKVLPKHSLLYEYFTVYNELTKVKYVTEGMRKPAFLSGEQKKAIVDLLFKTNRKVTVKQLKEDYFKKIECFDSVEISGVEDRFNASLGTYHDLLKIIKDKDFLDNEENEDILEDIVLTLTLFEDREMIEERLKTYAHLFDDKVMKQLKRRRYTGWGRLSRKLINGIRDKQSGKTILDFLKSDGFANRNFMQLIHDDSLTFKEDIQKAQVSGQGDSLHEHIANLAGSPAIKKGILQTVKVVDELVKVMGRHKPENIVIEMARENQTTQKGQKNSRERMKRIEEGIKELGSQILKEHPVENTQLQNEKLYLYYLQNGRDMYVDQELDINRLSDYDVDHIVPQSFLKDDSIDNKVLTRSDKARGKSDNVPSEEVVKKMKNYWRQLLNAKLITQRKFDNLTKAERGGLSELDKAGFIKRQLVETRQITKHVAQILDSRMNTKYDENDKLIREVKVITLKSKLVSDFRKDFQFYKVREINNYHHAHDAYLNAVVGTALIKKYPKLESEFVYGDYKVYDVRKMIAKSEQEIGKATAKYFFYSNIMNFFKTEITLANGEIRKRPLIETNGETGEIVWDKGRDFATVRKVLSMPQVNIVKKTEVQTGGFSKESILPKRNSDKLIARKKDWDPKKYGGFDSPTVAYSVLVVAKVEKGKSKKLKSVKELLGITIMERSSFEKNPIDFLEAKGYKEVKKDLIIKLPKYSLFELENGRKRMLASAGELQKGNELALPSKYVNFLYLASHYEKLKGSPEDNEQKQLFVEQHKHYLDEIIEQISEFSKRVILADANLDKVLSAYNKHRDKPIREQAENIIHLFTLTNLGAPAAFKYFDTTIDRKRYTSTKEVLDATLIHQSITGLYETRIDLSQLGGDGGGGSPAPEAAAKGGMDPLQLLQPLEAEIKGTKLKAHWNSGATITCVPQAFLEEEVPIKNIWIKTIHGEKEQPVYYLTFKIQGRKVEAEVISSPYDYILVSPSDIPWLMKKPLQLTTLVPLQEYEERLLKQTMLTGSYKEKLQSLFLKYDALWQHWENQVGHRRIKPHHIATGTVNPRPQKQYPINPKAKASIQTVINDLLKQGVLIQQNSIMNTPVYPVPKPDGKWRMVLDYREVNKTIPLIAAQNQHSAGILSSIFRGKYKTTLDLSNGFWAHSITPESYWLTAFTWLGQQYCWTRLPQGFLNSPALFNADVVDLLKEVPNVQVYVDDIYISHDDPREHLEQLEKVFSLLLNAGYVVSLKKSEIAQHEVEFLGFNITKEGRGLTETFKQKLLNITPPRDLKQLQSILGLLNFARNFIPNFSELVKPLYNIIATAPGKYITWTTDNSQQLQNIISMLNSAENLEERNPEVRLIMKVNTSPSAGYIRFYNEFAKRPIMYLNYVYTKAEVKFTNTEKLLTTIHKGLIKALDLGMGQEILVYSPIVSMTKIQKTPLPERKALPIRWITWMSYLEDPRIQFHYDKTLPELQQVPTVTDDIIAKIKHPSEFSMVFYTDGSAIKHPNVNKSHNAGMGIAQVQFKPEFTVINTWSIPLGDHTAQLAEVAAVEFACKKALKIDGPVLIVTDSFYVAESVNKELPYWQSNGFFNNKKKPLKHVSKWKSIADCIQLKPDIIIIHEKGHQPTASTFHTEGNNLADKLATQGSYVVNAGKRTADGSEFEKRTADGSEFESPKKKAKVE

SEQ ID NO: 634 - protein, 2174 aa, synthetic construct
MPAAKRVKLDGGDKKYSIGLDIGTNSVGWAVITDEYKVPSKKFKVLGNTDRHSIKKNLIGALLFDSGETAEATRLKRTARRRYTRRKNRICYLQEIFSNEMAKVDDSFFHRLEESFLVEEDKKHERHPIFGNIVDEVAYHEKYPTIYHLRKKLVDSTDKADLRLIYLALAHMIKFRGHFLIEGDLNPDNSDVDKLFIQLVQTYNQLFEENPINASGVDAKAILSARLSKSRRLENLIAQLPGEKKNGLFGNLIALSLGLTPNFKSNFDLAEDAKLQLSKDTYDDDLDNLLAQIGDQYADLFLAAKNLSDAILLSDILRVNTEITKAPLSASMIKRYDEHHQDLTLLKALVRQQLPEKYKEIFFDQSKNGYAGYIDGGASQEEFYKFIKPILEKMDGTEELLVKLNREDLLRKQRTFDNGSIPHQIHLGELHAILRRQEDFYPFLKDNREKIEKILTFRIPYYVGPLARGNSRFAWMTRKSEETITPWNFEEVVDKGASAQSFIERMTNFDKNLPNEKVLPKHSLLYEYFTVYNELTKVKYVTEGMRKPAFLSGEQKKAIVDLLFKTNRKVTVKQLKEDYFKKIECFDSVEISGVEDRFNASLGTYHDLLKIIKDKDFLDNEENEDILEDIVLTLTLFEDREMIEERLKTYAHLFDDKVMKQLKRRRYTGWGRLSRKLINGIRDKQSGKTILDFLKSDGFANRNFMQLIHDDSLTFKEDIQKAQVSGQGDSLHEHIANLAGSPAIKKGILQTVKVVDELVKVMGRHKPENIVIEMARENQTTQKGQKNSRERMKRIEEGIKELGSQILKEHPVENTQLQNEKLYLYYLQNGRDMYVDQELDINRLSDYDVDHIVPQSFLKDDSIDNKVLTRSDKARGKSDNVPSEEVVKKMKNYWRQLLNAKLITQRKFDNLTKAERGGLSELDKAGFIKRQLVETRQITKHVAQILDSRMNTKYDENDKLIREVKVITLKSKLVSDFRKDFQFYKVREINNYHHAHDAYLNAVVGTALIKKYPKLESEFVYGDYKVYDVRKMIAKSEQEIGKATAKYFFYSNIMNFFKTEITLANGEIRKRPLIETNGETGEIVWDKGRDFATVRKVLSMPQVNIVKKTEVQTGGFSKESILPKRNSDKLIARKKDWDPKKYGGFDSPTVAYSVLVVAKVEKGKSKKLKSVKELLGITIMERSSFEKNPIDFLEAKGYKEVKKDLIIKLPKYSLFELENGRKRMLASAGELQKGNELALPSKYVNFLYLASHYEKLKGSPEDNEQKQLFVEQHKHYLDEIIEQISEFSKRVILADANLDKVLSAYNKHRDKPIREQAENIIHLFTLTNLGAPAAFKYFDTTIDRKRYTSTKEVLDATLIHQSITGLYETRIDLSQLGGDGGGGGPAPGSSGGMDPLQLLQPLEAEIKGTKLKAHWNSGATITCVPQAFLEEEVPIKNIWIKTIHGEKEQPVYYLTFKIQGRKVEAEVISSPYDYILVSPSDIPWLMKKPLQLTTLVPLQEYEERLLKQTMLTGSYKEKLQSLFLKYDALWQHWENQVGHRRIKPHHIATGTVNPRPQKQYPINPKAKASIQTVINDLLKQGVLIQQNSIMNTPVYPVPKPDGKWRMVLDYREVNKTIPLIAAQNQHSAGILSSIFRGKYKTTLDLSNGFWAHSITPESYWLTAFTWLGQQYCWTRLPQGFLNSPALFNADVVDLLKEVPNVQVYVDDIYISHDDPREHLEQLEKVFSLLLNAGYVVSLKKSEIAQHEVEFLGFNITKEGRGLTETFKQKLLNITPPRDLKQLQSILGLLNFARNFIPNFSELVKPLYNIIATAPGKYITWTTDNSQQLQNIISMLNSAENLEERNPEVRLIMKVNTSPSAGYIRFYNEFAKRPIMYLNYVYTKAEVKFTNTEKLLTTIHKGLIKALDLGMGQEILVYSPIVSMTKIQKTPLPERKALPIRWITWMSYLEDPRIQFHYDKTLPELQQVPTVTDDIIAKIKHPSEFSMVFYTDGSAIKHPNVNKSHNAGMGIAQVQFKPEFTVINTWSIPLGDHTAQLAEVAAVEFACKKALKIDGPVLIVTDSFYVAESVNKELPYWQSNGFFNNKKKPLKHVSKWKSIADCIQLKPDIIIIHEKGHQPTASTFHTEGNNLADKLATQGSYVVNAGKRTADGSEFEKRTADGSEFESPKKKAKVE

SEQ ID NO: 635 - protein, 2174 aa, synthetic construct
MPAAKRVKLDGGDKKYSIGLDIGTNSVGWAVITDEYKVPSKKFKVLGNTDRHSIKKNLIGALLFDSGETAEATRLKRTARRRYTRRKNRICYLQEIFSNEMAKVDDSFFHRLEESFLVEEDKKHERHPIFGNIVDEVAYHEKYPTIYHLRKKLVDSTDKADLRLIYLALAHMIKFRGHFLIEGDLNPDNSDVDKLFIQLVQTYNQLFEENPINASGVDAKAILSARLSKSRRLENLIAQLPGEKKNGLFGNLIALSLGLTPNFKSNFDLAEDAKLQLSKDTYDDDLDNLLAQIGDQYADLFLAAKNLSDAILLSDILRVNTEITKAPLSASMIKRYDEHHQDLTLLKALVRQQLPEKYKEIFFDQSKNGYAGYIDGGASQEEFYKFIKPILEKMDGTEELLVKLNREDLLRKQRTFDNGSIPHQIHLGELHAILRRQEDFYPFLKDNREKIEKILTFRIPYYVGPLARGNSRFAWMTRKSEETITPWNFEEVVDKGASAQSFIERMTNFDKNLPNEKVLPKHSLLYEYFTVYNELTKVKYVTEGMRKPAFLSGEQKKAIVDLLFKTNRKVTVKQLKEDYFKKIECFDSVEISGVEDRFNASLGTYHDLLKIIKDKDFLDNEENEDILEDIVLTLTLFEDREMIEERLKTYAHLFDDKVMKQLKRRRYTGWGRLSRKLINGIRDKQSGKTILDFLKSDGFANRNFMQLIHDDSLTFKEDIQKAQVSGQGDSLHEHIANLAGSPAIKKGILQTVKVVDELVKVMGRHKPENIVIEMARENQTTQKGQKNSRERMKRIEEGIKELGSQILKEHPVENTQLQNEKLYLYYLQNGRDMYVDQELDINRLSDYDVDHIVPQSFLKDDSIDNKVLTRSDKARGKSDNVPSEEVVKKMKNYWRQLLNAKLITQRKFDNLTKAERGGLSELDKAGFIKRQLVETRQITKHVAQILDSRMNTKYDENDKLIREVKVITLKSKLVSDFRKDFQFYKVREINNYHHAHDAYLNAVVGTALIKKYPKLESEFVYGDYKVYDVRKMIAKSEQEIGKATAKYFFYSNIMNFFKTEITLANGEIRKRPLIETNGETGEIVWDKGRDFATVRKVLSMPQVNIVKKTEVQTGGFSKESILPKRNSDKLIARKKDWDPKKYGGFDSPTVAYSVLVVAKVEKGKSKKLKSVKELLGITIMERSSFEKNPIDFLEAKGYKEVKKDLIIKLPKYSLFELENGRKRMLASAGELQKGNELALPSKYVNFLYLASHYEKLKGSPEDNEQKQLFVEQHKHYLDEIIEQISEFSKRVILADANLDKVLSAYNKHRDKPIREQAENIIHLFTLTNLGAPAAFKYFDTTIDRKRYTSTKEVLDATLIHQSITGLYETRIDLSQLGGDGGGGSGSSPAPGGMDPLQLLQPLEAEIKGTKLKAHWNSGATITCVPQAFLEEEVPIKNIWIKTIHGEKEQPVYYLTFKIQGRKVEAEVISSPYDYILVSPSDIPWLMKKPLQLTTLVPLQEYEERLLKQTMLTGSYKEKLQSLFLKYDALWQHWENQVGHRRIKPHHIATGTVNPRPQKQYPINPKAKASIQTVINDLLKQGVLIQQNSIMNTPVYPVPKPDGKWRMVLDYREVNKTIPLIAAQNQHSAGILSSIFRGKYKTTLDLSNGFWAHSITPESYWLTAFTWLGQQYCWTRLPQGFLNSPALFNADVVDLLKEVPNVQVYVDDIYISHDDPREHLEQLEKVFSLLLNAGYVVSLKKSEIAQHEVEFLGFNITKEGRGLTETFKQKLLNITPPRDLKQLQSILGLLNFARNFIPNFSELVKPLYNIIATAPGKYITWTTDNSQQLQNIISMLNSAENLEERNPEVRLIMKVNTSPSAGYIRFYNEFAKRPIMYLNYVYTKAEVKFTNTEKLLTTIHKGLIKALDLGMGQEILVYSPIVSMTKIQKTPLPERKALPIRWITWMSYLEDPRIQFHYDKTLPELQQVPTVTDDIIAKIKHPSEFSMVFYTDGSAIKHPNVNKSHNAGMGIAQVQFKPEFTVINTWSIPLGDHTAQLAEVAAVEFACKKALKIDGPVLIVTDSFYVAESVNKELPYWQSNGFFNNKKKPLKHVSKWKSIADCIQLKPDIIIIHEKGHQPTASTFHTEGNNLADKLATQGSYVVNAGKRTADGSEFEKRTADGSEFESPKKKAKVE

SEQ ID NO: 636 - protein, 2176 aa, synthetic construct
MPAAKRVKLDGGDKKYSIGLDIGTNSVGWAVITDEYKVPSKKFKVLGNTDRHSIKKNLIGALLFDSGETAEATRLKRTARRRYTRRKNRICYLQEIFSNEMAKVDDSFFHRLEESFLVEEDKKHERHPIFGNIVDEVAYHEKYPTIYHLRKKLVDSTDKADLRLIYLALAHMIKFRGHFLIEGDLNPDNSDVDKLFIQLVQTYNQLFEENPINASGVDAKAILSARLSKSRRLENLIAQLPGEKKNGLFGNLIALSLGLTPNFKSNFDLAEDAKLQLSKDTYDDDLDNLLAQIGDQYADLFLAAKNLSDAILLSDILRVNTEITKAPLSASMIKRYDEHHQDLTLLKALVRQQLPEKYKEIFFDQSKNGYAGYIDGGASQEEFYKFIKPILEKMDGTEELLVKLNREDLLRKQRTFDNGSIPHQIHLGELHAILRRQEDFYPFLKDNREKIEKILTFRIPYYVGPLARGNSRFAWMTRKSEETITPWNFEEVVDKGASAQSFIERMTNFDKNLPNEKVLPKHSLLYEYFTVYNELTKVKYVTEGMRKPAFLSGEQKKAIVDLLFKTNRKVTVKQLKEDYFKKIECFDSVEISGVEDRFNASLGTYHDLLKIIKDKDFLDNEENEDILEDIVLTLTLFEDREMIEERLKTYAHLFDDKVMKQLKRRRYTGWGRLSRKLINGIRDKQSGKTILDFLKSDGFANRNFMQLIHDDSLTFKEDIQKAQVSGQGDSLHEHIANLAGSPAIKKGILQTVKVVDELVKVMGRHKPENIVIEMARENQTTQKGQKNSRERMKRIEEGIKELGSQILKEHPVENTQLQNEKLYLYYLQNGRDMYVDQELDINRLSDYDVDHIVPQSFLKDDSIDNKVLTRSDKARGKSDNVPSEEVVKKMKNYWRQLLNAKLITQRKFDNLTKAERGGLSELDKAGFIKRQLVETRQITKHVAQILDSRMNTKYDENDKLIREVKVITLKSKLVSDFRKDFQFYKVREINNYHHAHDAYLNAVVGTALIKKYPKLESEFVYGDYKVYDVRKMIAKSEQEIGKATAKYFFYSNIMNFFKTEITLANGEIRKRPLIETNGETGEIVWDKGRDFATVRKVLSMPQVNIVKKTEVQTGGFSKESILPKRNSDKLIARKKDWDPKKYGGFDSPTVAYSVLVVAKVEKGKSKKLKSVKELLGITIMERSSFEKNPIDFLEAKGYKEVKKDLIIKLPKYSLFELENGRKRMLASAGELQKGNELALPSKYVNFLYLASHYEKLKGSPEDNEQKQLFVEQHKHYLDEIIEQISEFSKRVILADANLDKVLSAYNKHRDKPIREQAENIIHLFTLTNLGAPAAFKYFDTTIDRKRYTSTKEVLDATLIHQSITGLYETRIDLSQLGGDGGEAAAKGGGPAPGGMDPLQLLQPLEAEIKGTKLKAHWNSGATITCVPQAFLEEEVPIKNIWIKTIHGEKEQPVYYLTFKIQGRKVEAEVISSPYDYILVSPSDIPWLMKKPLQLTTLVPLQEYEERLLKQTMLTGSYKEKLQSLFLKYDALWQHWENQVGHRRIKPHHIATGTVNPRPQKQYPINPKAKASIQTVINDLLKQGVLIQQNSIMNTPVYPVPKPDGKWRMVLDYREVNKTIPLIAAQNQHSAGILSSIFRGKYKTTLDLSNGFWAHSITPESYWLTAFTWLGQQYCWTRLPQGFLNSPALFNADVVDLLKEVPNVQVYVDDIYISHDDPREHLEQLEKVFSLLLNAGYVVSLKKSEIAQHEVEFLGFNITKEGRGLTETFKQKLLNITPPRDLKQLQSILGLLNFARNFIPNFSELVKPLYNIIATAPGKYITWTTDNSQQLQNIISMLNSAENLEERNPEVRLIMKVNTSPSAGYIRFYNEFAKRPIMYLNYVYTKAEVKFTNTEKLLTTIHKGLIKALDLGMGQEILVYSPIVSMTKIQKTPLPERKALPIRWITWMSYLEDPRIQFHYDKTLPELQQVPTVTDDIIAKIKHPSEFSMVFYTDGSAIKHPNVNKSHNAGMGIAQVQFKPEFTVINTWSIPLGDHTAQLAEVAAVEFACKKALKIDGPVLIVTDSFYVAESVNKELPYWQSNGFFNNKKKPLKHVSKWKSIADCIQLKPDIIIIHEKGHQPTASTFHTEGNNLADKLATQGSYVVNAGKRTADGSEFEKRTADGSEFESPKKKAKVE

SEQ ID NO: 637 - protein, 2180 aa, synthetic construct
MPAAKRVKLDGGDKKYSIGLDIGTNSVGWAVITDEYKVPSKKFKVLGNTDRHSIKKNLIGALLFDSGETAEATRLKRTARRRYTRRKNRICYLQEIFSNEMAKVDDSFFHRLEESFLVEEDKKHERHPIFGNIVDEVAYHEKYPTIYHLRKKLVDSTDKADLRLIYLALAHMIKFRGHFLIEGDLNPDNSDVDKLFIQLVQTYNQLFEENPINASGVDAKAILSARLSKSRRLENLIAQLPGEKKNGLFGNLIALSLGLTPNFKSNFDLAEDAKLQLSKDTYDDDLDNLLAQIGDQYADLFLAAKNLSDAILLSDILRVNTEITKAPLSASMIKRYDEHHQDLTLLKALVRQQLPEKYKEIFFDQSKNGYAGYIDGGASQEEFYKFIKPILEKMDGTEELLVKLNREDLLRKQRTFDNGSIPHQIHLGELHAILRRQEDFYPFLKDNREKIEKILTFRIPYYVGPLARGNSRFAWMTRKSEETITPWNFEEVVDKGASAQSFIERMTNFDKNLPNEKVLPKHSLLYEYFTVYNELTKVKYVTEGMRKPAFLSGEQKKAIVDLLFKTNRKVTVKQLKEDYFKKIECFDSVEISGVEDRFNASLGTYHDLLKIIKDKDFLDNEENEDILEDIVLTLTLFEDREMIEERLKTYAHLFDDKVMKQLKRRRYTGWGRLSRKLINGIRDKQSGKTILDFLKSDGFANRNFMQLIHDDSLTFKEDIQKAQVSGQGDSLHEHIANLAGSPAIKKGILQTVKVVDELVKVMGRHKPENIVIEMARENQTTQKGQKNSRERMKRIEEGIKELGSQILKEHPVENTQLQNEKLYLYYLQNGRDMYVDQELDINRLSDYDVDHIVPQSFLKDDSIDNKVLTRSDKARGKSDNVPSEEVVKKMKNYWRQLLNAKLITQRKFDNLTKAERGGLSELDKAGFIKRQLVETRQITKHVAQILDSRMNTKYDENDKLIREVKVITLKSKLVSDFRKDFQFYKVREINNYHHAHDAYLNAVVGTALIKKYPKLESEFVYGDYKVYDVRKMIAKSEQEIGKATAKYFFYSNIMNFFKTEITLANGEIRKRPLIETNGETGEIVWDKGRDFATVRKVLSMPQVNIVKKTEVQTGGFSKESILPKRNSDKLIARKKDWDPKKYGGFDSPTVAYSVLVVAKVEKGKSKKLKSVKELLGITIMERSSFEKNPIDFLEAKGYKEVKKDLIIKLPKYSLFELENGRKRMLASAGELQKGNELALPSKYVNFLYLASHYEKLKGSPEDNEQKQLFVEQHKHYLDEIIEQISEFSKRVILADANLDKVLSAYNKHRDKPIREQAENIIHLFTLTNLGAPAAFKYFDTTIDRKRYTSTKEVLDATLIHQSITGLYETRIDLSQLGGDGGGSSGSSGSSGSSGSSGGMDPLQLLQPLEAEIKGTKLKAHWNSGATITCVPQAFLEEEVPIKNIWIKTIHGEKEQPVYYLTFKIQGRKVEAEVISSPYDYILVSPSDIPWLMKKPLQLTTLVPLQEYEERLLKQTMLTGSYKEKLQSLFLKYDALWQHWENQVGHRRIKPHHIATGTVNPRPQKQYPINPKAKASIQTVINDLLKQGVLIQQNSIMNTPVYPVPKPDGKWRMVLDYREVNKTIPLIAAQNQHSAGILSSIFRGKYKTTLDLSNGFWAHSITPESYWLTAFTWLGQQYCWTRLPQGFLNSPALFNADVVDLLKEVPNVQVYVDDIYISHDDPREHLEQLEKVFSLLLNAGYVVSLKKSEIAQHEVEFLGFNITKEGRGLTETFKQKLLNITPPRDLKQLQSILGLLNFARNFIPNFSELVKPLYNIIATAPGKYITWTTDNSQQLQNIISMLNSAENLEERNPEVRLIMKVNTSPSAGYIRFYNEFAKRPIMYLNYVYTKAEVKFTNTEKLLTTIHKGLIKALDLGMGQEILVYSPIVSMTKIQKTPLPERKALPIRWITWMSYLEDPRIQFHYDKTLPELQQVPTVTDDIIAKIKHPSEFSMVFYTDGSAIKHPNVNKSHNAGMGIAQVQFKPEFTVINTWSIPLGDHTAQLAEVAAVEFACKKALKIDGPVLIVTDSFYVAESVNKELPYWQSNGFFNNKKKPLKHVSKWKSIADCIQLKPDIIIIHEKGHQPTASTFHTEGNNLADKLATQGSYVVNAGKRTADGSEFEKRTADGSEFESPKKKAKVE

SEQ ID NO: 638 - protein, 2173 aa, synthetic construct
MPAAKRVKLDGGDKKYSIGLDIGTNSVGWAVITDEYKVPSKKFKVLGNTDRHSIKKNLIGALLFDSGETAEATRLKRTARRRYTRRKNRICYLQEIFSNEMAKVDDSFFHRLEESFLVEEDKKHERHPIFGNIVDEVAYHEKYPTIYHLRKKLVDSTDKADLRLIYLALAHMIKFRGHFLIEGDLNPDNSDVDKLFIQLVQTYNQLFEENPINASGVDAKAILSARLSKSRRLENLIAQLPGEKKNGLFGNLIALSLGLTPNFKSNFDLAEDAKLQLSKDTYDDDLDNLLAQIGDQYADLFLAAKNLSDAILLSDILRVNTEITKAPLSASMIKRYDEHHQDLTLLKALVRQQLPEKYKEIFFDQSKNGYAGYIDGGASQEEFYKFIKPILEKMDGTEELLVKLNREDLLRKQRTFDNGSIPHQIHLGELHAILRRQEDFYPFLKDNREKIEKILTFRIPYYVGPLARGNSRFAWMTRKSEETITPWNFEEVVDKGASAQSFIERMTNFDKNLPNEKVLPKHSLLYEYFTVYNELTKVKYVTEGMRKPAFLSGEQKKAIVDLLFKTNRKVTVKQLKEDYFKKIECFDSVEISGVEDRFNASLGTYHDLLKIIKDKDFLDNEENEDILEDIVLTLTLFEDREMIEERLKTYAHLFDDKVMKQLKRRRYTGWGRLSRKLINGIRDKQSGKTILDFLKSDGFANRNFMQLIHDDSLTFKEDIQKAQVSGQGDSLHEHIANLAGSPAIKKGILQTVKVVDELVKVMGRHKPENIVIEMARENQTTQKGQKNSRERMKRIEEGIKELGSQILKEHPVENTQLQNEKLYLYYLQNGRDMYVDQELDINRLSDYDVDHIVPQSFLKDDSIDNKVLTRSDKARGKSDNVPSEEVVKKMKNYWRQLLNAKLITQRKFDNLTKAERGGLSELDKAGFIKRQLVETRQITKHVAQILDSRMNTKYDENDKLIREVKVITLKSKLVSDFRKDFQFYKVREINNYHHAHDAYLNAVVGTALIKKYPKLESEFVYGDYKVYDVRKMIAKSEQEIGKATAKYFFYSNIMNFFKTEITLANGEIRKRPLIETNGETGEIVWDKGRDFATVRKVLSMPQVNIVKKTEVQTGGFSKESILPKRNSDKLIARKKDWDPKKYGGFDSPTVAYSVLVVAKVEKGKSKKLKSVKELLGITIMERSSFEKNPIDFLEAKGYKEVKKDLIIKLPKYSLFELENGRKRMLASAGELQKGNELALPSKYVNFLYLASHYEKLKGSPEDNEQKQLFVEQHKHYLDEIIEQISEFSKRVILADANLDKVLSAYNKHRDKPIREQAENIIHLFTLTNLGAPAAFKYFDTTIDRKRYTSTKEVLDATLIHQSITGLYETRIDLSQLGGDGGEAAAKGSSGGMDPLQLLQPLEAEIKGTKLKAHWNSGATITCVPQAFLEEEVPIKNIWIKTIHGEKEQPVYYLTFKIQGRKVEAEVISSPYDYILVSPSDIPWLMKKPLQLTTLVPLQEYEERLLKQTMLTGSYKEKLQSLFLKYDALWQHWENQVGHRRIKPHHIATGTVNPRPQKQYPINPKAKASIQTVINDLLKQGVLIQQNSIMNTPVYPVPKPDGKWRMVLDYREVNKTIPLIAAQNQHSAGILSSIFRGKYKTTLDLSNGFWAHSITPESYWLTAFTWLGQQYCWTRLPQGFLNSPALFNADVVDLLKEVPNVQVYVDDIYISHDDPREHLEQLEKVFSLLLNAGYVVSLKKSEIAQHEVEFLGFNITKEGRGLTETFKQKLLNITPPRDLKQLQSILGLLNFARNFIPNFSELVKPLYNIIATAPGKYITWTTDNSQQLQNIISMLNSAENLEERNPEVRLIMKVNTSPSAGYIRFYNEFAKRPIMYLNYVYTKAEVKFTNTEKLLTTIHKGLIKALDLGMGQEILVYSPIVSMTKIQKTPLPERKALPIRWITWMSYLEDPRIQFHYDKTLPELQQVPTVTDDIIAKIKHPSEFSMVFYTDGSAIKHPNVNKSHNAGMGIAQVQFKPEFTVINTWSIPLGDHTAQLAEVAAVEFACKKALKIDGPVLIVTDSFYVAESVNKELPYWQSNGFFNNKKKPLKHVSKWKSIADCIQLKPDIIIIHEKGHQPTASTFHTEGNNLADKLATQGSYVVNAGKRTADGSEFEKRTADGSEFESPKKKAKVE

SEQ ID NO: 639 - protein, 2172 aa, synthetic construct
MPAAKRVKLDGGDKKYSIGLDIGTNSVGWAVITDEYKVPSKKFKVLGNTDRHSIKKNLIGALLFDSGETAEATRLKRTARRRYTRRKNRICYLQEIFSNEMAKVDDSFFHRLEESFLVEEDKKHERHPIFGNIVDEVAYHEKYPTIYHLRKKLVDSTDKADLRLIYLALAHMIKFRGHFLIEGDLNPDNSDVDKLFIQLVQTYNQLFEENPINASGVDAKAILSARLSKSRRLENLIAQLPGEKKNGLFGNLIALSLGLTPNFKSNFDLAEDAKLQLSKDTYDDDLDNLLAQIGDQYADLFLAAKNLSDAILLSDILRVNTEITKAPLSASMIKRYDEHHQDLTLLKALVRQQLPEKYKEIFFDQSKNGYAGYIDGGASQEEFYKFIKPILEKMDGTEELLVKLNREDLLRKQRTFDNGSIPHQIHLGELHAILRRQEDFYPFLKDNREKIEKILTFRIPYYVGPLARGNSRFAWMTRKSEETITPWNFEEVVDKGASAQSFIERMTNFDKNLPNEKVLPKHSLLYEYFTVYNELTKVKYVTEGMRKPAFLSGEQKKAIVDLLFKTNRKVTVKQLKEDYFKKIECFDSVEISGVEDRFNASLGTYHDLLKIIKDKDFLDNEENEDILEDIVLTLTLFEDREMIEERLKTYAHLFDDKVMKQLKRRRYTGWGRLSRKLINGIRDKQSGKTILDFLKSDGFANRNFMQLIHDDSLTFKEDIQKAQVSGQGDSLHEHIANLAGSPAIKKGILQTVKVVDELVKVMGRHKPENIVIEMARENQTTQKGQKNSRERMKRIEEGIKELGSQILKEHPVENTQLQNEKLYLYYLQNGRDMYVDQELDINRLSDYDVDHIVPQSFLKDDSIDNKVLTRSDKARGKSDNVPSEEVVKKMKNYWRQLLNAKLITQRKFDNLTKAERGGLSELDKAGFIKRQLVETRQITKHVAQILDSRMNTKYDENDKLIREVKVITLKSKLVSDFRKDFQFYKVREINNYHHAHDAYLNAVVGTALIKKYPKLESEFVYGDYKVYDVRKMIAKSEQEIGKATAKYFFYSNIMNFFKTEITLANGEIRKRPLIETNGETGEIVWDKGRDFATVRKVLSMPQVNIVKKTEVQTGGFSKESILPKRNSDKLIARKKDWDPKKYGGFDSPTVAYSVLVVAKVEKGKSKKLKSVKELLGITIMERSSFEKNPIDFLEAKGYKEVKKDLIIKLPKYSLFELENGRKRMLASAGELQKGNELALPSKYVNFLYLASHYEKLKGSPEDNEQKQLFVEQHKHYLDEIIEQISEFSKRVILADANLDKVLSAYNKHRDKPIREQAENIIHLFTLTNLGAPAAFKYFDTTIDRKRYTSTKEVLDATLIHQSITGLYETRIDLSQLGGDGGGGGGGGGGGMDPLQLLQPLEAEIKGTKLKAHWNSGATITCVPQAFLEEEVPIKNIWIKTIHGEKEQPVYYLTFKIQGRKVEAEVISSPYDYILVSPSDIPWLMKKPLQLTTLVPLQEYEERLLKQTMLTGSYKEKLQSLFLKYDALWQHWENQVGHRRIKPHHIATGTVNPRPQKQYPINPKAKASIQTVINDLLKQGVLIQQNSIMNTPVYPVPKPDGKWRMVLDYREVNKTIPLIAAQNQHSAGILSSIFRGKYKTTLDLSNGFWAHSITPESYWLTAFTWLGQQYCWTRLPQGFLNSPALFNADVVDLLKEVPNVQVYVDDIYISHDDPREHLEQLEKVFSLLLNAGYVVSLKKSEIAQHEVEFLGFNITKEGRGLTETFKQKLLNITPPRDLKQLQSILGLLNFARNFIPNFSELVKPLYNIIATAPGKYITWTTDNSQQLQNIISMLNSAENLEERNPEVRLIMKVNTSPSAGYIRFYNEFAKRPIMYLNYVYTKAEVKFTNTEKLLTTIHKGLIKALDLGMGQEILVYSPIVSMTKIQKTPLPERKALPIRWITWMSYLEDPRIQFHYDKTLPELQQVPTVTDDIIAKIKHPSEFSMVFYTDGSAIKHPNVNKSHNAGMGIAQVQFKPEFTVINTWSIPLGDHTAQLAEVAAVEFACKKALKIDGPVLIVTDSFYVAESVNKELPYWQSNGFFNNKKKPLKHVSKWKSIADCIQLKPDIIIIHEKGHQPTASTFHTEGNNLADKLATQGSYVVNAGKRTADGSEFEKRTADGSEFESPKKKAKVE

SEQ ID NO: 640 - protein, 2176 aa, synthetic construct
MPAAKRVKLDGGDKKYSIGLDIGTNSVGWAVITDEYKVPSKKFKVLGNTDRHSIKKNLIGALLFDSGETAEATRLKRTARRRYTRRKNRICYLQEIFSNEMAKVDDSFFHRLEESFLVEEDKKHERHPIFGNIVDEVAYHEKYPTIYHLRKKLVDSTDKADLRLIYLALAHMIKFRGHFLIEGDLNPDNSDVDKLFIQLVQTYNQLFEENPINASGVDAKAILSARLSKSRRLENLIAQLPGEKKNGLFGNLIALSLGLTPNFKSNFDLAEDAKLQLSKDTYDDDLDNLLAQIGDQYADLFLAAKNLSDAILLSDILRVNTEITKAPLSASMIKRYDEHHQDLTLLKALVRQQLPEKYKEIFFDQSKNGYAGYIDGGASQEEFYKFIKPILEKMDGTEELLVKLNREDLLRKQRTFDNGSIPHQIHLGELHAILRRQEDFYPFLKDNREKIEKILTFRIPYYVGPLARGNSRFAWMTRKSEETITPWNFEEVVDKGASAQSFIERMTNFDKNLPNEKVLPKHSLLYEYFTVYNELTKVKYVTEGMRKPAFLSGEQKKAIVDLLFKTNRKVTVKQLKEDYFKKIECFDSVEISGVEDRFNASLGTYHDLLKIIKDKDFLDNEENEDILEDIVLTLTLFEDREMIEERLKTYAHLFDDKVMKQLKRRRYTGWGRLSRKLINGIRDKQSGKTILDFLKSDGFANRNFMQLIHDDSLTFKEDIQKAQVSGQGDSLHEHIANLAGSPAIKKGILQTVKVVDELVKVMGRHKPENIVIEMARENQTTQKGQKNSRERMKRIEEGIKELGSQILKEHPVENTQLQNEKLYLYYLQNGRDMYVDQELDINRLSDYDVDHIVPQSFLKDDSIDNKVLTRSDKARGKSDNVPSEEVVKKMKNYWRQLLNAKLITQRKFDNLTKAERGGLSELDKAGFIKRQLVETRQITKHVAQILDSRMNTKYDENDKLIREVKVITLKSKLVSDFRKDFQFYKVREINNYHHAHDAYLNAVVGTALIKKYPKLESEFVYGDYKVYDVRKMIAKSEQEIGKATAKYFFYSNIMNFFKTEITLANGEIRKRPLIETNGETGEIVWDKGRDFATVRKVLSMPQVNIVKKTEVQTGGFSKESILPKRNSDKLIARKKDWDPKKYGGFDSPTVAYSVLVVAKVEKGKSKKLKSVKELLGITIMERSSFEKNPIDFLEAKGYKEVKKDLIIKLPKYSLFELENGRKRMLASAGELQKGNELALPSKYVNFLYLASHYEKLKGSPEDNEQKQLFVEQHKHYLDEIIEQISEFSKRVILADANLDKVLSAYNKHRDKPIREQAENIIHLFTLTNLGAPAAFKYFDTTIDRKRYTSTKEVLDATLIHQSITGLYETRIDLSQLGGDGGGGSEAAAKGSSGGMDPLQLLQPLEAEIKGTKLKAHWNSGATITCVPQAFLEEEVPIKNIWIKTIHGEKEQPVYYLTFKIQGRKVEAEVISSPYDYILVSPSDIPWLMKKPLQLTTLVPLQEYEERLLKQTMLTGSYKEKLQSLFLKYDALWQHWENQVGHRRIKPHHIATGTVNPRPQKQYPINPKAKASIQTVINDLLKQGVLIQQNSIMNTPVYPVPKPDGKWRMVLDYREVNKTIPLIAAQNQHSAGILSSIFRGKYKTTLDLSNGFWAHSITPESYWLTAFTWLGQQYCWTRLPQGFLNSPALFNADVVDLLKEVPNVQVYVDDIYISHDDPREHLEQLEKVFSLLLNAGYVVSLKKSEIAQHEVEFLGFNITKEGRGLTETFKQKLLNITPPRDLKQLQSILGLLNFARNFIPNFSELVKPLYNIIATAPGKYITWTTDNSQQLQNIISMLNSAENLEERNPEVRLIMKVNTSPSAGYIRFYNEFAKRPIMYLNYVYTKAEVKFTNTEKLLTTIHKGLIKALDLGMGQEILVYSPIVSMTKIQKTPLPERKALPIRWITWMSYLEDPRIQFHYDKTLPELQQVPTVTDDIIAKIKHPSEFSMVFYTDGSAIKHPNVNKSHNAGMGIAQVQFKPEFTVINTWSIPLGDHTAQLAEVAAVEFACKKALKIDGPVLIVTDSFYVAESVNKELPYWQSNGFFNNKKKPLKHVSKWKSIADCIQLKPDIIIIHEKGHQPTASTFHTEGNNLADKLATQGSYVVNAGKRTADGSEFEKRTADGSEFESPKKKAKVE

SEQ ID NO: 641 - protein, 2176 aa, synthetic construct
MPAAKRVKLDGGDKKYSIGLDIGTNSVGWAVITDEYKVPSKKFKVLGNTDRHSIKKNLIGALLFDSGETAEATRLKRTARRRYTRRKNRICYLQEIFSNEMAKVDDSFFHRLEESFLVEEDKKHERHPIFGNIVDEVAYHEKYPTIYHLRKKLVDSTDKADLRLIYLALAHMIKFRGHFLIEGDLNPDNSDVDKLFIQLVQTYNQLFEENPINASGVDAKAILSARLSKSRRLENLIAQLPGEKKNGLFGNLIALSLGLTPNFKSNFDLAEDAKLQLSKDTYDDDLDNLLAQIGDQYADLFLAAKNLSDAILLSDILRVNTEITKAPLSASMIKRYDEHHQDLTLLKALVRQQLPEKYKEIFFDQSKNGYAGYIDGGASQEEFYKFIKPILEKMDGTEELLVKLNREDLLRKQRTFDNGSIPHQIHLGELHAILRRQEDFYPFLKDNREKIEKILTFRIPYYVGPLARGNSRFAWMTRKSEETITPWNFEEVVDKGASAQSFIERMTNFDKNLPNEKVLPKHSLLYEYFTVYNELTKVKYVTEGMRKPAFLSGEQKKAIVDLLFKTNRKVTVKQLKEDYFKKIECFDSVEISGVEDRFNASLGTYHDLLKIIKDKDFLDNEENEDILEDIVLTLTLFEDREMIEERLKTYAHLFDDKVMKQLKRRRYTGWGRLSRKLINGIRDKQSGKTILDFLKSDGFANRNFMQLIHDDSLTFKEDIQKAQVSGQGDSLHEHIANLAGSPAIKKGILQTVKVVDELVKVMGRHKPENIVIEMARENQTTQKGQKNSRERMKRIEEGIKELGSQILKEHPVENTQLQNEKLYLYYLQNGRDMYVDQELDINRLSDYDVDHIVPQSFLKDDSIDNKVLTRSDKARGKSDNVPSEEVVKKMKNYWRQLLNAKLITQRKFDNLTKAERGGLSELDKAGFIKRQLVETRQITKHVAQILDSRMNTKYDENDKLIREVKVITLKSKLVSDFRKDFQFYKVREINNYHHAHDAYLNAVVGTALIKKYPKLESEFVYGDYKVYDVRKMIAKSEQEIGKATAKYFFYSNIMNFFKTEITLANGEIRKRPLIETNGETGEIVWDKGRDFATVRKVLSMPQVNIVKKTEVQTGGFSKESILPKRNSDKLIARKKDWDPKKYGGFDSPTVAYSVLVVAKVEKGKSKKLKSVKELLGITIMERSSFEKNPIDFLEAKGYKEVKKDLIIKLPKYSLFELENGRKRMLASAGELQKGNELALPSKYVNFLYLASHYEKLKGSPEDNEQKQLFVEQHKHYLDEIIEQISEFSKRVILADANLDKVLSAYNKHRDKPIREQAENIIHLFTLTNLGAPAAFKYFDTTIDRKRYTSTKEVLDATLIHQSITGLYETRIDLSQLGGDGGPAPEAAAKGGSGGMDPLQLLQPLEAEIKGTKLKAHWNSGATITCVPQAFLEEEVPIKNIWIKTIHGEKEQPVYYLTFKIQGRKVEAEVISSPYDYILVSPSDIPWLMKKPLQLTTLVPLQEYEERLLKQTMLTGSYKEKLQSLFLKYDALWQHWENQVGHRRIKPHHIATGTVNPRPQKQYPINPKAKASIQTVINDLLKQGVLIQQNSIMNTPVYPVPKPDGKWRMVLDYREVNKTIPLIAAQNQHSAGILSSIFRGKYKTTLDLSNGFWAHSITPESYWLTAFTWLGQQYCWTRLPQGFLNSPALFNADVVDLLKEVPNVQVYVDDIYISHDDPREHLEQLEKVFSLLLNAGYVVSLKKSEIAQHEVEFLGFNITKEGRGLTETFKQKLLNITPPRDLKQLQSILGLLNFARNFIPNFSELVKPLYNIIATAPGKYITWTTDNSQQLQNIISMLNSAENLEERNPEVRLIMKVNTSPSAGYIRFYNEFAKRPIMYLNYVYTKAEVKFTNTEKLLTTIHKGLIKALDLGMGQEILVYSPIVSMTKIQKTPLPERKALPIRWITWMSYLEDPRIQFHYDKTLPELQQVPTVTDDIIAKIKHPSEFSMVFYTDGSAIKHPNVNKSHNAGMGIAQVQFKPEFTVINTWSIPLGDHTAQLAEVAAVEFACKKALKIDGPVLIVTDSFYVAESVNKELPYWQSNGFFNNKKKPLKHVSKWKSIADCIQLKPDIIIIHEKGHQPTASTFHTEGNNLADKLATQGSYVVNAGKRTADGSEFEKRTADGSEFESPKKKAKVE

SEQ ID NO: 642 - protein, 2173 aa, synthetic construct
MPAAKRVKLDGGDKKYSIGLDIGTNSVGWAVITDEYKVPSKKFKVLGNTDRHSIKKNLIGALLFDSGETAEATRLKRTARRRYTRRKNRICYLQEIFSNEMAKVDDSFFHRLEESFLVEEDKKHERHPIFGNIVDEVAYHEKYPTIYHLRKKLVDSTDKADLRLIYLALAHMIKFRGHFLIEGDLNPDNSDVDKLFIQLVQTYNQLFEENPINASGVDAKAILSARLSKSRRLENLIAQLPGEKKNGLFGNLIALSLGLTPNFKSNFDLAEDAKLQLSKDTYDDDLDNLLAQIGDQYADLFLAAKNLSDAILLSDILRVNTEITKAPLSASMIKRYDEHHQDLTLLKALVRQQLPEKYKEIFFDQSKNGYAGYIDGGASQEEFYKFIKPILEKMDGTEELLVKLNREDLLRKQRTFDNGSIPHQIHLGELHAILRRQEDFYPFLKDNREKIEKILTFRIPYYVGPLARGNSRFAWMTRKSEETITPWNFEEVVDKGASAQSFIERMTNFDKNLPNEKVLPKHSLLYEYFTVYNELTKVKYVTEGMRKPAFLSGEQKKAIVDLLFKTNRKVTVKQLKEDYFKKIECFDSVEISGVEDRFNASLGTYHDLLKIIKDKDFLDNEENEDILEDIVLTLTLFEDREMIEERLKTYAHLFDDKVMKQLKRRRYTGWGRLSRKLINGIRDKQSGKTILDFLKSDGFANRNFMQLIHDDSLTFKEDIQKAQVSGQGDSLHEHIANLAGSPAIKKGILQTVKVVDELVKVMGRHKPENIVIEMARENQTTQKGQKNSRERMKRIEEGIKELGSQILKEHPVENTQLQNEKLYLYYLQNGRDMYVDQELDINRLSDYDVDHIVPQSFLKDDSIDNKVLTRSDKARGKSDNVPSEEVVKKMKNYWRQLLNAKLITQRKFDNLTKAERGGLSELDKAGFIKRQLVETRQITKHVAQILDSRMNTKYDENDKLIREVKVITLKSKLVSDFRKDFQFYKVREINNYHHAHDAYLNAVVGTALIKKYPKLESEFVYGDYKVYDVRKMIAKSEQEIGKATAKYFFYSNIMNFFKTEITLANGEIRKRPLIETNGETGEIVWDKGRDFATVRKVLSMPQVNIVKKTEVQTGGFSKESILPKRNSDKLIARKKDWDPKKYGGFDSPTVAYSVLVVAKVEKGKSKKLKSVKELLGITIMERSSFEKNPIDFLEAKGYKEVKKDLIIKLPKYSLFELENGRKRMLASAGELQKGNELALPSKYVNFLYLASHYEKLKGSPEDNEQKQLFVEQHKHYLDEIIEQISEFSKRVILADANLDKVLSAYNKHRDKPIREQAENIIHLFTLTNLGAPAAFKYFDTTIDRKRYTSTKEVLDATLIHQSITGLYETRIDLSQLGGDGGGGGGGGGGGGMDPLQLLQPLEAEIKGTKLKAHWNSGATITCVPQAFLEEEVPIKNIWIKTIHGEKEQPVYYLTFKIQGRKVEAEVISSPYDYILVSPSDIPWLMKKPLQLTTLVPLQEYEERLLKQTMLTGSYKEKLQSLFLKYDALWQHWENQVGHRRIKPHHIATGTVNPRPQKQYPINPKAKASIQTVINDLLKQGVLIQQNSIMNTPVYPVPKPDGKWRMVLDYREVNKTIPLIAAQNQHSAGILSSIFRGKYKTTLDLSNGFWAHSITPESYWLTAFTWLGQQYCWTRLPQGFLNSPALFNADVVDLLKEVPNVQVYVDDIYISHDDPREHLEQLEKVFSLLLNAGYVVSLKKSEIAQHEVEFLGFNITKEGRGLTETFKQKLLNITPPRDLKQLQSILGLLNFARNFIPNFSELVKPLYNIIATAPGKYITWTTDNSQQLQNIISMLNSAENLEERNPEVRLIMKVNTSPSAGYIRFYNEFAKRPIMYLNYVYTKAEVKFTNTEKLLTTIHKGLIKALDLGMGQEILVYSPIVSMTKIQKTPLPERKALPIRWITWMSYLEDPRIQFHYDKTLPELQQVPTVTDDIIAKIKHPSEFSMVFYTDGSAIKHPNVNKSHNAGMGIAQVQFKPEFTVINTWSIPLGDHTAQLAEVAAVEFACKKALKIDGPVLIVTDSFYVAESVNKELPYWQSNGFFNNKKKPLKHVSKWKSIADCIQLKPDIIIIHEKGHQPTASTFHTEGNNLADKLATQGSYVVNAGKRTADGSEFEKRTADGSEFESPKKKAKVE

SEQ ID NO: 643 - protein, 2171 aa, synthetic construct
MPAAKRVKLDGGDKKYSIGLDIGTNSVGWAVITDEYKVPSKKFKVLGNTDRHSIKKNLIGALLFDSGETAEATRLKRTARRRYTRRKNRICYLQEIFSNEMAKVDDSFFHRLEESFLVEEDKKHERHPIFGNIVDEVAYHEKYPTIYHLRKKLVDSTDKADLRLIYLALAHMIKFRGHFLIEGDLNPDNSDVDKLFIQLVQTYNQLFEENPINASGVDAKAILSARLSKSRRLENLIAQLPGEKKNGLFGNLIALSLGLTPNFKSNFDLAEDAKLQLSKDTYDDDLDNLLAQIGDQYADLFLAAKNLSDAILLSDILRVNTEITKAPLSASMIKRYDEHHQDLTLLKALVRQQLPEKYKEIFFDQSKNGYAGYIDGGASQEEFYKFIKPILEKMDGTEELLVKLNREDLLRKQRTFDNGSIPHQIHLGELHAILRRQEDFYPFLKDNREKIEKILTFRIPYYVGPLARGNSRFAWMTRKSEETITPWNFEEVVDKGASAQSFIERMTNFDKNLPNEKVLPKHSLLYEYFTVYNELTKVKYVTEGMRKPAFLSGEQKKAIVDLLFKTNRKVTVKQLKEDYFKKIECFDSVEISGVEDRFNASLGTYHDLLKIIKDKDFLDNEENEDILEDIVLTLTLFEDREMIEERLKTYAHLFDDKVMKQLKRRRYTGWGRLSRKLINGIRDKQSGKTILDFLKSDGFANRNFMQLIHDDSLTFKEDIQKAQVSGQGDSLHEHIANLAGSPAIKKGILQTVKVVDELVKVMGRHKPENIVIEMARENQTTQKGQKNSRERMKRIEEGIKELGSQILKEHPVENTQLQNEKLYLYYLQNGRDMYVDQELDINRLSDYDVDHIVPQSFLKDDSIDNKVLTRSDKARGKSDNVPSEEVVKKMKNYWRQLLNAKLITQRKFDNLTKAERGGLSELDKAGFIKRQLVETRQITKHVAQILDSRMNTKYDENDKLIREVKVITLKSKLVSDFRKDFQFYKVREINNYHHAHDAYLNAVVGTALIKKYPKLESEFVYGDYKVYDVRKMIAKSEQEIGKATAKYFFYSNIMNFFKTEITLANGEIRKRPLIETNGETGEIVWDKGRDFATVRKVLSMPQVNIVKKTEVQTGGFSKESILPKRNSDKLIARKKDWDPKKYGGFDSPTVAYSVLVVAKVEKGKSKKLKSVKELLGITIMERSSFEKNPIDFLEAKGYKEVKKDLIIKLPKYSLFELENGRKRMLASAGELQKGNELALPSKYVNFLYLASHYEKLKGSPEDNEQKQLFVEQHKHYLDEIIEQISEFSKRVILADANLDKVLSAYNKHRDKPIREQAENIIHLFTLTNLGAPAAFKYFDTTIDRKRYTSTKEVLDATLIHQSITGLYETRIDLSQLGGDGGGGSGSSGGMDPLQLLQPLEAEIKGTKLKAHWNSGATITCVPQAFLEEEVPIKNIWIKTIHGEKEQPVYYLTFKIQGRKVEAEVISSPYDYILVSPSDIPWLMKKPLQLTTLVPLQEYEERLLKQTMLTGSYKEKLQSLFLKYDALWQHWENQVGHRRIKPHHIATGTVNPRPQKQYPINPKAKASIQTVINDLLKQGVLIQQNSIMNTPVYPVPKPDGKWRMVLDYREVNKTIPLIAAQNQHSAGILSSIFRGKYKTTLDLSNGFWAHSITPESYWLTAFTWLGQQYCWTRLPQGFLNSPALFNADVVDLLKEVPNVQVYVDDIYISHDDPREHLEQLEKVFSLLLNAGYVVSLKKSEIAQHEVEFLGFNITKEGRGLTETFKQKLLNITPPRDLKQLQSILGLLNFARNFIPNFSELVKPLYNIIATAPGKYITWTTDNSQQLQNIISMLNSAENLEERNPEVRLIMKVNTSPSAGYIRFYNEFAKRPIMYLNYVYTKAEVKFTNTEKLLTTIHKGLIKALDLGMGQEILVYSPIVSMTKIQKTPLPERKALPIRWITWMSYLEDPRIQFHYDKTLPELQQVPTVTDDIIAKIKHPSEFSMVFYTDGSAIKHPNVNKSHNAGMGIAQVQFKPEFTVINTWSIPLGDHTAQLAEVAAVEFACKKALKIDGPVLIVTDSFYVAESVNKELPYWQSNGFFNNKKKPLKHVSKWKSIADCIQLKPDIIIIHEKGHQPTASTFHTEGNNLADKLATQGSYVVNAGKRTADGSEFEKRTADGSEFESPKKKAKVE

SEQ ID NO: 644 - protein, 2171 aa, synthetic construct
MPAAKRVKLDGGDKKYSIGLDIGTNSVGWAVITDEYKVPSKKFKVLGNTDRHSIKKNLIGALLFDSGETAEATRLKRTARRRYTRRKNRICYLQEIFSNEMAKVDDSFFHRLEESFLVEEDKKHERHPIFGNIVDEVAYHEKYPTIYHLRKKLVDSTDKADLRLIYLALAHMIKFRGHFLIEGDLNPDNSDVDKLFIQLVQTYNQLFEENPINASGVDAKAILSARLSKSRRLENLIAQLPGEKKNGLFGNLIALSLGLTPNFKSNFDLAEDAKLQLSKDTYDDDLDNLLAQIGDQYADLFLAAKNLSDAILLSDILRVNTEITKAPLSASMIKRYDEHHQDLTLLKALVRQQLPEKYKEIFFDQSKNGYAGYIDGGASQEEFYKFIKPILEKMDGTEELLVKLNREDLLRKQRTFDNGSIPHQIHLGELHAILRRQEDFYPFLKDNREKIEKILTFRIPYYVGPLARGNSRFAWMTRKSEETITPWNFEEVVDKGASAQSFIERMTNFDKNLPNEKVLPKHSLLYEYFTVYNELTKVKYVTEGMRKPAFLSGEQKKAIVDLLFKTNRKVTVKQLKEDYFKKIECFDSVEISGVEDRFNASLGTYHDLLKIIKDKDFLDNEENEDILEDIVLTLTLFEDREMIEERLKTYAHLFDDKVMKQLKRRRYTGWGRLSRKLINGIRDKQSGKTILDFLKSDGFANRNFMQLIHDDSLTFKEDIQKAQVSGQGDSLHEHIANLAGSPAIKKGILQTVKVVDELVKVMGRHKPENIVIEMARENQTTQKGQKNSRERMKRIEEGIKELGSQILKEHPVENTQLQNEKLYLYYLQNGRDMYVDQELDINRLSDYDVDHIVPQSFLKDDSIDNKVLTRSDKARGKSDNVPSEEVVKKMKNYWRQLLNAKLITQRKFDNLTKAERGGLSELDKAGFIKRQLVETRQITKHVAQILDSRMNTKYDENDKLIREVKVITLKSKLVSDFRKDFQFYKVREINNYHHAHDAYLNAVVGTALIKKYPKLESEFVYGDYKVYDVRKMIAKSEQEIGKATAKYFFYSNIMNFFKTEITLANGEIRKRPLIETNGETGEIVWDKGRDFATVRKVLSMPQVNIVKKTEVQTGGFSKESILPKRNSDKLIARKKDWDPKKYGGFDSPTVAYSVLVVAKVEKGKSKKLKSVKELLGITIMERSSFEKNPIDFLEAKGYKEVKKDLIIKLPKYSLFELENGRKRMLASAGELQKGNELALPSKYVNFLYLASHYEKLKGSPEDNEQKQLFVEQHKHYLDEIIEQISEFSKRVILADANLDKVLSAYNKHRDKPIREQAENIIHLFTLTNLGAPAAFKYFDTTIDRKRYTSTKEVLDATLIHQSITGLYETRIDLSQLGGDGGGGGGGGGGMDPLQLLQPLEAEIKGTKLKAHWNSGATITCVPQAFLEEEVPIKNIWIKTIHGEKEQPVYYLTFKIQGRKVEAEVISSPYDYILVSPSDIPWLMKKPLQLTTLVPLQEYEERLLKQTMLTGSYKEKLQSLFLKYDALWQHWENQVGHRRIKPHHIATGTVNPRPQKQYPINPKAKASIQTVINDLLKQGVLIQQNSIMNTPVYPVPKPDGKWRMVLDYREVNKTIPLIAAQNQHSAGILSSIFRGKYKTTLDLSNGFWAHSITPESYWLTAFTWLGQQYCWTRLPQGFLNSPALFNADVVDLLKEVPNVQVYVDDIYISHDDPREHLEQLEKVFSLLLNAGYVVSLKKSEIAQHEVEFLGFNITKEGRGLTETFKQKLLNITPPRDLKQLQSILGLLNFARNFIPNFSELVKPLYNIIATAPGKYITWTTDNSQQLQNIISMLNSAENLEERNPEVRLIMKVNTSPSAGYIRFYNEFAKRPIMYLNYVYTKAEVKFTNTEKLLTTIHKGLIKALDLGMGQEILVYSPIVSMTKIQKTPLPERKALPIRWITWMSYLEDPRIQFHYDKTLPELQQVPTVTDDIIAKIKHPSEFSMVFYTDGSAIKHPNVNKSHNAGMGIAQVQFKPEFTVINTWSIPLGDHTAQLAEVAAVEFACKKALKIDGPVLIVTDSFYVAESVNKELPYWQSNGFFNNKKKPLKHVSKWKSIADCIQLKPDIIIIHEKGHQPTASTFHTEGNNLADKLATQGSYVVNAGKRTADGSEFEKRTADGSEFESPKKKAKVE

SEQ ID NO: 645 - protein, 2174 aa, synthetic construct
MPAAKRVKLDGGDKKYSIGLDIGTNSVGWAVITDEYKVPSKKFKVLGNTDRHSIKKNLIGALLFDSGETAEATRLKRTARRRYTRRKNRICYLQEIFSNEMAKVDDSFFHRLEESFLVEEDKKHERHPIFGNIVDEVAYHEKYPTIYHLRKKLVDSTDKADLRLIYLALAHMIKFRGHFLIEGDLNPDNSDVDKLFIQLVQTYNQLFEENPINASGVDAKAILSARLSKSRRLENLIAQLPGEKKNGLFGNLIALSLGLTPNFKSNFDLAEDAKLQLSKDTYDDDLDNLLAQIGDQYADLFLAAKNLSDAILLSDILRVNTEITKAPLSASMIKRYDEHHQDLTLLKALVRQQLPEKYKEIFFDQSKNGYAGYIDGGASQEEFYKFIKPILEKMDGTEELLVKLNREDLLRKQRTFDNGSIPHQIHLGELHAILRRQEDFYPFLKDNREKIEKILTFRIPYYVGPLARGNSRFAWMTRKSEETITPWNFEEVVDKGASAQSFIERMTNFDKNLPNEKVLPKHSLLYEYFTVYNELTKVKYVTEGMRKPAFLSGEQKKAIVDLLFKTNRKVTVKQLKEDYFKKIECFDSVEISGVEDRFNASLGTYHDLLKIIKDKDFLDNEENEDILEDIVLTLTLFEDREMIEERLKTYAHLFDDKVMKQLKRRRYTGWGRLSRKLINGIRDKQSGKTILDFLKSDGFANRNFMQLIHDDSLTFKEDIQKAQVSGQGDSLHEHIANLAGSPAIKKGILQTVKVVDELVKVMGRHKPENIVIEMARENQTTQKGQKNSRERMKRIEEGIKELGSQILKEHPVENTQLQNEKLYLYYLQNGRDMYVDQELDINRLSDYDVDHIVPQSFLKDDSIDNKVLTRSDKARGKSDNVPSEEVVKKMKNYWRQLLNAKLITQRKFDNLTKAERGGLSELDKAGFIKRQLVETRQITKHVAQILDSRMNTKYDENDKLIREVKVITLKSKLVSDFRKDFQFYKVREINNYHHAHDAYLNAVVGTALIKKYPKLESEFVYGDYKVYDVRKMIAKSEQEIGKATAKYFFYSNIMNFFKTEITLANGEIRKRPLIETNGETGEIVWDKGRDFATVRKVLSMPQVNIVKKTEVQTGGFSKESILPKRNSDKLIARKKDWDPKKYGGFDSPTVAYSVLVVAKVEKGKSKKLKSVKELLGITIMERSSFEKNPIDFLEAKGYKEVKKDLIIKLPKYSLFELENGRKRMLASAGELQKGNELALPSKYVNFLYLASHYEKLKGSPEDNEQKQLFVEQHKHYLDEIIEQISEFSKRVILADANLDKVLSAYNKHRDKPIREQAENIIHLFTLTNLGAPAAFKYFDTTIDRKRYTSTKEVLDATLIHQSITGLYETRIDLSQLGGDGGGGSGGGPAPGGMDPLQLLQPLEAEIKGTKLKAHWNSGATITCVPQAFLEEEVPIKNIWIKTIHGEKEQPVYYLTFKIQGRKVEAEVISSPYDYILVSPSDIPWLMKKPLQLTTLVPLQEYEERLLKQTMLTGSYKEKLQSLFLKYDALWQHWENQVGHRRIKPHHIATGTVNPRPQKQYPINPKAKASIQTVINDLLKQGVLIQQNSIMNTPVYPVPKPDGKWRMVLDYREVNKTIPLIAAQNQHSAGILSSIFRGKYKTTLDLSNGFWAHSITPESYWLTAFTWLGQQYCWTRLPQGFLNSPALFNADVVDLLKEVPNVQVYVDDIYISHDDPREHLEQLEKVFSLLLNAGYVVSLKKSEIAQHEVEFLGFNITKEGRGLTETFKQKLLNITPPRDLKQLQSILGLLNFARNFIPNFSELVKPLYNIIATAPGKYITWTTDNSQQLQNIISMLNSAENLEERNPEVRLIMKVNTSPSAGYIRFYNEFAKRPIMYLNYVYTKAEVKFTNTEKLLTTIHKGLIKALDLGMGQEILVYSPIVSMTKIQKTPLPERKALPIRWITWMSYLEDPRIQFHYDKTLPELQQVPTVTDDIIAKIKHPSEFSMVFYTDGSAIKHPNVNKSHNAGMGIAQVQFKPEFTVINTWSIPLGDHTAQLAEVAAVEFACKKALKIDGPVLIVTDSFYVAESVNKELPYWQSNGFFNNKKKPLKHVSKWKSIADCIQLKPDIIIIHEKGHQPTASTFHTEGNNLADKLATQGSYVVNAGKRTADGSEFEKRTADGSEFESPKKKAKVE

SEQ ID NO: 646 - protein, 2176 aa, synthetic construct
MPAAKRVKLDGGDKKYSIGLDIGTNSVGWAVITDEYKVPSKKFKVLGNTDRHSIKKNLIGALLFDSGETAEATRLKRTARRRYTRRKNRICYLQEIFSNEMAKVDDSFFHRLEESFLVEEDKKHERHPIFGNIVDEVAYHEKYPTIYHLRKKLVDSTDKADLRLIYLALAHMIKFRGHFLIEGDLNPDNSDVDKLFIQLVQTYNQLFEENPINASGVDAKAILSARLSKSRRLENLIAQLPGEKKNGLFGNLIALSLGLTPNFKSNFDLAEDAKLQLSKDTYDDDLDNLLAQIGDQYADLFLAAKNLSDAILLSDILRVNTEITKAPLSASMIKRYDEHHQDLTLLKALVRQQLPEKYKEIFFDQSKNGYAGYIDGGASQEEFYKFIKPILEKMDGTEELLVKLNREDLLRKQRTFDNGSIPHQIHLGELHAILRRQEDFYPFLKDNREKIEKILTFRIPYYVGPLARGNSRFAWMTRKSEETITPWNFEEVVDKGASAQSFIERMTNFDKNLPNEKVLPKHSLLYEYFTVYNELTKVKYVTEGMRKPAFLSGEQKKAIVDLLFKTNRKVTVKQLKEDYFKKIECFDSVEISGVEDRFNASLGTYHDLLKIIKDKDFLDNEENEDILEDIVLTLTLFEDREMIEERLKTYAHLFDDKVMKQLKRRRYTGWGRLSRKLINGIRDKQSGKTILDFLKSDGFANRNFMQLIHDDSLTFKEDIQKAQVSGQGDSLHEHIANLAGSPAIKKGILQTVKVVDELVKVMGRHKPENIVIEMARENQTTQKGQKNSRERMKRIEEGIKELGSQILKEHPVENTQLQNEKLYLYYLQNGRDMYVDQELDINRLSDYDVDHIVPQSFLKDDSIDNKVLTRSDKARGKSDNVPSEEVVKKMKNYWRQLLNAKLITQRKFDNLTKAERGGLSELDKAGFIKRQLVETRQITKHVAQILDSRMNTKYDENDKLIREVKVITLKSKLVSDFRKDFQFYKVREINNYHHAHDAYLNAVVGTALIKKYPKLESEFVYGDYKVYDVRKMIAKSEQEIGKATAKYFFYSNIMNFFKTEITLANGEIRKRPLIETNGETGEIVWDKGRDFATVRKVLSMPQVNIVKKTEVQTGGFSKESILPKRNSDKLIARKKDWDPKKYGGFDSPTVAYSVLVVAKVEKGKSKKLKSVKELLGITIMERSSFEKNPIDFLEAKGYKEVKKDLIIKLPKYSLFELENGRKRMLASAGELQKGNELALPSKYVNFLYLASHYEKLKGSPEDNEQKQLFVEQHKHYLDEIIEQISEFSKRVILADANLDKVLSAYNKHRDKPIREQAENIIHLFTLTNLGAPAAFKYFDTTIDRKRYTSTKEVLDATLIHQSITGLYETRIDLSQLGGDGGEAAAKGGSGGGGGMDPLQLLQPLEAEIKGTKLKAHWNSGATITCVPQAFLEEEVPIKNIWIKTIHGEKEQPVYYLTFKIQGRKVEAEVISSPYDYILVSPSDIPWLMKKPLQLTTLVPLQEYEERLLKQTMLTGSYKEKLQSLFLKYDALWQHWENQVGHRRIKPHHIATGTVNPRPQKQYPINPKAKASIQTVINDLLKQGVLIQQNSIMNTPVYPVPKPDGKWRMVLDYREVNKTIPLIAAQNQHSAGILSSIFRGKYKTTLDLSNGFWAHSITPESYWLTAFTWLGQQYCWTRLPQGFLNSPALFNADVVDLLKEVPNVQVYVDDIYISHDDPREHLEQLEKVFSLLLNAGYVVSLKKSEIAQHEVEFLGFNITKEGRGLTETFKQKLLNITPPRDLKQLQSILGLLNFARNFIPNFSELVKPLYNIIATAPGKYITWTTDNSQQLQNIISMLNSAENLEERNPEVRLIMKVNTSPSAGYIRFYNEFAKRPIMYLNYVYTKAEVKFTNTEKLLTTIHKGLIKALDLGMGQEILVYSPIVSMTKIQKTPLPERKALPIRWITWMSYLEDPRIQFHYDKTLPELQQVPTVTDDIIAKIKHPSEFSMVFYTDGSAIKHPNVNKSHNAGMGIAQVQFKPEFTVINTWSIPLGDHTAQLAEVAAVEFACKKALKIDGPVLIVTDSFYVAESVNKELPYWQSNGFFNNKKKPLKHVSKWKSIADCIQLKPDIIIIHEKGHQPTASTFHTEGNNLADKLATQGSYVVNAGKRTADGSEFEKRTADGSEFESPKKKAKVE

SEQ ID NO: 647 - protein, 2211 aa, synthetic construct
MPAAKRVKLDGGDKKYSIGLDIGTNSVGWAVITDEYKVPSKKFKVLGNTDRHSIKKNLIGALLFDSGETAEATRLKRTARRRYTRRKNRICYLQEIFSNEMAKVDDSFFHRLEESFLVEEDKKHERHPIFGNIVDEVAYHEKYPTIYHLRKKLVDSTDKADLRLIYLALAHMIKFRGHFLIEGDLNPDNSDVDKLFIQLVQTYNQLFEENPINASGVDAKAILSARLSKSRRLENLIAQLPGEKKNGLFGNLIALSLGLTPNFKSNFDLAEDAKLQLSKDTYDDDLDNLLAQIGDQYADLFLAAKNLSDAILLSDILRVNTEITKAPLSASMIKRYDEHHQDLTLLKALVRQQLPEKYKEIFFDQSKNGYAGYIDGGASQEEFYKFIKPILEKMDGTEELLVKLNREDLLRKQRTFDNGSIPHQIHLGELHAILRRQEDFYPFLKDNREKIEKILTFRIPYYVGPLARGNSRFAWMTRKSEETITPWNFEEVVDKGASAQSFIERMTNFDKNLPNEKVLPKHSLLYEYFTVYNELTKVKYVTEGMRKPAFLSGEQKKAIVDLLFKTNRKVTVKQLKEDYFKKIECFDSVEISGVEDRFNASLGTYHDLLKIIKDKDFLDNEENEDILEDIVLTLTLFEDREMIEERLKTYAHLFDDKVMKQLKRRRYTGWGRLSRKLINGIRDKQSGKTILDFLKSDGFANRNFMQLIHDDSLTFKEDIQKAQVSGQGDSLHEHIANLAGSPAIKKGILQTVKVVDELVKVMGRHKPENIVIEMARENQTTQKGQKNSRERMKRIEEGIKELGSQILKEHPVENTQLQNEKLYLYYLQNGRDMYVDQELDINRLSDYDVDHIVPQSFLKDDSIDNKVLTRSDKARGKSDNVPSEEVVKKMKNYWRQLLNAKLITQRKFDNLTKAERGGLSELDKAGFIKRQLVETRQITKHVAQILDSRMNTKYDENDKLIREVKVITLKSKLVSDFRKDFQFYKVREINNYHHAHDAYLNAVVGTALIKKYPKLESEFVYGDYKVYDVRKMIAKSEQEIGKATAKYFFYSNIMNFFKTEITLANGEIRKRPLIETNGETGEIVWDKGRDFATVRKVLSMPQVNIVKKTEVQTGGFSKESILPKRNSDKLIARKKDWDPKKYGGFDSPTVAYSVLVVAKVEKGKSKKLKSVKELLGITIMERSSFEKNPIDFLEAKGYKEVKKDLIIKLPKYSLFELENGRKRMLASAGELQKGNELALPSKYVNFLYLASHYEKLKGSPEDNEQKQLFVEQHKHYLDEIIEQISEFSKRVILADANLDKVLSAYNKHRDKPIREQAENIIHLFTLTNLGAPAAFKYFDTTIDRKRYTSTKEVLDATLIHQSITGLYETRIDLSQLGGDGGAEAAAKEAAAKEAAAKEAAAKALEAEAAAKEAAAKEAAAKEAAAKAGGMDPLQLLQPLEAEIKGTKLKAHWNSGATITCVPQAFLEEEVPIKNIWIKTIHGEKEQPVYYLTFKIQGRKVEAEVISSPYDYILVSPSDIPWLMKKPLQLTTLVPLQEYEERLLKQTMLTGSYKEKLQSLFLKYDALWQHWENQVGHRRIKPHHIATGTVNPRPQKQYPINPKAKASIQTVINDLLKQGVLIQQNSIMNTPVYPVPKPDGKWRMVLDYREVNKTIPLIAAQNQHSAGILSSIFRGKYKTTLDLSNGFWAHSITPESYWLTAFTWLGQQYCWTRLPQGFLNSPALFNADVVDLLKEVPNVQVYVDDIYISHDDPREHLEQLEKVFSLLLNAGYVVSLKKSEIAQHEVEFLGFNITKEGRGLTETFKQKLLNITPPRDLKQLQSILGKLNFARNFIPNFSELVKPLYNIIATAPGKYITWTTDNSQQLQNIISMLNSAENLEERNPEVRLIMKVNTSPSAGYIRFYNEFAKRPIMYLNYVYTKAEVKFTNTEKLLTTIHKGLIKALDLGMGQEILVYSPIVSMTKIQKTPLPERKALPIRWITWMSYLEDPRIQFHYDKTLPELQQVPTVTDDIIAKIKHPSEFSMVFYTDGSAIKHPNVNKSHNAGMGIAQVQFKPEFTVINTWSIPLGDHTAQLAEVAAVEFACKKALKIDGPVLIVTDSFYVAESVNKELPYWQSNGFFNNKKKPLKHVSKWKSIADCIQLKPDIIIIHEKGHQPTASTFHTEGNNLADKLATQGSYVVNAGKRTADGSEFEKRTADGSEFESPKKKAKVE

SEQ ID NO: 648 - protein, 2195 aa, synthetic construct
MPAAKRVKLDGGDKKYSIGLDIGTNSVGWAVITDEYKVPSKKFKVLGNTDRHSIKKNLIGALLFDSGETAEATRLKRTARRRYTRRKNRICYLQEIFSNEMAKVDDSFFHRLEESFLVEEDKKHERHPIFGNIVDEVAYHEKYPTIYHLRKKLVDSTDKADLRLIYLALAHMIKFRGHFLIEGDLNPDNSDVDKLFIQLVQTYNQLFEENPINASGVDAKAILSARLSKSRRLENLIAQLPGEKKNGLFGNLIALSLGLTPNFKSNFDLAEDAKLQLSKDTYDDDLDNLLAQIGDQYADLFLAAKNLSDAILLSDILRVNTEITKAPLSASMIKRYDEHHQDLTLLKALVRQQLPEKYKEIFFDQSKNGYAGYIDGGASQEEFYKFIKPILEKMDGTEELLVKLNREDLLRKQRTFDNGSIPHQIHLGELHAILRRQEDFYPFLKDNREKIEKILTFRIPYYVGPLARGNSRFAWMTRKSEETITPWNFEEVVDKGASAQSFIERMTNFDKNLPNEKVLPKHSLLYEYFTVYNELTKVKYVTEGMRKPAFLSGEQKKAIVDLLFKTNRKVTVKQLKEDYFKKIECFDSVEISGVEDRFNASLGTYHDLLKIIKDKDFLDNEENEDILEDIVLTLTLFEDREMIEERLKTYAHLFDDKVMKQLKRRRYTGWGRLSRKLINGIRDKQSGKTILDFLKSDGFANRNFMQLIHDDSLTFKEDIQKAQVSGQGDSLHEHIANLAGSPAIKKGILQTVKVVDELVKVMGRHKPENIVIEMARENQTTQKGQKNSRERMKRIEEGIKELGSQILKEHPVENTQLQNEKLYLYYLQNGRDMYVDQELDINRLSDYDVDHIVPQSFLKDDSIDNKVLTRSDKARGKSDNVPSEEVVKKMKNYWRQLLNAKLITQRKFDNLTKAERGGLSELDKAGFIKRQLVETRQITKHVAQILDSRMNTKYDENDKLIREVKVITLKSKLVSDFRKDFQFYKVREINNYHHAHDAYLNAVVGTALIKKYPKLESEFVYGDYKVYDVRKMIAKSEQEIGKATAKYFFYSNIMNFFKTEITLANGEIRKRPLIETNGETGEIVWDKGRDFATVRKVLSMPQVNIVKKTEVQTGGFSKESILPKRNSDKLIARKKDWDPKKYGGFDSPTVAYSVLVVAKVEKGKSKKLKSVKELLGITIMERSSFEKNPIDFLEAKGYKEVKKDLIIKLPKYSLFELENGRKRMLASAGELQKGNELALPSKYVNFLYLASHYEKLKGSPEDNEQKQLFVEQHKHYLDEIIEQISEFSKRVILADANLDKVLSAYNKHRDKPIREQAENIIHLFTLTNLGAPAAFKYFDTTIDRKRYTSTKEVLDATLIHQSITGLYETRIDLSQLGGDGGGGGGSGGGGSGGGGSGGGGSGGGGSGGGGSGGMDPLQLLQPLEAEIKGTKLKAHWNSGATITCVPQAFLEEEVPIKNIWIKTIHGEKEQPVYYLTFKIQGRKVEAEVISSPYDYILVSPSDIPWLMKKPLQLTTLVPLQEYEERLLKQTMLTGSYKEKLQSLFLKYDALWQHWENQVGHRRIKPHHIATGTVNPRPQKQYPINPKAKASIQTVINDLLKQGVLIQQNSIMNTPVYPVPKPDGKWRMVLDYREVNKTIPLIAAQNQHSAGILSSIFRGKYKTTLDLSNGFWAHSITPESYWLTAFTWLGQQYCWTRLPQGFLNSPALFNADVVDLLKEVPNVQVYVDDIYISHDDPREHLEQLEKVFSLLLNAGYVVSLKKSEIAQHEVEFLGFNITKEGRGLTETFKQKLLNITPPRDLKQLQSILGKLNFARNFIPNFSELVKPLYNIIATAPGKYITWTTDNSQQLQNIISMLNSAENLEERNPEVRLIMKVNTSPSAGYIRFYNEFAKRPIMYLNYVYTKAEVKFTNTEKLLTTIHKGLIKALDLGMGQEILVYSPIVSMTKIQKTPLPERKALPIRWITWMSYLEDPRIQFHYDKTLPELQQVPTVTDDIIAKIKHPSEFSMVFYTDGSAIKHPNVNKSHNAGMGIAQVQFKPEFTVINTWSIPLGDHTAQLAEVAAVEFACKKALKIDGPVLIVTDSFYVAESVNKELPYWQSNGFFNNKKKPLKHVSKWKSIADCIQLKPDIIIIHEKGHQPTASTFHTEGNNLADKLATQGSYVVNAGKRTADGSEFEKRTADGSEFESPKKKAKVE

SEQ ID NO: 649 - protein, 2190 aa, synthetic construct
MPAAKRVKLDGGDKKYSIGLDIGTNSVGWAVITDEYKVPSKKFKVLGNTDRHSIKKNLIGALLFDSGETAEATRLKRTARRRYTRRKNRICYLQEIFSNEMAKVDDSFFHRLEESFLVEEDKKHERHPIFGNIVDEVAYHEKYPTIYHLRKKLVDSTDKADLRLIYLALAHMIKFRGHFLIEGDLNPDNSDVDKLFIQLVQTYNQLFEENPINASGVDAKAILSARLSKSRRLENLIAQLPGEKKNGLFGNLIALSLGLTPNFKSNFDLAEDAKLQLSKDTYDDDLDNLLAQIGDQYADLFLAAKNLSDAILLSDILRVNTEITKAPLSASMIKRYDEHHQDLTLLKALVRQQLPEKYKEIFFDQSKNGYAGYIDGGASQEEFYKFIKPILEKMDGTEELLVKLNREDLLRKQRTFDNGSIPHQIHLGELHAILRRQEDFYPFLKDNREKIEKILTFRIPYYVGPLARGNSRFAWMTRKSEETITPWNFEEVVDKGASAQSFIERMTNFDKNLPNEKVLPKHSLLYEYFTVYNELTKVKYVTEGMRKPAFLSGEQKKAIVDLLFKTNRKVTVKQLKEDYFKKIECFDSVEISGVEDRFNASLGTYHDLLKIIKDKDFLDNEENEDILEDIVLTLTLFEDREMIEERLKTYAHLFDDKVMKQLKRRRYTGWGRLSRKLINGIRDKQSGKTILDFLKSDGFANRNFMQLIHDDSLTFKEDIQKAQVSGQGDSLHEHIANLAGSPAIKKGILQTVKVVDELVKVMGRHKPENIVIEMARENQTTQKGQKNSRERMKRIEEGIKELGSQILKEHPVENTQLQNEKLYLYYLQNGRDMYVDQELDINRLSDYDVDHIVPQSFLKDDSIDNKVLTRSDKARGKSDNVPSEEVVKKMKNYWRQLLNAKLITQRKFDNLTKAERGGLSELDKAGFIKRQLVETRQITKHVAQILDSRMNTKYDENDKLIREVKVITLKSKLVSDFRKDFQFYKVREINNYHHAHDAYLNAVVGTALIKKYPKLESEFVYGDYKVYDVRKMIAKSEQEIGKATAKYFFYSNIMNFFKTEITLANGEIRKRPLIETNGETGEIVWDKGRDFATVRKVLSMPQVNIVKKTEVQTGGFSKESILPKRNSDKLIARKKDWDPKKYGGFDSPTVAYSVLVVAKVEKGKSKKLKSVKELLGITIMERSSFEKNPIDFLEAKGYKEVKKDLIIKLPKYSLFELENGRKRMLASAGELQKGNELALPSKYVNFLYLASHYEKLKGSPEDNEQKQLFVEQHKHYLDEIIEQISEFSKRVILADANLDKVLSAYNKHRDKPIREQAENIIHLFTLTNLGAPAAFKYFDTTIDRKRYTSTKEVLDATLIHQSITGLYETRIDLSQLGGDGGEAAAKEAAAKEAAAKEAAAKEAAAKGGMDPLQLLQPLEAEIKGTKLKAHWNSGATITCVPQAFLEEEVPIKNIWIKTIHGEKEQPVYYLTFKIQGRKVEAEVISSPYDYILVSPSDIPWLMKKPLQLTTLVPLQEYEERLLKQTMLTGSYKEKLQSLFLKYDALWQHWENQVGHRRIKPHHIATGTVNPRPQKQYPINPKAKASIQTVINDLLKQGVLIQQNSIMNTPVYPVPKPDGKWRMVLDYREVNKTIPLIAAQNQHSAGILSSIFRGKYKTTLDLSNGFWAHSITPESYWLTAFTWLGQQYCWTRLPQGFLNSPALFNADVVDLLKEVPNVQVYVDDIYISHDDPREHLEQLEKVFSLLLNAGYVVSLKKSEIAQHEVEFLGFNITKEGRGLTETFKQKLLNITPPRDLKQLQSILGKLNFARNFIPNFSELVKPLYNIIATAPGKYITWTTDNSQQLQNIISMLNSAENLEERNPEVRLIMKVNTSPSAGYIRFYNEFAKRPIMYLNYVYTKAEVKFTNTEKLLTTIHKGLIKALDLGMGQEILVYSPIVSMTKIQKTPLPERKALPIRWITWMSYLEDPRIQFHYDKTLPELQQVPTVTDDIIAKIKHPSEFSMVFYTDGSAIKHPNVNKSHNAGMGIAQVQFKPEFTVINTWSIPLGDHTAQLAEVAAVEFACKKALKIDGPVLIVTDSFYVAESVNKELPYWQSNGFFNNKKKPLKHVSKWKSIADCIQLKPDIIIIHEKGHQPTASTFHTEGNNLADKLATQGSYVVNAGKRTADGSEFEKRTADGSEFESPKKKAKVE

SEQ ID NO: 650 - protein, 2176 aa, synthetic construct
MPAAKRVKLDGGDKKYSIGLDIGTNSVGWAVITDEYKVPSKKFKVLGNTDRHSIKKNLIGALLFDSGETAEATRLKRTARRRYTRRKNRICYLQEIFSNEMAKVDDSFFHRLEESFLVEEDKKHERHPIFGNIVDEVAYHEKYPTIYHLRKKLVDSTDKADLRLIYLALAHMIKFRGHFLIEGDLNPDNSDVDKLFIQLVQTYNQLFEENPINASGVDAKAILSARLSKSRRLENLIAQLPGEKKNGLFGNLIALSLGLTPNFKSNFDLAEDAKLQLSKDTYDDDLDNLLAQIGDQYADLFLAAKNLSDAILLSDILRVNTEITKAPLSASMIKRYDEHHQDLTLLKALVRQQLPEKYKEIFFDQSKNGYAGYIDGGASQEEFYKFIKPILEKMDGTEELLVKLNREDLLRKQRTFDNGSIPHQIHLGELHAILRRQEDFYPFLKDNREKIEKILTFRIPYYVGPLARGNSRFAWMTRKSEETITPWNFEEVVDKGASAQSFIERMTNFDKNLPNEKVLPKHSLLYEYFTVYNELTKVKYVTEGMRKPAFLSGEQKKAIVDLLFKTNRKVTVKQLKEDYFKKIECFDSVEISGVEDRFNASLGTYHDLLKIIKDKDFLDNEENEDILEDIVLTLTLFEDREMIEERLKTYAHLFDDKVMKQLKRRRYTGWGRLSRKLINGIRDKQSGKTILDFLKSDGFANRNFMQLIHDDSLTFKEDIQKAQVSGQGDSLHEHIANLAGSPAIKKGILQTVKVVDELVKVMGRHKPENIVIEMARENQTTQKGQKNSRERMKRIEEGIKELGSQILKEHPVENTQLQNEKLYLYYLQNGRDMYVDQELDINRLSDYDVDHIVPQSFLKDDSIDNKVLTRSDKARGKSDNVPSEEVVKKMKNYWRQLLNAKLITQRKFDNLTKAERGGLSELDKAGFIKRQLVETRQITKHVAQILDSRMNTKYDENDKLIREVKVITLKSKLVSDFRKDFQFYKVREINNYHHAHDAYLNAVVGTALIKKYPKLESEFVYGDYKVYDVRKMIAKSEQEIGKATAKYFFYSNIMNFFKTEITLANGEIRKRPLIETNGETGEIVWDKGRDFATVRKVLSMPQVNIVKKTEVQTGGFSKESILPKRNSDKLIARKKDWDPKKYGGFDSPTVAYSVLVVAKVEKGKSKKLKSVKELLGITIMERSSFEKNPIDFLEAKGYKEVKKDLIIKLPKYSLFELENGRKRMLASAGELQKGNELALPSKYVNFLYLASHYEKLKGSPEDNEQKQLFVEQHKHYLDEIIEQISEFSKRVILADANLDKVLSAYNKHRDKPIREQAENIIHLFTLTNLGAPAAFKYFDTTIDRKRYTSTKEVLDATLIHQSITGLYETRIDLSQLGGDGGPAPGSSEAAAKGGMDPLQLLQPLEAEIKGTKLKAHWNSGATITCVPQAFLEEEVPIKNIWIKTIHGEKEQPVYYLTFKIQGRKVEAEVISSPYDYILVSPSDIPWLMKKPLQLTTLVPLQEYEERLLKQTMLTGSYKEKLQSLFLKYDALWQHWENQVGHRRIKPHHIATGTVNPRPQKQYPINPKAKASIQTVINDLLKQGVLIQQNSIMNTPVYPVPKPDGKWRMVLDYREVNKTIPLIAAQNQHSAGILSSIFRGKYKTTLDLSNGFWAHSITPESYWLTAFTWLGQQYCWTRLPQGFLNSPALFNADVVDLLKEVPNVQVYVDDIYISHDDPREHLEQLEKVFSLLLNAGYVVSLKKSEIAQHEVEFLGFNITKEGRGLTETFKQKLLNITPPRDLKQLQSILGKLNFARNFIPNFSELVKPLYNIIATAPGKYITWTTDNSQQLQNIISMLNSAENLEERNPEVRLIMKVNTSPSAGYIRFYNEFAKRPIMYLNYVYTKAEVKFTNTEKLLTTIHKGLIKALDLGMGQEILVYSPIVSMTKIQKTPLPERKALPIRWITWMSYLEDPRIQFHYDKTLPELQQVPTVTDDIIAKIKHPSEFSMVFYTDGSAIKHPNVNKSHNAGMGIAQVQFKPEFTVINTWSIPLGDHTAQLAEVAAVEFACKKALKIDGPVLIVTDSFYVAESVNKELPYWQSNGFFNNKKKPLKHVSKWKSIADCIQLKPDIIIIHEKGHQPTASTFHTEGNNLADKLATQGSYVVNAGKRTADGSEFEKRTADGSEFESPKKKAKVE

SEQ ID NO: 651 - protein, 2195 aa, synthetic construct
MPAAKRVKLDGGDKKYSIGLDIGTNSVGWAVITDEYKVPSKKFKVLGNTDRHSIKKNLIGALLFDSGETAEATRLKRTARRRYTRRKNRICYLQEIFSNEMAKVDDSFFHRLEESFLVEEDKKHERHPIFGNIVDEVAYHEKYPTIYHLRKKLVDSTDKADLRLIYLALAHMIKFRGHFLIEGDLNPDNSDVDKLFIQLVQTYNQLFEENPINASGVDAKAILSARLSKSRRLENLIAQLPGEKKNGLFGNLIALSLGLTPNFKSNFDLAEDAKLQLSKDTYDDDLDNLLAQIGDQYADLFLAAKNLSDAILLSDILRVNTEITKAPLSASMIKRYDEHHQDLTLLKALVRQQLPEKYKEIFFDQSKNGYAGYIDGGASQEEFYKFIKPILEKMDGTEELLVKLNREDLLRKQRTFDNGSIPHQIHLGELHAILRRQEDFYPFLKDNREKIEKILTFRIPYYVGPLARGNSRFAWMTRKSEETITPWNFEEVVDKGASAQSFIERMTNFDKNLPNEKVLPKHSLLYEYFTVYNELTKVKYVTEGMRKPAFLSGEQKKAIVDLLFKTNRKVTVKQLKEDYFKKIECFDSVEISGVEDRFNASLGTYHDLLKIIKDKDFLDNEENEDILEDIVLTLTLFEDREMIEERLKTYAHLFDDKVMKQLKRRRYTGWGRLSRKLINGIRDKQSGKTILDFLKSDGFANRNFMQLIHDDSLTFKEDIQKAQVSGQGDSLHEHIANLAGSPAIKKGILQTVKVVDELVKVMGRHKPENIVIEMARENQTTQKGQKNSRERMKRIEEGIKELGSQILKEHPVENTQLQNEKLYLYYLQNGRDMYVDQELDINRLSDYDVDHIVPQSFLKDDSIDNKVLTRSDKARGKSDNVPSEEVVKKMKNYWRQLLNAKLITQRKFDNLTKAERGGLSELDKAGFIKRQLVETRQITKHVAQILDSRMNTKYDENDKLIREVKVITLKSKLVSDFRKDFQFYKVREINNYHHAHDAYLNAVVGTALIKKYPKLESEFVYGDYKVYDVRKMIAKSEQEIGKATAKYFFYSNIMNFFKTEITLANGEIRKRPLIETNGETGEIVWDKGRDFATVRKVLSMPQVNIVKKTEVQTGGFSKESILPKRNSDKLIARKKDWDPKKYGGFDSPTVAYSVLVVAKVEKGKSKKLKSVKELLGITIMERSSFEKNPIDFLEAKGYKEVKKDLIIKLPKYSLFELENGRKRMLASAGELQKGNELALPSKYVNFLYLASHYEKLKGSPEDNEQKQLFVEQHKHYLDEIIEQISEFSKRVILADANLDKVLSAYNKHRDKPIREQAENIIHLFTLTNLGAPAAFKYFDTTIDRKRYTSTKEVLDATLIHQSITGLYETRIDLSQLGGDGGEAAAKEAAAKEAAAKEAAAKEAAAKEAAAKGGMDPLQLLQPLEAEIKGTKLKAHWNSGATITCVPQAFLEEEVPIKNIWIKTIHGEKEQPVYYLTFKIQGRKVEAEVISSPYDYILVSPSDIPWLMKKPLQLTTLVPLQEYEERLLKQTMLTGSYKEKLQSLFLKYDALWQHWENQVGHRRIKPHHIATGTVNPRPQKQYPINPKAKASIQTVINDLLKQGVLIQQNSIMNTPVYPVPKPDGKWRMVLDYREVNKTIPLIAAQNQHSAGILSSIFRGKYKTTLDLSNGFWAHSITPESYWLTAFTWLGQQYCWTRLPQGFLNSPALFNADVVDLLKEVPNVQVYVDDIYISHDDPREHLEQLEKVFSLLLNAGYVVSLKKSEIAQHEVEFLGFNITKEGRGLTETFKQKLLNITPPRDLKQLQSILGKLNFARNFIPNFSELVKPLYNIIATAPGKYITWTTDNSQQLQNIISMLNSAENLEERNPEVRLIMKVNTSPSAGYIRFYNEFAKRPIMYLNYVYTKAEVKFTNTEKLLTTIHKGLIKALDLGMGQEILVYSPIVSMTKIQKTPLPERKALPIRWITWMSYLEDPRIQFHYDKTLPELQQVPTVTDDIIAKIKHPSEFSMVFYTDGSAIKHPNVNKSHNAGMGIAQVQFKPEFTVINTWSIPLGDHTAQLAEVAAVEFACKKALKIDGPVLIVTDSFYVAESVNKELPYWQSNGFFNNKKKPLKHVSKWKSIADCIQLKPDIIIIHEKGHQPTASTFHTEGNNLADKLATQGSYVVNAGKRTADGSEFEKRTADGSEFESPKKKAKVE

SEQ ID NO: 652 - protein, 2198 aa, synthetic construct
MPAAKRVKLDGGDKKYSIGLDIGTNSVGWAVITDEYKVPSKKFKVLGNTDRHSIKKNLIGALLFDSGETAEATRLKRTARRRYTRRKNRICYLQEIFSNEMAKVDDSFFHRLEESFLVEEDKKHERHPIFGNIVDEVAYHEKYPTIYHLRKKLVDSTDKADLRLIYLALAHMIKFRGHFLIEGDLNPDNSDVDKLFIQLVQTYNQLFEENPINASGVDAKAILSARLSKSRRLENLIAQLPGEKKNGLFGNLIALSLGLTPNFKSNFDLAEDAKLQLSKDTYDDDLDNLLAQIGDQYADLFLAAKNLSDAILLSDILRVNTEITKAPLSASMIKRYDEHHQDLTLLKALVRQQLPEKYKEIFFDQSKNGYAGYIDGGASQEEFYKFIKPILEKMDGTEELLVKLNREDLLRKQRTFDNGSIPHQIHLGELHAILRRQEDFYPFLKDNREKIEKILTFRIPYYVGPLARGNSRFAWMTRKSEETITPWNFEEVVDKGASAQSFIERMTNFDKNLPNEKVLPKHSLLYEYFTVYNELTKVKYVTEGMRKPAFLSGEQKKAIVDLLFKTNRKVTVKQLKEDYFKKIECFDSVEISGVEDRFNASLGTYHDLLKIIKDKDFLDNEENEDILEDIVLTLTLFEDREMIEERLKTYAHLFDDKVMKQLKRRRYTGWGRLSRKLINGIRDKQSGKTILDFLKSDGFANRNFMQLIHDDSLTFKEDIQKAQVSGQGDSLHEHIANLAGSPAIKKGILQTVKVVDELVKVMGRHKPENIVIEMARENQTTQKGQKNSRERMKRIEEGIKELGSQILKEHPVENTQLQNEKLYLYYLQNGRDMYVDQELDINRLSDYDVDHIVPQSFLKDDSIDNKVLTRSDKARGKSDNVPSEEVVKKMKNYWRQLLNAKLITQRKFDNLTKAERGGLSELDKAGFIKRQLVETRQITKHVAQILDSRMNTKYDENDKLIREVKVITLKSKLVSDFRKDFQFYKVREINNYHHAHDAYLNAVVGTALIKKYPKLESEFVYGDYKVYDVRKMIAKSEQEIGKATAKYFFYSNIMNFFKTEITLANGEIRKRPLIETNGETGEIVWDKGRDFATVRKVLSMPQVNIVKKTEVQTGGFSKESILPKRNSDKLIARKKDWDPKKYGGFDSPTVAYSVLVVAKVEKGKSKKLKSVKELLGITIMERSSFEKNPIDFLEAKGYKEVKKDLIIKLPKYSLFELENGRKRMLASAGELQKGNELALPSKYVNFLYLASHYEKLKGSPEDNEQKQLFVEQHKHYLDEIIEQISEFSKRVILADANLDKVLSAYNKHRDKPIREQAENIIHLFTLTNLGAPAAFKYFDTTIDRKRYTSTKEVLDATLIHQSITGLYETRIDLSQLGGDGGSGGSSGGSSGSETPGTSESATPESSGGSSGGSSGGMDPLQLLQPLEAEIKGTKLKAHWNSGATITCVPQAFLEEEVPIKNIWIKTIHGEKEQPVYYLTFKIQGRKVEAEVISSPYDYILVSPSDIPWLMKKPLQLTTLVPLQEYEERLLKQTMLTGSYKEKLQSLFLKYDALWQHWENQVGHRRIKPHHIATGTVNPRPQKQYPINPKAKASIQTVINDLLKQGVLIQQNSIMNTPVYPVPKPDGKWRMVLDYREVNKTIPLIAAQNQHSAGILSSIFRGKYKTTLDLSNGFWAHSITPESYWLTAFTWLGQQYCWTRLPQGFLNSPALFNADVVDLLKEVPNVQVYVDDIYISHDDPREHLEQLEKVFSLLLNAGYVVSLKKSEIAQHEVEFLGFNITKEGRGLTETFKQKLLNITPPRDLKQLQSILGKLNFARNFIPNFSELVKPLYNIIATAPGKYITWTTDNSQQLQNIISMLNSAENLEERNPEVRLIMKVNTSPSAGYIRFYNEFAKRPIMYLNYVYTKAEVKFTNTEKLLTTIHKGLIKALDLGMGQEILVYSPIVSMTKIQKTPLPERKALPIRWITWMSYLEDPRIQFHYDKTLPELQQVPTVTDDIIAKIKHPSEFSMVFYTDGSAIKHPNVNKSHNAGMGIAQVQFKPEFTVINTWSIPLGDHTAQLAEVAAVEFACKKALKIDGPVLIVTDSFYVAESVNKELPYWQSNGFFNNKKKPLKHVSKWKSIADCIQLKPDIIIIHEKGHQPTASTFHTEGNNLADKLATQGSYVVNAGKRTADGSEFEKRTADGSEFESPKKKAKVE

SEQ ID NO: 653 - protein, 2176 aa, synthetic construct
MPAAKRVKLDGGDKKYSIGLDIGTNSVGWAVITDEYKVPSKKFKVLGNTDRHSIKKNLIGALLFDSGETAEATRLKRTARRRYTRRKNRICYLQEIFSNEMAKVDDSFFHRLEESFLVEEDKKHERHPIFGNIVDEVAYHEKYPTIYHLRKKLVDSTDKADLRLIYLALAHMIKFRGHFLIEGDLNPDNSDVDKLFIQLVQTYNQLFEENPINASGVDAKAILSARLSKSRRLENLIAQLPGEKKNGLFGNLIALSLGLTPNFKSNFDLAEDAKLQLSKDTYDDDLDNLLAQIGDQYADLFLAAKNLSDAILLSDILRVNTEITKAPLSASMIKRYDEHHQDLTLLKALVRQQLPEKYKEIFFDQSKNGYAGYIDGGASQEEFYKFIKPILEKMDGTEELLVKLNREDLLRKQRTFDNGSIPHQIHLGELHAILRRQEDFYPFLKDNREKIEKILTFRIPYYVGPLARGNSRFAWMTRKSEETITPWNFEEVVDKGASAQSFIERMTNFDKNLPNEKVLPKHSLLYEYFTVYNELTKVKYVTEGMRKPAFLSGEQKKAIVDLLFKTNRKVTVKQLKEDYFKKIECFDSVEISGVEDRFNASLGTYHDLLKIIKDKDFLDNEENEDILEDIVLTLTLFEDREMIEERLKTYAHLFDDKVMKQLKRRRYTGWGRLSRKLINGIRDKQSGKTILDFLKSDGFANRNFMQLIHDDSLTFKEDIQKAQVSGQGDSLHEHIANLAGSPAIKKGILQTVKVVDELVKVMGRHKPENIVIEMARENQTTQKGQKNSRERMKRIEEGIKELGSQILKEHPVENTQLQNEKLYLYYLQNGRDMYVDQELDINRLSDYDVDHIVPQSFLKDDSIDNKVLTRSDKARGKSDNVPSEEVVKKMKNYWRQLLNAKLITQRKFDNLTKAERGGLSELDKAGFIKRQLVETRQITKHVAQILDSRMNTKYDENDKLIREVKVITLKSKLVSDFRKDFQFYKVREINNYHHAHDAYLNAVVGTALIKKYPKLESEFVYGDYKVYDVRKMIAKSEQEIGKATAKYFFYSNIMNFFKTEITLANGEIRKRPLIETNGETGEIVWDKGRDFATVRKVLSMPQVNIVKKTEVQTGGFSKESILPKRNSDKLIARKKDWDPKKYGGFDSPTVAYSVLVVAKVEKGKSKKLKSVKELLGITIMERSSFEKNPIDFLEAKGYKEVKKDLIIKLPKYSLFELENGRKRMLASAGELQKGNELALPSKYVNFLYLASHYEKLKGSPEDNEQKQLFVEQHKHYLDEIIEQISEFSKRVILADANLDKVLSAYNKHRDKPIREQAENIIHLFTLTNLGAPAAFKYFDTTIDRKRYTSTKEVLDATLIHQSITGLYETRIDLSQLGGDGGGGGGGSEAAAKGGMDPLQLLQPLEAEIKGTKLKAHWNSGATITCVPQAFLEEEVPIKNIWIKTIHGEKEQPVYYLTFKIQGRKVEAEVISSPYDYILVSPSDIPWLMKKPLQLTTLVPLQEYEERLLKQTMLTGSYKEKLQSLFLKYDALWQHWENQVGHRRIKPHHIATGTVNPRPQKQYPINPKAKASIQTVINDLLKQGVLIQQNSIMNTPVYPVPKPDGKWRMVLDYREVNKTIPLIAAQNQHSAGILSSIFRGKYKTTLDLSNGFWAHSITPESYWLTAFTWLGQQYCWTRLPQGFLNSPALFNADVVDLLKEVPNVQVYVDDIYISHDDPREHLEQLEKVFSLLLNAGYVVSLKKSEIAQHEVEFLGFNITKEGRGLTETFKQKLLNITPPRDLKQLQSILGKLNFARNFIPNFSELVKPLYNIIATAPGKYITWTTDNSQQLQNIISMLNSAENLEERNPEVRLIMKVNTSPSAGYIRFYNEFAKRPIMYLNYVYTKAEVKFTNTEKLLTTIHKGLIKALDLGMGQEILVYSPIVSMTKIQKTPLPERKALPIRWITWMSYLEDPRIQFHYDKTLPELQQVPTVTDDIIAKIKHPSEFSMVFYTDGSAIKHPNVNKSHNAGMGIAQVQFKPEFTVINTWSIPLGDHTAQLAEVAAVEFACKKALKIDGPVLIVTDSFYVAESVNKELPYWQSNGFFNNKKKPLKHVSKWKSIADCIQLKPDIIIIHEKGHQPTASTFHTEGNNLADKLATQGSYVVNAGKRTADGSEFEKRTADGSEFESPKKKAKVE

SEQ ID NO: 654 - protein, 2178 aa, synthetic construct
MPAAKRVKLDGGDKKYSIGLDIGTNSVGWAVITDEYKVPSKKFKVLGNTDRHSIKKNLIGALLFDSGETAEATRLKRTARRRYTRRKNRICYLQEIFSNEMAKVDDSFFHRLEESFLVEEDKKHERHPIFGNIVDEVAYHEKYPTIYHLRKKLVDSTDKADLRLIYLALAHMIKFRGHFLIEGDLNPDNSDVDKLFIQLVQTYNQLFEENPINASGVDAKAILSARLSKSRRLENLIAQLPGEKKNGLFGNLIALSLGLTPNFKSNFDLAEDAKLQLSKDTYDDDLDNLLAQIGDQYADLFLAAKNLSDAILLSDILRVNTEITKAPLSASMIKRYDEHHQDLTLLKALVRQQLPEKYKEIFFDQSKNGYAGYIDGGASQEEFYKFIKPILEKMDGTEELLVKLNREDLLRKQRTFDNGSIPHQIHLGELHAILRRQEDFYPFLKDNREKIEKILTFRIPYYVGPLARGNSRFAWMTRKSEETITPWNFEEVVDKGASAQSFIERMTNFDKNLPNEKVLPKHSLLYEYFTVYNELTKVKYVTEGMRKPAFLSGEQKKAIVDLLFKTNRKVTVKQLKEDYFKKIECFDSVEISGVEDRFNASLGTYHDLLKIIKDKDFLDNEENEDILEDIVLTLTLFEDREMIEERLKTYAHLFDDKVMKQLKRRRYTGWGRLSRKLINGIRDKQSGKTILDFLKSDGFANRNFMQLIHDDSLTFKEDIQKAQVSGQGDSLHEHIANLAGSPAIKKGILQTVKVVDELVKVMGRHKPENIVIEMARENQTTQKGQKNSRERMKRIEEGIKELGSQILKEHPVENTQLQNEKLYLYYLQNGRDMYVDQELDINRLSDYDVDHIVPQSFLKDDSIDNKVLTRSDKARGKSDNVPSEEVVKKMKNYWRQLLNAKLITQRKFDNLTKAERGGLSELDKAGFIKRQLVETRQITKHVAQILDSRMNTKYDENDKLIREVKVITLKSKLVSDFRKDFQFYKVREINNYHHAHDAYLNAVVGTALIKKYPKLESEFVYGDYKVYDVRKMIAKSEQEIGKATAKYFFYSNIMNFFKTEITLANGEIRKRPLIETNGETGEIVWDKGRDFATVRKVLSMPQVNIVKKTEVQTGGFSKESILPKRNSDKLIARKKDWDPKKYGGFDSPTVAYSVLVVAKVEKGKSKKLKSVKELLGITIMERSSFEKNPIDFLEAKGYKEVKKDLIIKLPKYSLFELENGRKRMLASAGELQKGNELALPSKYVNFLYLASHYEKLKGSPEDNEQKQLFVEQHKHYLDEIIEQISEFSKRVILADANLDKVLSAYNKHRDKPIREQAENIIHLFTLTNLGAPAAFKYFDTTIDRKRYTSTKEVLDATLIHQSITGLYETRIDLSQLGGDGGPAPAPAPAPAPAPGGMDPLQLLQPLEAEIKGTKLKAHWNSGATITCVPQAFLEEEVPIKNIWIKTIHGEKEQPVYYLTFKIQGRKVEAEVISSPYDYILVSPSDIPWLMKKPLQLTTLVPLQEYEERLLKQTMLTGSYKEKLQSLFLKYDALWQHWENQVGHRRIKPHHIATGTVNPRPQKQYPINPKAKASIQTVINDLLKQGVLIQQNSIMNTPVYPVPKPDGKWRMVLDYREVNKTIPLIAAQNQHSAGILSSIFRGKYKTTLDLSNGFWAHSITPESYWLTAFTWLGQQYCWTRLPQGFLNSPALFNADVVDLLKEVPNVQVYVDDIYISHDDPREHLEQLEKVFSLLLNAGYVVSLKKSEIAQHEVEFLGFNITKEGRGLTETFKQKLLNITPPRDLKQLQSILGKLNFARNFIPNFSELVKPLYNIIATAPGKYITWTTDNSQQLQNIISMLNSAENLEERNPEVRLIMKVNTSPSAGYIRFYNEFAKRPIMYLNYVYTKAEVKFTNTEKLLTTIHKGLIKALDLGMGQEILVYSPIVSMTKIQKTPLPERKALPIRWITWMSYLEDPRIQFHYDKTLPELQQVPTVTDDIIAKIKHPSEFSMVFYTDGSAIKHPNVNKSHNAGMGIAQVQFKPEFTVINTWSIPLGDHTAQLAEVAAVEFACKKALKIDGPVLIVTDSFYVAESVNKELPYWQSNGFFNNKKKPLKHVSKWKSIADCIQLKPDIIIIHEKGHQPTASTFHTEGNNLADKLATQGSYVVNAGKRTADGSEFEKRTADGSEFESPKKKAKVE

SEQ ID NO: 655 - protein, 2176 aa, synthetic construct
MPAAKRVKLDGGDKKYSIGLDIGTNSVGWAVITDEYKVPSKKFKVLGNTDRHSIKKNLIGALLFDSGETAEATRLKRTARRRYTRRKNRICYLQEIFSNEMAKVDDSFFHRLEESFLVEEDKKHERHPIFGNIVDEVAYHEKYPTIYHLRKKLVDSTDKADLRLIYLALAHMIKFRGHFLIEGDLNPDNSDVDKLFIQLVQTYNQLFEENPINASGVDAKAILSARLSKSRRLENLIAQLPGEKKNGLFGNLIALSLGLTPNFKSNFDLAEDAKLQLSKDTYDDDLDNLLAQIGDQYADLFLAAKNLSDAILLSDILRVNTEITKAPLSASMIKRYDEHHQDLTLLKALVRQQLPEKYKEIFFDQSKNGYAGYIDGGASQEEFYKFIKPILEKMDGTEELLVKLNREDLLRKQRTFDNGSIPHQIHLGELHAILRRQEDFYPFLKDNREKIEKILTFRIPYYVGPLARGNSRFAWMTRKSEETITPWNFEEVVDKGASAQSFIERMTNFDKNLPNEKVLPKHSLLYEYFTVYNELTKVKYVTEGMRKPAFLSGEQKKAIVDLLFKTNRKVTVKQLKEDYFKKIECFDSVEISGVEDRFNASLGTYHDLLKIIKDKDFLDNEENEDILEDIVLTLTLFEDREMIEERLKTYAHLFDDKVMKQLKRRRYTGWGRLSRKLINGIRDKQSGKTILDFLKSDGFANRNFMQLIHDDSLTFKEDIQKAQVSGQGDSLHEHIANLAGSPAIKKGILQTVKVVDELVKVMGRHKPENIVIEMARENQTTQKGQKNSRERMKRIEEGIKELGSQILKEHPVENTQLQNEKLYLYYLQNGRDMYVDQELDINRLSDYDVDHIVPQSFLKDDSIDNKVLTRSDKARGKSDNVPSEEVVKKMKNYWRQLLNAKLITQRKFDNLTKAERGGLSELDKAGFIKRQLVETRQITKHVAQILDSRMNTKYDENDKLIREVKVITLKSKLVSDFRKDFQFYKVREINNYHHAHDAYLNAVVGTALIKKYPKLESEFVYGDYKVYDVRKMIAKSEQEIGKATAKYFFYSNIMNFFKTEITLANGEIRKRPLIETNGETGEIVWDKGRDFATVRKVLSMPQVNIVKKTEVQTGGFSKESILPKRNSDKLIARKKDWDPKKYGGFDSPTVAYSVLVVAKVEKGKSKKLKSVKELLGITIMERSSFEKNPIDFLEAKGYKEVKKDLIIKLPKYSLFELENGRKRMLASAGELQKGNELALPSKYVNFLYLASHYEKLKGSPEDNEQKQLFVEQHKHYLDEIIEQISEFSKRVILADANLDKVLSAYNKHRDKPIREQAENIIHLFTLTNLGAPAAFKYFDTTIDRKRYTSTKEVLDATLIHQSITGLYETRIDLSQLGGDGGGGGGSSEAAAKGGMDPLQLLQPLEAEIKGTKLKAHWNSGATITCVPQAFLEEEVPIKNIWIKTIHGEKEQPVYYLTFKIQGRKVEAEVISSPYDYILVSPSDIPWLMKKPLQLTTLVPLQEYEERLLKQTMLTGSYKEKLQSLFLKYDALWQHWENQVGHRRIKPHHIATGTVNPRPQKQYPINPKAKASIQTVINDLLKQGVLIQQNSIMNTPVYPVPKPDGKWRMVLDYREVNKTIPLIAAQNQHSAGILSSIFRGKYKTTLDLSNGFWAHSITPESYWLTAFTWLGQQYCWTRLPQGFLNSPALFNADVVDLLKEVPNVQVYVDDIYISHDDPREHLEQLEKVFSLLLNAGYVVSLKKSEIAQHEVEFLGFNITKEGRGLTETFKQKLLNITPPRDLKQLQSILGKLNFARNFIPNFSELVKPLYNIIATAPGKYITWTTDNSQQLQNIISMLNSAENLEERNPEVRLIMKVNTSPSAGYIRFYNEFAKRPIMYLNYVYTKAEVKFTNTEKLLTTIHKGLIKALDLGMGQEILVYSPIVSMTKIQKTPLPERKALPIRWITWMSYLEDPRIQFHYDKTLPELQQVPTVTDDIIAKIKHPSEFSMVFYTDGSAIKHPNVNKSHNAGMGIAQVQFKPEFTVINTWSIPLGDHTAQLAEVAAVEFACKKALKIDGPVLIVTDSFYVAESVNKELPYWQSNGFFNNKKKPLKHVSKWKSIADCIQLKPDIIIIHEKGHQPTASTFHTEGNNLADKLATQGSYVVNAGKRTADGSEFEKRTADGSEFESPKKKAKVE

SEQ ID NO: 656 - protein, 2181 aa, synthetic construct
MPAAKRVKLDGGDKKYSIGLDIGTNSVGWAVITDEYKVPSKKFKVLGNTDRHSIKKNLIGALLFDSGETAEATRLKRTARRRYTRRKNRICYLQEIFSNEMAKVDDSFFHRLEESFLVEEDKKHERHPIFGNIVDEVAYHEKYPTIYHLRKKLVDSTDKADLRLIYLALAHMIKFRGHFLIEGDLNPDNSDVDKLFIQLVQTYNQLFEENPINASGVDAKAILSARLSKSRRLENLIAQLPGEKKNGLFGNLIALSLGLTPNFKSNFDLAEDAKLQLSKDTYDDDLDNLLAQIGDQYADLFLAAKNLSDAILLSDILRVNTEITKAPLSASMIKRYDEHHQDLTLLKALVRQQLPEKYKEIFFDQSKNGYAGYIDGGASQEEFYKFIKPILEKMDGTEELLVKLNREDLLRKQRTFDNGSIPHQIHLGELHAILRRQEDFYPFLKDNREKIEKILTFRIPYYVGPLARGNSRFAWMTRKSEETITPWNFEEVVDKGASAQSFIERMTNFDKNLPNEKVLPKHSLLYEYFTVYNELTKVKYVTEGMRKPAFLSGEQKKAIVDLLFKTNRKVTVKQLKEDYFKKIECFDSVEISGVEDRFNASLGTYHDLLKIIKDKDFLDNEENEDILEDIVLTLTLFEDREMIEERLKTYAHLFDDKVMKQLKRRRYTGWGRLSRKLINGIRDKQSGKTILDFLKSDGFANRNFMQLIHDDSLTFKEDIQKAQVSGQGDSLHEHIANLAGSPAIKKGILQTVKVVDELVKVMGRHKPENIVIEMARENQTTQKGQKNSRERMKRIEEGIKELGSQILKEHPVENTQLQNEKLYLYYLQNGRDMYVDQELDINRLSDYDVDHIVPQSFLKDDSIDNKVLTRSDKARGKSDNVPSEEVVKKMKNYWRQLLNAKLITQRKFDNLTKAERGGLSELDKAGFIKRQLVETRQITKHVAQILDSRMNTKYDENDKLIREVKVITLKSKLVSDFRKDFQFYKVREINNYHHAHDAYLNAVVGTALIKKYPKLESEFVYGDYKVYDVRKMIAKSEQEIGKATAKYFFYSNIMNFFKTEITLANGEIRKRPLIETNGETGEIVWDKGRDFATVRKVLSMPQVNIVKKTEVQTGGFSKESILPKRNSDKLIARKKDWDPKKYGGFDSPTVAYSVLVVAKVEKGKSKKLKSVKELLGITIMERSSFEKNPIDFLEAKGYKEVKKDLIIKLPKYSLFELENGRKRMLASAGELQKGNELALPSKYVNFLYLASHYEKLKGSPEDNEQKQLFVEQHKHYLDEIIEQISEFSKRVILADANLDKVLSAYNKHRDKPIREQAENIIHLFTLTNLGAPAAFKYFDTTIDRKRYTSTKEVLDATLIHQSITGLYETRIDLSQLGGDGGSGSETPGTSESATPESGGMDPLQLLQPLEAEIKGTKLKAHWNSGATITCVPQAFLEEEVPIKNIWIKTIHGEKEQPVYYLTFKIQGRKVEAEVISSPYDYILVSPSDIPWLMKKPLQLTTLVPLQEYEERLLKQTMLTGSYKEKLQSLFLKYDALWQHWENQVGHRRIKPHHIATGTVNPRPQKQYPINPKAKASIQTVINDLLKQGVLIQQNSIMNTPVYPVPKPDGKWRMVLDYREVNKTIPLIAAQNQHSAGILSSIFRGKYKTTLDLSNGFWAHSITPESYWLTAFTWLGQQYCWTRLPQGFLNSPALFNADVVDLLKEVPNVQVYVDDIYISHDDPREHLEQLEKVFSLLLNAGYVVSLKKSEIAQHEVEFLGFNITKEGRGLTETFKQKLLNITPPRDLKQLQSILGKLNFARNFIPNFSELVKPLYNIIATAPGKYITWTTDNSQQLQNIISMLNSAENLEERNPEVRLIMKVNTSPSAGYIRFYNEFAKRPIMYLNYVYTKAEVKFTNTEKLLTTIHKGLIKALDLGMGQEILVYSPIVSMTKIQKTPLPERKALPIRWITWMSYLEDPRIQFHYDKTLPELQQVPTVTDDIIAKIKHPSEFSMVFYTDGSAIKHPNVNKSHNAGMGIAQVQFKPEFTVINTWSIPLGDHTAQLAEVAAVEFACKKALKIDGPVLIVTDSFYVAESVNKELPYWQSNGFFNNKKKPLKHVSKWKSIADCIQLKPDIIIIHEKGHQPTASTFHTEGNNLADKLATQGSYVVNAGKRTADGSEFEKRTADGSEFESPKKKAKVE

SEQ ID NO: 657 - protein, 2177 aa, synthetic construct
MPAAKRVKLDGGDKKYSIGLDIGTNSVGWAVITDEYKVPSKKFKVLGNTDRHSIKKNLIGALLFDSGETAEATRLKRTARRRYTRRKNRICYLQEIFSNEMAKVDDSFFHRLEESFLVEEDKKHERHPIFGNIVDEVAYHEKYPTIYHLRKKLVDSTDKADLRLIYLALAHMIKFRGHFLIEGDLNPDNSDVDKLFIQLVQTYNQLFEENPINASGVDAKAILSARLSKSRRLENLIAQLPGEKKNGLFGNLIALSLGLTPNFKSNFDLAEDAKLQLSKDTYDDDLDNLLAQIGDQYADLFLAAKNLSDAILLSDILRVNTEITKAPLSASMIKRYDEHHQDLTLLKALVRQQLPEKYKEIFFDQSKNGYAGYIDGGASQEEFYKFIKPILEKMDGTEELLVKLNREDLLRKQRTFDNGSIPHQIHLGELHAILRRQEDFYPFLKDNREKIEKILTFRIPYYVGPLARGNSRFAWMTRKSEETITPWNFEEVVDKGASAQSFIERMTNFDKNLPNEKVLPKHSLLYEYFTVYNELTKVKYVTEGMRKPAFLSGEQKKAIVDLLFKTNRKVTVKQLKEDYFKKIECFDSVEISGVEDRFNASLGTYHDLLKIIKDKDFLDNEENEDILEDIVLTLTLFEDREMIEERLKTYAHLFDDKVMKQLKRRRYTGWGRLSRKLINGIRDKQSGKTILDFLKSDGFANRNFMQLIHDDSLTFKEDIQKAQVSGQGDSLHEHIANLAGSPAIKKGILQTVKVVDELVKVMGRHKPENIVIEMARENQTTQKGQKNSRERMKRIEEGIKELGSQILKEHPVENTQLQNEKLYLYYLQNGRDMYVDQELDINRLSDYDVDHIVPQSFLKDDSIDNKVLTRSDKARGKSDNVPSEEVVKKMKNYWRQLLNAKLITQRKFDNLTKAERGGLSELDKAGFIKRQLVETRQITKHVAQILDSRMNTKYDENDKLIREVKVITLKSKLVSDFRKDFQFYKVREINNYHHAHDAYLNAVVGTALIKKYPKLESEFVYGDYKVYDVRKMIAKSEQEIGKATAKYFFYSNIMNFFKTEITLANGEIRKRPLIETNGETGEIVWDKGRDFATVRKVLSMPQVNIVKKTEVQTGGFSKESILPKRNSDKLIARKKDWDPKKYGGFDSPTVAYSVLVVAKVEKGKSKKLKSVKELLGITIMERSSFEKNPIDFLEAKGYKEVKKDLIIKLPKYSLFELENGRKRMLASAGELQKGNELALPSKYVNFLYLASHYEKLKGSPEDNEQKQLFVEQHKHYLDEIIEQISEFSKRVILADANLDKVLSAYNKHRDKPIREQAENIIHLFTLTNLGAPAAFKYFDTTIDRKRYTSTKEVLDATLIHQSITGLYETRIDLSQLGGDGGGSAGSAAGSGEFGGMDPLQLLQPLEAEIKGTKLKAHWNSGATITCVPQAFLEEEVPIKNIWIKTIHGEKEQPVYYLTFKIQGRKVEAEVISSPYDYILVSPSDIPWLMKKPLQLTTLVPLQEYEERLLKQTMLTGSYKEKLQSLFLKYDALWQHWENQVGHRRIKPHHIATGTVNPRPQKQYPINPKAKASIQTVINDLLKQGVLIQQNSIMNTPVYPVPKPDGKWRMVLDYREVNKTIPLIAAQNQHSAGILSSIFRGKYKTTLDLSNGFWAHSITPESYWLTAFTWLGQQYCWTRLPQGFLNSPALFNADVVDLLKEVPNVQVYVDDIYISHDDPREHLEQLEKVFSLLLNAGYVVSLKKSEIAQHEVEFLGFNITKEGRGLTETFKQKLLNITPPRDLKQLQSILGKLNFARNFIPNFSELVKPLYNIIATAPGKYITWTTDNSQQLQNIISMLNSAENLEERNPEVRLIMKVNTSPSAGYIRFYNEFAKRPIMYLNYVYTKAEVKFTNTEKLLTTIHKGLIKALDLGMGQEILVYSPIVSMTKIQKTPLPERKALPIRWITWMSYLEDPRIQFHYDKTLPELQQVPTVTDDIIAKIKHPSEFSMVFYTDGSAIKHPNVNKSHNAGMGIAQVQFKPEFTVINTWSIPLGDHTAQLAEVAAVEFACKKALKIDGPVLIVTDSFYVAESVNKELPYWQSNGFFNNKKKPLKHVSKWKSIADCIQLKPDIIIIHEKGHQPTASTFHTEGNNLADKLATQGSYVVNAGKRTADGSEFEKRTADGSEFESPKKKAKVE

SEQ ID NO: 658 - protein, 2168 aa, synthetic construct
MPAAKRVKLDGGDKKYSIGLDIGTNSVGWAVITDEYKVPSKKFKVLGNTDRHSIKKNLIGALLFDSGETAEATRLKRTARRRYTRRKNRICYLQEIFSNEMAKVDDSFFHRLEESFLVEEDKKHERHPIFGNIVDEVAYHEKYPTIYHLRKKLVDSTDKADLRLIYLALAHMIKFRGHFLIEGDLNPDNSDVDKLFIQLVQTYNQLFEENPINASGVDAKAILSARLSKSRRLENLIAQLPGEKKNGLFGNLIALSLGLTPNFKSNFDLAEDAKLQLSKDTYDDDLDNLLAQIGDQYADLFLAAKNLSDAILLSDILRVNTEITKAPLSASMIKRYDEHHQDLTLLKALVRQQLPEKYKEIFFDQSKNGYAGYIDGGASQEEFYKFIKPILEKMDGTEELLVKLNREDLLRKQRTFDNGSIPHQIHLGELHAILRRQEDFYPFLKDNREKIEKILTFRIPYYVGPLARGNSRFAWMTRKSEETITPWNFEEVVDKGASAQSFIERMTNFDKNLPNEKVLPKHSLLYEYFTVYNELTKVKYVTEGMRKPAFLSGEQKKAIVDLLFKTNRKVTVKQLKEDYFKKIECFDSVEISGVEDRFNASLGTYHDLLKIIKDKDFLDNEENEDILEDIVLTLTLFEDREMIEERLKTYAHLFDDKVMKQLKRRRYTGWGRLSRKLINGIRDKQSGKTILDFLKSDGFANRNFMQLIHDDSLTFKEDIQKAQVSGQGDSLHEHIANLAGSPAIKKGILQTVKVVDELVKVMGRHKPENIVIEMARENQTTQKGQKNSRERMKRIEEGIKELGSQILKEHPVENTQLQNEKLYLYYLQNGRDMYVDQELDINRLSDYDVDHIVPQSFLKDDSIDNKVLTRSDKARGKSDNVPSEEVVKKMKNYWRQLLNAKLITQRKFDNLTKAERGGLSELDKAGFIKRQLVETRQITKHVAQILDSRMNTKYDENDKLIREVKVITLKSKLVSDFRKDFQFYKVREINNYHHAHDAYLNAVVGTALIKKYPKLESEFVYGDYKVYDVRKMIAKSEQEIGKATAKYFFYSNIMNFFKTEITLANGEIRKRPLIETNGETGEIVWDKGRDFATVRKVLSMPQVNIVKKTEVQTGGFSKESILPKRNSDKLIARKKDWDPKKYGGFDSPTVAYSVLVVAKVEKGKSKKLKSVKELLGITIMERSSFEKNPIDFLEAKGYKEVKKDLIIKLPKYSLFELENGRKRMLASAGELQKGNELALPSKYVNFLYLASHYEKLKGSPEDNEQKQLFVEQHKHYLDEIIEQISEFSKRVILADANLDKVLSAYNKHRDKPIREQAENIIHLFTLTNLGAPAAFKYFDTTIDRKRYTSTKEVLDATLIHQSITGLYETRIDLSQLGGDGGGGGGGMDPLQLLQPLEAEIKGTKLKAHWNSGATITCVPQAFLEEEVPIKNIWIKTIHGEKEQPVYYLTFKIQGRKVEAEVISSPYDYILVSPSDIPWLMKKPLQLTTLVPLQEYEERLLKQTMLTGSYKEKLQSLFLKYDALWQHWENQVGHRRIKPHHIATGTVNPRPQKQYPINPKAKASIQTVINDLLKQGVLIQQNSIMNTPVYPVPKPDGKWRMVLDYREVNKTIPLIAAQNQHSAGILSSIFRGKYKTTLDLSNGFWAHSITPESYWLTAFTWLGQQYCWTRLPQGFLNSPALFNADVVDLLKEVPNVQVYVDDIYISHDDPREHLEQLEKVFSLLLNAGYVVSLKKSEIAQHEVEFLGFNITKEGRGLTETFKQKLLNITPPRDLKQLQSILGKLNFARNFIPNFSELVKPLYNIIATAPGKYITWTTDNSQQLQNIISMLNSAENLEERNPEVRLIMKVNTSPSAGYIRFYNEFAKRPIMYLNYVYTKAEVKFTNTEKLLTTIHKGLIKALDLGMGQEILVYSPIVSMTKIQKTPLPERKALPIRWITWMSYLEDPRIQFHYDKTLPELQQVPTVTDDIIAKIKHPSEFSMVFYTDGSAIKHPNVNKSHNAGMGIAQVQFKPEFTVINTWSIPLGDHTAQLAEVAAVEFACKKALKIDGPVLIVTDSFYVAESVNKELPYWQSNGFFNNKKKPLKHVSKWKSIADCIQLKPDIIIIHEKGHQPTASTFHTEGNNLADKLATQGSYVVNAGKRTADGSEFEKRTADGSEFESPKKKAKVE

SEQ ID NO: 659 - protein, 2176 aa, synthetic construct
MPAAKRVKLDGGDKKYSIGLDIGTNSVGWAVITDEYKVPSKKFKVLGNTDRHSIKKNLIGALLFDSGETAEATRLKRTARRRYTRRKNRICYLQEIFSNEMAKVDDSFFHRLEESFLVEEDKKHERHPIFGNIVDEVAYHEKYPTIYHLRKKLVDSTDKADLRLIYLALAHMIKFRGHFLIEGDLNPDNSDVDKLFIQLVQTYNQLFEENPINASGVDAKAILSARLSKSRRLENLIAQLPGEKKNGLFGNLIALSLGLTPNFKSNFDLAEDAKLQLSKDTYDDDLDNLLAQIGDQYADLFLAAKNLSDAILLSDILRVNTEITKAPLSASMIKRYDEHHQDLTLLKALVRQQLPEKYKEIFFDQSKNGYAGYIDGGASQEEFYKFIKPILEKMDGTEELLVKLNREDLLRKQRTFDNGSIPHQIHLGELHAILRRQEDFYPFLKDNREKIEKILTFRIPYYVGPLARGNSRFAWMTRKSEETITPWNFEEVVDKGASAQSFIERMTNFDKNLPNEKVLPKHSLLYEYFTVYNELTKVKYVTEGMRKPAFLSGEQKKAIVDLLFKTNRKVTVKQLKEDYFKKIECFDSVEISGVEDRFNASLGTYHDLLKIIKDKDFLDNEENEDILEDIVLTLTLFEDREMIEERLKTYAHLFDDKVMKQLKRRRYTGWGRLSRKLINGIRDKQSGKTILDFLKSDGFANRNFMQLIHDDSLTFKEDIQKAQVSGQGDSLHEHIANLAGSPAIKKGILQTVKVVDELVKVMGRHKPENIVIEMARENQTTQKGQKNSRERMKRIEEGIKELGSQILKEHPVENTQLQNEKLYLYYLQNGRDMYVDQELDINRLSDYDVDHIVPQSFLKDDSIDNKVLTRSDKARGKSDNVPSEEVVKKMKNYWRQLLNAKLITQRKFDNLTKAERGGLSELDKAGFIKRQLVETRQITKHVAQILDSRMNTKYDENDKLIREVKVITLKSKLVSDFRKDFQFYKVREINNYHHAHDAYLNAVVGTALIKKYPKLESEFVYGDYKVYDVRKMIAKSEQEIGKATAKYFFYSNIMNFFKTEITLANGEIRKRPLIETNGETGEIVWDKGRDFATVRKVLSMPQVNIVKKTEVQTGGFSKESILPKRNSDKLIARKKDWDPKKYGGFDSPTVAYSVLVVAKVEKGKSKKLKSVKELLGITIMERSSFEKNPIDFLEAKGYKEVKKDLIIKLPKYSLFELENGRKRMLASAGELQKGNELALPSKYVNFLYLASHYEKLKGSPEDNEQKQLFVEQHKHYLDEIIEQISEFSKRVILADANLDKVLSAYNKHRDKPIREQAENIIHLFTLTNLGAPAAFKYFDTTIDRKRYTSTKEVLDATLIHQSITGLYETRIDLSQLGGDGGGGSGGGEAAAKGGMDPLQLLQPLEAEIKGTKLKAHWNSGATITCVPQAFLEEEVPIKNIWIKTIHGEKEQPVYYLTFKIQGRKVEAEVISSPYDYILVSPSDIPWLMKKPLQLTTLVPLQEYEERLLKQTMLTGSYKEKLQSLFLKYDALWQHWENQVGHRRIKPHHIATGTVNPRPQKQYPINPKAKASIQTVINDLLKQGVLIQQNSIMNTPVYPVPKPDGKWRMVLDYREVNKTIPLIAAQNQHSAGILSSIFRGKYKTTLDLSNGFWAHSITPESYWLTAFTWLGQQYCWTRLPQGFLNSPALFNADVVDLLKEVPNVQVYVDDIYISHDDPREHLEQLEKVFSLLLNAGYVVSLKKSEIAQHEVEFLGFNITKEGRGLTETFKQKLLNITPPRDLKQLQSILGKLNFARNFIPNFSELVKPLYNIIATAPGKYITWTTDNSQQLQNIISMLNSAENLEERNPEVRLIMKVNTSPSAGYIRFYNEFAKRPIMYLNYVYTKAEVKFTNTEKLLTTIHKGLIKALDLGMGQEILVYSPIVSMTKIQKTPLPERKALPIRWITWMSYLEDPRIQFHYDKTLPELQQVPTVTDDIIAKIKHPSEFSMVFYTDGSAIKHPNVNKSHNAGMGIAQVQFKPEFTVINTWSIPLGDHTAQLAEVAAVEFACKKALKIDGPVLIVTDSFYVAESVNKELPYWQSNGFFNNKKKPLKHVSKWKSIADCIQLKPDIIIIHEKGHQPTASTFHTEGNNLADKLATQGSYVVNAGKRTADGSEFEKRTADGSEFESPKKKAKVE

SEQ ID NO: 660 - protein, 2180 aa, synthetic construct
MPAAKRVKLDGGDKKYSIGLDIGTNSVGWAVITDEYKVPSKKFKVLGNTDRHSIKKNLIGALLFDSGETAEATRLKRTARRRYTRRKNRICYLQEIFSNEMAKVDDSFFHRLEESFLVEEDKKHERHPIFGNIVDEVAYHEKYPTIYHLRKKLVDSTDKADLRLIYLALAHMIKFRGHFLIEGDLNPDNSDVDKLFIQLVQTYNQLFEENPINASGVDAKAILSARLSKSRRLENLIAQLPGEKKNGLFGNLIALSLGLTPNFKSNFDLAEDAKLQLSKDTYDDDLDNLLAQIGDQYADLFLAAKNLSDAILLSDILRVNTEITKAPLSASMIKRYDEHHQDLTLLKALVRQQLPEKYKEIFFDQSKNGYAGYIDGGASQEEFYKFIKPILEKMDGTEELLVKLNREDLLRKQRTFDNGSIPHQIHLGELHAILRRQEDFYPFLKDNREKIEKILTFRIPYYVGPLARGNSRFAWMTRKSEETITPWNFEEVVDKGASAQSFIERMTNFDKNLPNEKVLPKHSLLYEYFTVYNELTKVKYVTEGMRKPAFLSGEQKKAIVDLLFKTNRKVTVKQLKEDYFKKIECFDSVEISGVEDRFNASLGTYHDLLKIIKDKDFLDNEENEDILEDIVLTLTLFEDREMIEERLKTYAHLFDDKVMKQLKRRRYTGWGRLSRKLINGIRDKQSGKTILDFLKSDGFANRNFMQLIHDDSLTFKEDIQKAQVSGQGDSLHEHIANLAGSPAIKKGILQTVKVVDELVKVMGRHKPENIVIEMARENQTTQKGQKNSRERMKRIEEGIKELGSQILKEHPVENTQLQNEKLYLYYLQNGRDMYVDQELDINRLSDYDVDHIVPQSFLKDDSIDNKVLTRSDKARGKSDNVPSEEVVKKMKNYWRQLLNAKLITQRKFDNLTKAERGGLSELDKAGFIKRQLVETRQITKHVAQILDSRMNTKYDENDKLIREVKVITLKSKLVSDFRKDFQFYKVREINNYHHAHDAYLNAVVGTALIKKYPKLESEFVYGDYKVYDVRKMIAKSEQEIGKATAKYFFYSNIMNFFKTEITLANGEIRKRPLIETNGETGEIVWDKGRDFATVRKVLSMPQVNIVKKTEVQTGGFSKESILPKRNSDKLIARKKDWDPKKYGGFDSPTVAYSVLVVAKVEKGKSKKLKSVKELLGITIMERSSFEKNPIDFLEAKGYKEVKKDLIIKLPKYSLFELENGRKRMLASAGELQKGNELALPSKYVNFLYLASHYEKLKGSPEDNEQKQLFVEQHKHYLDEIIEQISEFSKRVILADANLDKVLSAYNKHRDKPIREQAENIIHLFTLTNLGAPAAFKYFDTTIDRKRYTSTKEVLDATLIHQSITGLYETRIDLSQLGGDGGEAAAKGGGGSEAAAKGGMDPLQLLQPLEAEIKGTKLKAHWNSGATITCVPQAFLEEEVPIKNIWIKTIHGEKEQPVYYLTFKIQGRKVEAEVISSPYDYILVSPSDIPWLMKKPLQLTTLVPLQEYEERLLKQTMLTGSYKEKLQSLFLKYDALWQHWENQVGHRRIKPHHIATGTVNPRPQKQYPINPKAKASIQTVINDLLKQGVLIQQNSIMNTPVYPVPKPDGKWRMVLDYREVNKTIPLIAAQNQHSAGILSSIFRGKYKTTLDLSNGFWAHSITPESYWLTAFTWLGQQYCWTRLPQGFLNSPALFNADVVDLLKEVPNVQVYVDDIYISHDDPREHLEQLEKVFSLLLNAGYVVSLKKSEIAQHEVEFLGFNITKEGRGLTETFKQKLLNITPPRDLKQLQSILGKLNFARNFIPNFSELVKPLYNIIATAPGKYITWTTDNSQQLQNIISMLNSAENLEERNPEVRLIMKVNTSPSAGYIRFYNEFAKRPIMYLNYVYTKAEVKFTNTEKLLTTIHKGLIKALDLGMGQEILVYSPIVSMTKIQKTPLPERKALPIRWITWMSYLEDPRIQFHYDKTLPELQQVPTVTDDIIAKIKHPSEFSMVFYTDGSAIKHPNVNKSHNAGMGIAQVQFKPEFTVINTWSIPLGDHTAQLAEVAAVEFACKKALKIDGPVLIVTDSFYVAESVNKELPYWQSNGFFNNKKKPLKHVSKWKSIADCIQLKPDIIIIHEKGHQPTASTFHTEGNNLADKLATQGSYVVNAGKRTADGSEFEKRTADGSEFESPKKKAKVE

SEQ ID NO: 661 - protein, 2176 aa, synthetic construct
MPAAKRVKLDGGDKKYSIGLDIGTNSVGWAVITDEYKVPSKKFKVLGNTDRHSIKKNLIGALLFDSGETAEATRLKRTARRRYTRRKNRICYLQEIFSNEMAKVDDSFFHRLEESFLVEEDKKHERHPIFGNIVDEVAYHEKYPTIYHLRKKLVDSTDKADLRLIYLALAHMIKFRGHFLIEGDLNPDNSDVDKLFIQLVQTYNQLFEENPINASGVDAKAILSARLSKSRRLENLIAQLPGEKKNGLFGNLIALSLGLTPNFKSNFDLAEDAKLQLSKDTYDDDLDNLLAQIGDQYADLFLAAKNLSDAILLSDILRVNTEITKAPLSASMIKRYDEHHQDLTLLKALVRQQLPEKYKEIFFDQSKNGYAGYIDGGASQEEFYKFIKPILEKMDGTEELLVKLNREDLLRKQRTFDNGSIPHQIHLGELHAILRRQEDFYPFLKDNREKIEKILTFRIPYYVGPLARGNSRFAWMTRKSEETITPWNFEEVVDKGASAQSFIERMTNFDKNLPNEKVLPKHSLLYEYFTVYNELTKVKYVTEGMRKPAFLSGEQKKAIVDLLFKTNRKVTVKQLKEDYFKKIECFDSVEISGVEDRFNASLGTYHDLLKIIKDKDFLDNEENEDILEDIVLTLTLFEDREMIEERLKTYAHLFDDKVMKQLKRRRYTGWGRLSRKLINGIRDKQSGKTILDFLKSDGFANRNFMQLIHDDSLTFKEDIQKAQVSGQGDSLHEHIANLAGSPAIKKGILQTVKVVDELVKVMGRHKPENIVIEMARENQTTQKGQKNSRERMKRIEEGIKELGSQILKEHPVENTQLQNEKLYLYYLQNGRDMYVDQELDINRLSDYDVDHIVPQSFLKDDSIDNKVLTRSDKARGKSDNVPSEEVVKKMKNYWRQLLNAKLITQRKFDNLTKAERGGLSELDKAGFIKRQLVETRQITKHVAQILDSRMNTKYDENDKLIREVKVITLKSKLVSDFRKDFQFYKVREINNYHHAHDAYLNAVVGTALIKKYPKLESEFVYGDYKVYDVRKMIAKSEQEIGKATAKYFFYSNIMNFFKTEITLANGEIRKRPLIETNGETGEIVWDKGRDFATVRKVLSMPQVNIVKKTEVQTGGFSKESILPKRNSDKLIARKKDWDPKKYGGFDSPTVAYSVLVVAKVEKGKSKKLKSVKELLGITIMERSSFEKNPIDFLEAKGYKEVKKDLIIKLPKYSLFELENGRKRMLASAGELQKGNELALPSKYVNFLYLASHYEKLKGSPEDNEQKQLFVEQHKHYLDEIIEQISEFSKRVILADANLDKVLSAYNKHRDKPIREQAENIIHLFTLTNLGAPAAFKYFDTTIDRKRYTSTKEVLDATLIHQSITGLYETRIDLSQLGGDGGGGSEAAAKGGGGGMDPLQLLQPLEAEIKGTKLKAHWNSGATITCVPQAFLEEEVPIKNIWIKTIHGEKEQPVYYLTFKIQGRKVEAEVISSPYDYILVSPSDIPWLMKKPLQLTTLVPLQEYEERLLKQTMLTGSYKEKLQSLFLKYDALWQHWENQVGHRRIKPHHIATGTVNPRPQKQYPINPKAKASIQTVINDLLKQGVLIQQNSIMNTPVYPVPKPDGKWRMVLDYREVNKTIPLIAAQNQHSAGILSSIFRGKYKTTLDLSNGFWAHSITPESYWLTAFTWLGQQYCWTRLPQGFLNSPALFNADVVDLLKEVPNVQVYVDDIYISHDDPREHLEQLEKVFSLLLNAGYVVSLKKSEIAQHEVEFLGFNITKEGRGLTETFKQKLLNITPPRDLKQLQSILGKLNFARNFIPNFSELVKPLYNIIATAPGKYITWTTDNSQQLQNIISMLNSAENLEERNPEVRLIMKVNTSPSAGYIRFYNEFAKRPIMYLNYVYTKAEVKFTNTEKLLTTIHKGLIKALDLGMGQEILVYSPIVSMTKIQKTPLPERKALPIRWITWMSYLEDPRIQFHYDKTLPELQQVPTVTDDIIAKIKHPSEFSMVFYTDGSAIKHPNVNKSHNAGMGIAQVQFKPEFTVINTWSIPLGDHTAQLAEVAAVEFACKKALKIDGPVLIVTDSFYVAESVNKELPYWQSNGFFNNKKKPLKHVSKWKSIADCIQLKPDIIIIHEKGHQPTASTFHTEGNNLADKLATQGSYVVNAGKRTADGSEFEKRTADGSEFESPKKKAKVE

SEQ ID NO: 662 - protein, 2183 aa, synthetic construct
MPAAKRVKLDGGDKKYSIGLDIGTNSVGWAVITDEYKVPSKKFKVLGNTDRHSIKKNLIGALLFDSGETAEATRLKRTARRRYTRRKNRICYLQEIFSNEMAKVDDSFFHRLEESFLVEEDKKHERHPIFGNIVDEVAYHEKYPTIYHLRKKLVDSTDKADLRLIYLALAHMIKFRGHFLIEGDLNPDNSDVDKLFIQLVQTYNQLFEENPINASGVDAKAILSARLSKSRRLENLIAQLPGEKKNGLFGNLIALSLGLTPNFKSNFDLAEDAKLQLSKDTYDDDLDNLLAQIGDQYADLFLAAKNLSDAILLSDILRVNTEITKAPLSASMIKRYDEHHQDLTLLKALVRQQLPEKYKEIFFDQSKNGYAGYIDGGASQEEFYKFIKPILEKMDGTEELLVKLNREDLLRKQRTFDNGSIPHQIHLGELHAILRRQEDFYPFLKDNREKIEKILTFRIPYYVGPLARGNSRFAWMTRKSEETITPWNFEEVVDKGASAQSFIERMTNFDKNLPNEKVLPKHSLLYEYFTVYNELTKVKYVTEGMRKPAFLSGEQKKAIVDLLFKTNRKVTVKQLKEDYFKKIECFDSVEISGVEDRFNASLGTYHDLLKIIKDKDFLDNEENEDILEDIVLTLTLFEDREMIEERLKTYAHLFDDKVMKQLKRRRYTGWGRLSRKLINGIRDKQSGKTILDFLKSDGFANRNFMQLIHDDSLTFKEDIQKAQVSGQGDSLHEHIANLAGSPAIKKGILQTVKVVDELVKVMGRHKPENIVIEMARENQTTQKGQKNSRERMKRIEEGIKELGSQILKEHPVENTQLQNEKLYLYYLQNGRDMYVDQELDINRLSDYDVDHIVPQSFLKDDSIDNKVLTRSDKARGKSDNVPSEEVVKKMKNYWRQLLNAKLITQRKFDNLTKAERGGLSELDKAGFIKRQLVETRQITKHVAQILDSRMNTKYDENDKLIREVKVITLKSKLVSDFRKDFQFYKVREINNYHHAHDAYLNAVVGTALIKKYPKLESEFVYGDYKVYDVRKMIAKSEQEIGKATAKYFFYSNIMNFFKTEITLANGEIRKRPLIETNGETGEIVWDKGRDFATVRKVLSMPQVNIVKKTEVQTGGFSKESILPKRNSDKLIARKKDWDPKKYGGFDSPTVAYSVLVVAKVEKGKSKKLKSVKELLGITIMERSSFEKNPIDFLEAKGYKEVKKDLIIKLPKYSLFELENGRKRMLASAGELQKGNELALPSKYVNFLYLASHYEKLKGSPEDNEQKQLFVEQHKHYLDEIIEQISEFSKRVILADANLDKVLSAYNKHRDKPIREQAENIIHLFTLTNLGAPAAFKYFDTTIDRKRYTSTKEVLDATLIHQSITGLYETRIDLSQLGGDGGGSSGSSGSSGSSGSSGSSGGMDPLQLLQPLEAEIKGTKLKAHWNSGATITCVPQAFLEEEVPIKNIWIKTIHGEKEQPVYYLTFKIQGRKVEAEVISSPYDYILVSPSDIPWLMKKPLQLTTLVPLQEYEERLLKQTMLTGSYKEKLQSLFLKYDALWQHWENQVGHRRIKPHHIATGTVNPRPQKQYPINPKAKASIQTVINDLLKQGVLIQQNSIMNTPVYPVPKPDGKWRMVLDYREVNKTIPLIAAQNQHSAGILSSIFRGKYKTTLDLSNGFWAHSITPESYWLTAFTWLGQQYCWTRLPQGFLNSPALFNADVVDLLKEVPNVQVYVDDIYISHDDPREHLEQLEKVFSLLLNAGYVVSLKKSEIAQHEVEFLGFNITKEGRGLTETFKQKLLNITPPRDLKQLQSILGKLNFARNFIPNFSELVKPLYNIIATAPGKYITWTTDNSQQLQNIISMLNSAENLEERNPEVRLIMKVNTSPSAGYIRFYNEFAKRPIMYLNYVYTKAEVKFTNTEKLLTTIHKGLIKALDLGMGQEILVYSPIVSMTKIQKTPLPERKALPIRWITWMSYLEDPRIQFHYDKTLPELQQVPTVTDDIIAKIKHPSEFSMVFYTDGSAIKHPNVNKSHNAGMGIAQVQFKPEFTVINTWSIPLGDHTAQLAEVAAVEFACKKALKIDGPVLIVTDSFYVAESVNKELPYWQSNGFFNNKKKPLKHVSKWKSIADCIQLKPDIIIIHEKGHQPTASTFHTEGNNLADKLATQGSYVVNAGKRTADGSEFEKRTADGSEFESPKKKAKVE

SEQ ID NO: 663 - protein, 2176 aa, synthetic construct
MPAAKRVKLDGGDKKYSIGLDIGTNSVGWAVITDEYKVPSKKFKVLGNTDRHSIKKNLIGALLFDSGETAEATRLKRTARRRYTRRKNRICYLQEIFSNEMAKVDDSFFHRLEESFLVEEDKKHERHPIFGNIVDEVAYHEKYPTIYHLRKKLVDSTDKADLRLIYLALAHMIKFRGHFLIEGDLNPDNSDVDKLFIQLVQTYNQLFEENPINASGVDAKAILSARLSKSRRLENLIAQLPGEKKNGLFGNLIALSLGLTPNFKSNFDLAEDAKLQLSKDTYDDDLDNLLAQIGDQYADLFLAAKNLSDAILLSDILRVNTEITKAPLSASMIKRYDEHHQDLTLLKALVRQQLPEKYKEIFFDQSKNGYAGYIDGGASQEEFYKFIKPILEKMDGTEELLVKLNREDLLRKQRTFDNGSIPHQIHLGELHAILRRQEDFYPFLKDNREKIEKILTFRIPYYVGPLARGNSRFAWMTRKSEETITPWNFEEVVDKGASAQSFIERMTNFDKNLPNEKVLPKHSLLYEYFTVYNELTKVKYVTEGMRKPAFLSGEQKKAIVDLLFKTNRKVTVKQLKEDYFKKIECFDSVEISGVEDRFNASLGTYHDLLKIIKDKDFLDNEENEDILEDIVLTLTLFEDREMIEERLKTYAHLFDDKVMKQLKRRRYTGWGRLSRKLINGIRDKQSGKTILDFLKSDGFANRNFMQLIHDDSLTFKEDIQKAQVSGQGDSLHEHIANLAGSPAIKKGILQTVKVVDELVKVMGRHKPENIVIEMARENQTTQKGQKNSRERMKRIEEGIKELGSQILKEHPVENTQLQNEKLYLYYLQNGRDMYVDQELDINRLSDYDVDHIVPQSFLKDDSIDNKVLTRSDKARGKSDNVPSEEVVKKMKNYWRQLLNAKLITQRKFDNLTKAERGGLSELDKAGFIKRQLVETRQITKHVAQILDSRMNTKYDENDKLIREVKVITLKSKLVSDFRKDFQFYKVREINNYHHAHDAYLNAVVGTALIKKYPKLESEFVYGDYKVYDVRKMIAKSEQEIGKATAKYFFYSNIMNFFKTEITLANGEIRKRPLIETNGETGEIVWDKGRDFATVRKVLSMPQVNIVKKTEVQTGGFSKESILPKRNSDKLIARKKDWDPKKYGGFDSPTVAYSVLVVAKVEKGKSKKLKSVKELLGITIMERSSFEKNPIDFLEAKGYKEVKKDLIIKLPKYSLFELENGRKRMLASAGELQKGNELALPSKYVNFLYLASHYEKLKGSPEDNEQKQLFVEQHKHYLDEIIEQISEFSKRVILADANLDKVLSAYNKHRDKPIREQAENIIHLFTLTNLGAPAAFKYFDTTIDRKRYTSTKEVLDATLIHQSITGLYETRIDLSQLGGDGGGGGPAPEAAAKGGMDPLQLLQPLEAEIKGTKLKAHWNSGATITCVPQAFLEEEVPIKNIWIKTIHGEKEQPVYYLTFKIQGRKVEAEVISSPYDYILVSPSDIPWLMKKPLQLTTLVPLQEYEERLLKQTMLTGSYKEKLQSLFLKYDALWQHWENQVGHRRIKPHHIATGTVNPRPQKQYPINPKAKASIQTVINDLLKQGVLIQQNSIMNTPVYPVPKPDGKWRMVLDYREVNKTIPLIAAQNQHSAGILSSIFRGKYKTTLDLSNGFWAHSITPESYWLTAFTWLGQQYCWTRLPQGFLNSPALFNADVVDLLKEVPNVQVYVDDIYISHDDPREHLEQLEKVFSLLLNAGYVVSLKKSEIAQHEVEFLGFNITKEGRGLTETFKQKLLNITPPRDLKQLQSILGKLNFARNFIPNFSELVKPLYNIIATAPGKYITWTTDNSQQLQNIISMLNSAENLEERNPEVRLIMKVNTSPSAGYIRFYNEFAKRPIMYLNYVYTKAEVKFTNTEKLLTTIHKGLIKALDLGMGQEILVYSPIVSMTKIQKTPLPERKALPIRWITWMSYLEDPRIQFHYDKTLPELQQVPTVTDDIIAKIKHPSEFSMVFYTDGSAIKHPNVNKSHNAGMGIAQVQFKPEFTVINTWSIPLGDHTAQLAEVAAVEFACKKALKIDGPVLIVTDSFYVAESVNKELPYWQSNGFFNNKKKPLKHVSKWKSIADCIQLKPDIIIIHEKGHQPTASTFHTEGNNLADKLATQGSYVVNAGKRTADGSEFEKRTADGSEFESPKKKAKVE

SEQ ID NO: 664 - protein, 2176 aa, synthetic construct
MPAAKRVKLDGGDKKYSIGLDIGTNSVGWAVITDEYKVPSKKFKVLGNTDRHSIKKNLIGALLFDSGETAEATRLKRTARRRYTRRKNRICYLQEIFSNEMAKVDDSFFHRLEESFLVEEDKKHERHPIFGNIVDEVAYHEKYPTIYHLRKKLVDSTDKADLRLIYLALAHMIKFRGHFLIEGDLNPDNSDVDKLFIQLVQTYNQLFEENPINASGVDAKAILSARLSKSRRLENLIAQLPGEKKNGLFGNLIALSLGLTPNFKSNFDLAEDAKLQLSKDTYDDDLDNLLAQIGDQYADLFLAAKNLSDAILLSDILRVNTEITKAPLSASMIKRYDEHHQDLTLLKALVRQQLPEKYKEIFFDQSKNGYAGYIDGGASQEEFYKFIKPILEKMDGTEELLVKLNREDLLRKQRTFDNGSIPHQIHLGELHAILRRQEDFYPFLKDNREKIEKILTFRIPYYVGPLARGNSRFAWMTRKSEETITPWNFEEVVDKGASAQSFIERMTNFDKNLPNEKVLPKHSLLYEYFTVYNELTKVKYVTEGMRKPAFLSGEQKKAIVDLLFKTNRKVTVKQLKEDYFKKIECFDSVEISGVEDRFNASLGTYHDLLKIIKDKDFLDNEENEDILEDIVLTLTLFEDREMIEERLKTYAHLFDDKVMKQLKRRRYTGWGRLSRKLINGIRDKQSGKTILDFLKSDGFANRNFMQLIHDDSLTFKEDIQKAQVSGQGDSLHEHIANLAGSPAIKKGILQTVKVVDELVKVMGRHKPENIVIEMARENQTTQKGQKNSRERMKRIEEGIKELGSQILKEHPVENTQLQNEKLYLYYLQNGRDMYVDQELDINRLSDYDVDHIVPQSFLKDDSIDNKVLTRSDKARGKSDNVPSEEVVKKMKNYWRQLLNAKLITQRKFDNLTKAERGGLSELDKAGFIKRQLVETRQITKHVAQILDSRMNTKYDENDKLIREVKVITLKSKLVSDFRKDFQFYKVREINNYHHAHDAYLNAVVGTALIKKYPKLESEFVYGDYKVYDVRKMIAKSEQEIGKATAKYFFYSNIMNFFKTEITLANGEIRKRPLIETNGETGEIVWDKGRDFATVRKVLSMPQVNIVKKTEVQTGGFSKESILPKRNSDKLIARKKDWDPKKYGGFDSPTVAYSVLVVAKVEKGKSKKLKSVKELLGITIMERSSFEKNPIDFLEAKGYKEVKKDLIIKLPKYSLFELENGRKRMLASAGELQKGNELALPSKYVNFLYLASHYEKLKGSPEDNEQKQLFVEQHKHYLDEIIEQISEFSKRVILADANLDKVLSAYNKHRDKPIREQAENIIHLFTLTNLGAPAAFKYFDTTIDRKRYTSTKEVLDATLIHQSITGLYETRIDLSQLGGDGGEAAAKPAPGGGGGMDPLQLLQPLEAEIKGTKLKAHWNSGATITCVPQAFLEEEVPIKNIWIKTIHGEKEQPVYYLTFKIQGRKVEAEVISSPYDYILVSPSDIPWLMKKPLQLTTLVPLQEYEERLLKQTMLTGSYKEKLQSLFLKYDALWQHWENQVGHRRIKPHHIATGTVNPRPQKQYPINPKAKASIQTVINDLLKQGVLIQQNSIMNTPVYPVPKPDGKWRMVLDYREVNKTIPLIAAQNQHSAGILSSIFRGKYKTTLDLSNGFWAHSITPESYWLTAFTWLGQQYCWTRLPQGFLNSPALFNADVVDLLKEVPNVQVYVDDIYISHDDPREHLEQLEKVFSLLLNAGYVVSLKKSEIAQHEVEFLGFNITKEGRGLTETFKQKLLNITPPRDLKQLQSILGKLNFARNFIPNFSELVKPLYNIIATAPGKYITWTTDNSQQLQNIISMLNSAENLEERNPEVRLIMKVNTSPSAGYIRFYNEFAKRPIMYLNYVYTKAEVKFTNTEKLLTTIHKGLIKALDLGMGQEILVYSPIVSMTKIQKTPLPERKALPIRWITWMSYLEDPRIQFHYDKTLPELQQVPTVTDDIIAKIKHPSEFSMVFYTDGSAIKHPNVNKSHNAGMGIAQVQFKPEFTVINTWSIPLGDHTAQLAEVAAVEFACKKALKIDGPVLIVTDSFYVAESVNKELPYWQSNGFFNNKKKPLKHVSKWKSIADCIQLKPDIIIIHEKGHQPTASTFHTEGNNLADKLATQGSYVVNAGKRTADGSEFEKRTADGSEFESPKKKAKVE

SEQ ID NO: 665 - protein, 2176 aa, synthetic construct
MPAAKRVKLDGGDKKYSIGLDIGTNSVGWAVITDEYKVPSKKFKVLGNTDRHSIKKNLIGALLFDSGETAEATRLKRTARRRYTRRKNRICYLQEIFSNEMAKVDDSFFHRLEESFLVEEDKKHERHPIFGNIVDEVAYHEKYPTIYHLRKKLVDSTDKADLRLIYLALAHMIKFRGHFLIEGDLNPDNSDVDKLFIQLVQTYNQLFEENPINASGVDAKAILSARLSKSRRLENLIAQLPGEKKNGLFGNLIALSLGLTPNFKSNFDLAEDAKLQLSKDTYDDDLDNLLAQIGDQYADLFLAAKNLSDAILLSDILRVNTEITKAPLSASMIKRYDEHHQDLTLLKALVRQQLPEKYKEIFFDQSKNGYAGYIDGGASQEEFYKFIKPILEKMDGTEELLVKLNREDLLRKQRTFDNGSIPHQIHLGELHAILRRQEDFYPFLKDNREKIEKILTFRIPYYVGPLARGNSRFAWMTRKSEETITPWNFEEVVDKGASAQSFIERMTNFDKNLPNEKVLPKHSLLYEYFTVYNELTKVKYVTEGMRKPAFLSGEQKKAIVDLLFKTNRKVTVKQLKEDYFKKIECFDSVEISGVEDRFNASLGTYHDLLKIIKDKDFLDNEENEDILEDIVLTLTLFEDREMIEERLKTYAHLFDDKVMKQLKRRRYTGWGRLSRKLINGIRDKQSGKTILDFLKSDGFANRNFMQLIHDDSLTFKEDIQKAQVSGQGDSLHEHIANLAGSPAIKKGILQTVKVVDELVKVMGRHKPENIVIEMARENQTTQKGQKNSRERMKRIEEGIKELGSQILKEHPVENTQLQNEKLYLYYLQNGRDMYVDQELDINRLSDYDVDHIVPQSFLKDDSIDNKVLTRSDKARGKSDNVPSEEVVKKMKNYWRQLLNAKLITQRKFDNLTKAERGGLSELDKAGFIKRQLVETRQITKHVAQILDSRMNTKYDENDKLIREVKVITLKSKLVSDFRKDFQFYKVREINNYHHAHDAYLNAVVGTALIKKYPKLESEFVYGDYKVYDVRKMIAKSEQEIGKATAKYFFYSNIMNFFKTEITLANGEIRKRPLIETNGETGEIVWDKGRDFATVRKVLSMPQVNIVKKTEVQTGGFSKESILPKRNSDKLIARKKDWDPKKYGGFDSPTVAYSVLVVAKVEKGKSKKLKSVKELLGITIMERSSFEKNPIDFLEAKGYKEVKKDLIIKLPKYSLFELENGRKRMLASAGELQKGNELALPSKYVNFLYLASHYEKLKGSPEDNEQKQLFVEQHKHYLDEIIEQISEFSKRVILADANLDKVLSAYNKHRDKPIREQAENIIHLFTLTNLGAPAAFKYFDTTIDRKRYTSTKEVLDATLIHQSITGLYETRIDLSQLGGDGGEAAAKGGSGSSGGMDPLQLLQPLEAEIKGTKLKAHWNSGATITCVPQAFLEEEVPIKNIWIKTIHGEKEQPVYYLTFKIQGRKVEAEVISSPYDYILVSPSDIPWLMKKPLQLTTLVPLQEYEERLLKQTMLTGSYKEKLQSLFLKYDALWQHWENQVGHRRIKPHHIATGTVNPRPQKQYPINPKAKASIQTVINDLLKQGVLIQQNSIMNTPVYPVPKPDGKWRMVLDYREVNKTIPLIAAQNQHSAGILSSIFRGKYKTTLDLSNGFWAHSITPESYWLTAFTWLGQQYCWTRLPQGFLNSPALFNADVVDLLKEVPNVQVYVDDIYISHDDPREHLEQLEKVFSLLLNAGYVVSLKKSEIAQHEVEFLGFNITKEGRGLTETFKQKLLNITPPRDLKQLQSILGKLNFARNFIPNFSELVKPLYNIIATAPGKYITWTTDNSQQLQNIISMLNSAENLEERNPEVRLIMKVNTSPSAGYIRFYNEFAKRPIMYLNYVYTKAEVKFTNTEKLLTTIHKGLIKALDLGMGQEILVYSPIVSMTKIQKTPLPERKALPIRWITWMSYLEDPRIQFHYDKTLPELQQVPTVTDDIIAKIKHPSEFSMVFYTDGSAIKHPNVNKSHNAGMGIAQVQFKPEFTVINTWSIPLGDHTAQLAEVAAVEFACKKALKIDGPVLIVTDSFYVAESVNKELPYWQSNGFFNNKKKPLKHVSKWKSIADCIQLKPDIIIIHEKGHQPTASTFHTEGNNLADKLATQGSYVVNAGKRTADGSEFEKRTADGSEFESPKKKAKVE

SEQ ID NO: 666 - protein, 2174 aa, synthetic construct
MPAAKRVKLDGGDKKYSIGLDIGTNSVGWAVITDEYKVPSKKFKVLGNTDRHSIKKNLIGALLFDSGETAEATRLKRTARRRYTRRKNRICYLQEIFSNEMAKVDDSFFHRLEESFLVEEDKKHERHPIFGNIVDEVAYHEKYPTIYHLRKKLVDSTDKADLRLIYLALAHMIKFRGHFLIEGDLNPDNSDVDKLFIQLVQTYNQLFEENPINASGVDAKAILSARLSKSRRLENLIAQLPGEKKNGLFGNLIALSLGLTPNFKSNFDLAEDAKLQLSKDTYDDDLDNLLAQIGDQYADLFLAAKNLSDAILLSDILRVNTEITKAPLSASMIKRYDEHHQDLTLLKALVRQQLPEKYKEIFFDQSKNGYAGYIDGGASQEEFYKFIKPILEKMDGTEELLVKLNREDLLRKQRTFDNGSIPHQIHLGELHAILRRQEDFYPFLKDNREKIEKILTFRIPYYVGPLARGNSRFAWMTRKSEETITPWNFEEVVDKGASAQSFIERMTNFDKNLPNEKVLPKHSLLYEYFTVYNELTKVKYVTEGMRKPAFLSGEQKKAIVDLLFKTNRKVTVKQLKEDYFKKIECFDSVEISGVEDRFNASLGTYHDLLKIIKDKDFLDNEENEDILEDIVLTLTLFEDREMIEERLKTYAHLFDDKVMKQLKRRRYTGWGRLSRKLINGIRDKQSGKTILDFLKSDGFANRNFMQLIHDDSLTFKEDIQKAQVSGQGDSLHEHIANLAGSPAIKKGILQTVKVVDELVKVMGRHKPENIVIEMARENQTTQKGQKNSRERMKRIEEGIKELGSQILKEHPVENTQLQNEKLYLYYLQNGRDMYVDQELDINRLSDYDVDHIVPQSFLKDDSIDNKVLTRSDKARGKSDNVPSEEVVKKMKNYWRQLLNAKLITQRKFDNLTKAERGGLSELDKAGFIKRQLVETRQITKHVAQILDSRMNTKYDENDKLIREVKVITLKSKLVSDFRKDFQFYKVREINNYHHAHDAYLNAVVGTALIKKYPKLESEFVYGDYKVYDVRKMIAKSEQEIGKATAKYFFYSNIMNFFKTEITLANGEIRKRPLIETNGETGEIVWDKGRDFATVRKVLSMPQVNIVKKTEVQTGGFSKESILPKRNSDKLIARKKDWDPKKYGGFDSPTVAYSVLVVAKVEKGKSKKLKSVKELLGITIMERSSFEKNPIDFLEAKGYKEVKKDLIIKLPKYSLFELENGRKRMLASAGELQKGNELALPSKYVNFLYLASHYEKLKGSPEDNEQKQLFVEQHKHYLDEIIEQISEFSKRVILADANLDKVLSAYNKHRDKPIREQAENIIHLFTLTNLGAPAAFKYFDTTIDRKRYTSTKEVLDATLIHQSITGLYETRIDLSQLGGDGGPAPAPAPAPGGMDPLQLLQPLEAEIKGTKLKAHWNSGATITCVPQAFLEEEVPIKNIWIKTIHGEKEQPVYYLTFKIQGRKVEAEVISSPYDYILVSPSDIPWLMKKPLQLTTLVPLQEYEERLLKQTMLTGSYKEKLQSLFLKYDALWQHWENQVGHRRIKPHHIATGTVNPRPQKQYPINPKAKASIQTVINDLLKQGVLIQQNSIMNTPVYPVPKPDGKWRMVLDYREVNKTIPLIAAQNQHSAGILSSIFRGKYKTTLDLSNGFWAHSITPESYWLTAFTWLGQQYCWTRLPQGFLNSPALFNADVVDLLKEVPNVQVYVDDIYISHDDPREHLEQLEKVFSLLLNAGYVVSLKKSEIAQHEVEFLGFNITKEGRGLTETFKQKLLNITPPRDLKQLQSILGKLNFARNFIPNFSELVKPLYNIIATAPGKYITWTTDNSQQLQNIISMLNSAENLEERNPEVRLIMKVNTSPSAGYIRFYNEFAKRPIMYLNYVYTKAEVKFTNTEKLLTTIHKGLIKALDLGMGQEILVYSPIVSMTKIQKTPLPERKALPIRWITWMSYLEDPRIQFHYDKTLPELQQVPTVTDDIIAKIKHPSEFSMVFYTDGSAIKHPNVNKSHNAGMGIAQVQFKPEFTVINTWSIPLGDHTAQLAEVAAVEFACKKALKIDGPVLIVTDSFYVAESVNKELPYWQSNGFFNNKKKPLKHVSKWKSIADCIQLKPDIIIIHEKGHQPTASTFHTEGNNLADKLATQGSYVVNAGKRTADGSEFEKRTADGSEFESPKKKAKVE

SEQ ID NO: 667 - protein, 2176 aa, synthetic construct
MPAAKRVKLDGGDKKYSIGLDIGTNSVGWAVITDEYKVPSKKFKVLGNTDRHSIKKNLIGALLFDSGETAEATRLKRTARRRYTRRKNRICYLQEIFSNEMAKVDDSFFHRLEESFLVEEDKKHERHPIFGNIVDEVAYHEKYPTIYHLRKKLVDSTDKADLRLIYLALAHMIKFRGHFLIEGDLNPDNSDVDKLFIQLVQTYNQLFEENPINASGVDAKAILSARLSKSRRLENLIAQLPGEKKNGLFGNLIALSLGLTPNFKSNFDLAEDAKLQLSKDTYDDDLDNLLAQIGDQYADLFLAAKNLSDAILLSDILRVNTEITKAPLSASMIKRYDEHHQDLTLLKALVRQQLPEKYKEIFFDQSKNGYAGYIDGGASQEEFYKFIKPILEKMDGTEELLVKLNREDLLRKQRTFDNGSIPHQIHLGELHAILRRQEDFYPFLKDNREKIEKILTFRIPYYVGPLARGNSRFAWMTRKSEETITPWNFEEVVDKGASAQSFIERMTNFDKNLPNEKVLPKHSLLYEYFTVYNELTKVKYVTEGMRKPAFLSGEQKKAIVDLLFKTNRKVTVKQLKEDYFKKIECFDSVEISGVEDRFNASLGTYHDLLKIIKDKDFLDNEENEDILEDIVLTLTLFEDREMIEERLKTYAHLFDDKVMKQLKRRRYTGWGRLSRKLINGIRDKQSGKTILDFLKSDGFANRNFMQLIHDDSLTFKEDIQKAQVSGQGDSLHEHIANLAGSPAIKKGILQTVKVVDELVKVMGRHKPENIVIEMARENQTTQKGQKNSRERMKRIEEGIKELGSQILKEHPVENTQLQNEKLYLYYLQNGRDMYVDQELDINRLSDYDVDHIVPQSFLKDDSIDNKVLTRSDKARGKSDNVPSEEVVKKMKNYWRQLLNAKLITQRKFDNLTKAERGGLSELDKAGFIKRQLVETRQITKHVAQILDSRMNTKYDENDKLIREVKVITLKSKLVSDFRKDFQFYKVREINNYHHAHDAYLNAVVGTALIKKYPKLESEFVYGDYKVYDVRKMIAKSEQEIGKATAKYFFYSNIMNFFKTEITLANGEIRKRPLIETNGETGEIVWDKGRDFATVRKVLSMPQVNIVKKTEVQTGGFSKESILPKRNSDKLIARKKDWDPKKYGGFDSPTVAYSVLVVAKVEKGKSKKLKSVKELLGITIMERSSFEKNPIDFLEAKGYKEVKKDLIIKLPKYSLFELENGRKRMLASAGELQKGNELALPSKYVNFLYLASHYEKLKGSPEDNEQKQLFVEQHKHYLDEIIEQISEFSKRVILADANLDKVLSAYNKHRDKPIREQAENIIHLFTLTNLGAPAAFKYFDTTIDRKRYTSTKEVLDATLIHQSITGLYETRIDLSQLGGDGGGSSGGGEAAAKGGMDPLQLLQPLEAEIKGTKLKAHWNSGATITCVPQAFLEEEVPIKNIWIKTIHGEKEQPVYYLTFKIQGRKVEAEVISSPYDYILVSPSDIPWLMKKPLQLTTLVPLQEYEERLLKQTMLTGSYKEKLQSLFLKYDALWQHWENQVGHRRIKPHHIATGTVNPRPQKQYPINPKAKASIQTVINDLLKQGVLIQQNSIMNTPVYPVPKPDGKWRMVLDYREVNKTIPLIAAQNQHSAGILSSIFRGKYKTTLDLSNGFWAHSITPESYWLTAFTWLGQQYCWTRLPQGFLNSPALFNADVVDLLKEVPNVQVYVDDIYISHDDPREHLEQLEKVFSLLLNAGYVVSLKKSEIAQHEVEFLGFNITKEGRGLTETFKQKLLNITPPRDLKQLQSILGKLNFARNFIPNFSELVKPLYNIIATAPGKYITWTTDNSQQLQNIISMLNSAENLEERNPEVRLIMKVNTSPSAGYIRFYNEFAKRPIMYLNYVYTKAEVKFTNTEKLLTTIHKGLIKALDLGMGQEILVYSPIVSMTKIQKTPLPERKALPIRWITWMSYLEDPRIQFHYDKTLPELQQVPTVTDDIIAKIKHPSEFSMVFYTDGSAIKHPNVNKSHNAGMGIAQVQFKPEFTVINTWSIPLGDHTAQLAEVAAVEFACKKALKIDGPVLIVTDSFYVAESVNKELPYWQSNGFFNNKKKPLKHVSKWKSIADCIQLKPDIIIIHEKGHQPTASTFHTEGNNLADKLATQGSYVVNAGKRTADGSEFEKRTADGSEFESPKKKAKVE

SEQ ID NO: 668 - protein, 2176 aa, synthetic construct
MPAAKRVKLDGGDKKYSIGLDIGTNSVGWAVITDEYKVPSKKFKVLGNTDRHSIKKNLIGALLFDSGETAEATRLKRTARRRYTRRKNRICYLQEIFSNEMAKVDDSFFHRLEESFLVEEDKKHERHPIFGNIVDEVAYHEKYPTIYHLRKKLVDSTDKADLRLIYLALAHMIKFRGHFLIEGDLNPDNSDVDKLFIQLVQTYNQLFEENPINASGVDAKAILSARLSKSRRLENLIAQLPGEKKNGLFGNLIALSLGLTPNFKSNFDLAEDAKLQLSKDTYDDDLDNLLAQIGDQYADLFLAAKNLSDAILLSDILRVNTEITKAPLSASMIKRYDEHHQDLTLLKALVRQQLPEKYKEIFFDQSKNGYAGYIDGGASQEEFYKFIKPILEKMDGTEELLVKLNREDLLRKQRTFDNGSIPHQIHLGELHAILRRQEDFYPFLKDNREKIEKILTFRIPYYVGPLARGNSRFAWMTRKSEETITPWNFEEVVDKGASAQSFIERMTNFDKNLPNEKVLPKHSLLYEYFTVYNELTKVKYVTEGMRKPAFLSGEQKKAIVDLLFKTNRKVTVKQLKEDYFKKIECFDSVEISGVEDRFNASLGTYHDLLKIIKDKDFLDNEENEDILEDIVLTLTLFEDREMIEERLKTYAHLFDDKVMKQLKRRRYTGWGRLSRKLINGIRDKQSGKTILDFLKSDGFANRNFMQLIHDDSLTFKEDIQKAQVSGQGDSLHEHIANLAGSPAIKKGILQTVKVVDELVKVMGRHKPENIVIEMARENQTTQKGQKNSRERMKRIEEGIKELGSQILKEHPVENTQLQNEKLYLYYLQNGRDMYVDQELDINRLSDYDVDHIVPQSFLKDDSIDNKVLTRSDKARGKSDNVPSEEVVKKMKNYWRQLLNAKLITQRKFDNLTKAERGGLSELDKAGFIKRQLVETRQITKHVAQILDSRMNTKYDENDKLIREVKVITLKSKLVSDFRKDFQFYKVREINNYHHAHDAYLNAVVGTALIKKYPKLESEFVYGDYKVYDVRKMIAKSEQEIGKATAKYFFYSNIMNFFKTEITLANGEIRKRPLIETNGETGEIVWDKGRDFATVRKVLSMPQVNIVKKTEVQTGGFSKESILPKRNSDKLIARKKDWDPKKYGGFDSPTVAYSVLVVAKVEKGKSKKLKSVKELLGITIMERSSFEKNPIDFLEAKGYKEVKKDLIIKLPKYSLFELENGRKRMLASAGELQKGNELALPSKYVNFLYLASHYEKLKGSPEDNEQKQLFVEQHKHYLDEIIEQISEFSKRVILADANLDKVLSAYNKHRDKPIREQAENIIHLFTLTNLGAPAAFKYFDTTIDRKRYTSTKEVLDATLIHQSITGLYETRIDLSQLGGDGGGGSEAAAKPAPGGMDPLQLLQPLEAEIKGTKLKAHWNSGATITCVPQAFLEEEVPIKNIWIKTIHGEKEQPVYYLTFKIQGRKVEAEVISSPYDYILVSPSDIPWLMKKPLQLTTLVPLQEYEERLLKQTMLTGSYKEKLQSLFLKYDALWQHWENQVGHRRIKPHHIATGTVNPRPQKQYPINPKAKASIQTVINDLLKQGVLIQQNSIMNTPVYPVPKPDGKWRMVLDYREVNKTIPLIAAQNQHSAGILSSIFRGKYKTTLDLSNGFWAHSITPESYWLTAFTWLGQQYCWTRLPQGFLNSPALFNADVVDLLKEVPNVQVYVDDIYISHDDPREHLEQLEKVFSLLLNAGYVVSLKKSEIAQHEVEFLGFNITKEGRGLTETFKQKLLNITPPRDLKQLQSILGKLNFARNFIPNFSELVKPLYNIIATAPGKYITWTTDNSQQLQNIISMLNSAENLEERNPEVRLIMKVNTSPSAGYIRFYNEFAKRPIMYLNYVYTKAEVKFTNTEKLLTTIHKGLIKALDLGMGQEILVYSPIVSMTKIQKTPLPERKALPIRWITWMSYLEDPRIQFHYDKTLPELQQVPTVTDDIIAKIKHPSEFSMVFYTDGSAIKHPNVNKSHNAGMGIAQVQFKPEFTVINTWSIPLGDHTAQLAEVAAVEFACKKALKIDGPVLIVTDSFYVAESVNKELPYWQSNGFFNNKKKPLKHVSKWKSIADCIQLKPDIIIIHEKGHQPTASTFHTEGNNLADKLATQGSYVVNAGKRTADGSEFEKRTADGSEFESPKKKAKVE

SEQ ID NO: 669 - protein, 2174 aa, synthetic construct
MPAAKRVKLDGGDKKYSIGLDIGTNSVGWAVITDEYKVPSKKFKVLGNTDRHSIKKNLIGALLFDSGETAEATRLKRTARRRYTRRKNRICYLQEIFSNEMAKVDDSFFHRLEESFLVEEDKKHERHPIFGNIVDEVAYHEKYPTIYHLRKKLVDSTDKADLRLIYLALAHMIKFRGHFLIEGDLNPDNSDVDKLFIQLVQTYNQLFEENPINASGVDAKAILSARLSKSRRLENLIAQLPGEKKNGLFGNLIALSLGLTPNFKSNFDLAEDAKLQLSKDTYDDDLDNLLAQIGDQYADLFLAAKNLSDAILLSDILRVNTEITKAPLSASMIKRYDEHHQDLTLLKALVRQQLPEKYKEIFFDQSKNGYAGYIDGGASQEEFYKFIKPILEKMDGTEELLVKLNREDLLRKQRTFDNGSIPHQIHLGELHAILRRQEDFYPFLKDNREKIEKILTFRIPYYVGPLARGNSRFAWMTRKSEETITPWNFEEVVDKGASAQSFIERMTNFDKNLPNEKVLPKHSLLYEYFTVYNELTKVKYVTEGMRKPAFLSGEQKKAIVDLLFKTNRKVTVKQLKEDYFKKIECFDSVEISGVEDRFNASLGTYHDLLKIIKDKDFLDNEENEDILEDIVLTLTLFEDREMIEERLKTYAHLFDDKVMKQLKRRRYTGWGRLSRKLINGIRDKQSGKTILDFLKSDGFANRNFMQLIHDDSLTFKEDIQKAQVSGQGDSLHEHIANLAGSPAIKKGILQTVKVVDELVKVMGRHKPENIVIEMARENQTTQKGQKNSRERMKRIEEGIKELGSQILKEHPVENTQLQNEKLYLYYLQNGRDMYVDQELDINRLSDYDVDHIVPQSFLKDDSIDNKVLTRSDKARGKSDNVPSEEVVKKMKNYWRQLLNAKLITQRKFDNLTKAERGGLSELDKAGFIKRQLVETRQITKHVAQILDSRMNTKYDENDKLIREVKVITLKSKLVSDFRKDFQFYKVREINNYHHAHDAYLNAVVGTALIKKYPKLESEFVYGDYKVYDVRKMIAKSEQEIGKATAKYFFYSNIMNFFKTEITLANGEIRKRPLIETNGETGEIVWDKGRDFATVRKVLSMPQVNIVKKTEVQTGGFSKESILPKRNSDKLIARKKDWDPKKYGGFDSPTVAYSVLVVAKVEKGKSKKLKSVKELLGITIMERSSFEKNPIDFLEAKGYKEVKKDLIIKLPKYSLFELENGRKRMLASAGELQKGNELALPSKYVNFLYLASHYEKLKGSPEDNEQKQLFVEQHKHYLDEIIEQISEFSKRVILADANLDKVLSAYNKHRDKPIREQAENIIHLFTLTNLGAPAAFKYFDTTIDRKRYTSTKEVLDATLIHQSITGLYETRIDLSQLGGDGGGGGGSSPAPGGMDPLQLLQPLEAEIKGTKLKAHWNSGATITCVPQAFLEEEVPIKNIWIKTIHGEKEQPVYYLTFKIQGRKVEAEVISSPYDYILVSPSDIPWLMKKPLQLTTLVPLQEYEERLLKQTMLTGSYKEKLQSLFLKYDALWQHWENQVGHRRIKPHHIATGTVNPRPQKQYPINPKAKASIQTVINDLLKQGVLIQQNSIMNTPVYPVPKPDGKWRMVLDYREVNKTIPLIAAQNQHSAGILSSIFRGKYKTTLDLSNGFWAHSITPESYWLTAFTWLGQQYCWTRLPQGFLNSPALFNADVVDLLKEVPNVQVYVDDIYISHDDPREHLEQLEKVFSLLLNAGYVVSLKKSEIAQHEVEFLGFNITKEGRGLTETFKQKLLNITPPRDLKQLQSILGKLNFARNFIPNFSELVKPLYNIIATAPGKYITWTTDNSQQLQNIISMLNSAENLEERNPEVRLIMKVNTSPSAGYIRFYNEFAKRPIMYLNYVYTKAEVKFTNTEKLLTTIHKGLIKALDLGMGQEILVYSPIVSMTKIQKTPLPERKALPIRWITWMSYLEDPRIQFHYDKTLPELQQVPTVTDDIIAKIKHPSEFSMVFYTDGSAIKHPNVNKSHNAGMGIAQVQFKPEFTVINTWSIPLGDHTAQLAEVAAVEFACKKALKIDGPVLIVTDSFYVAESVNKELPYWQSNGFFNNKKKPLKHVSKWKSIADCIQLKPDIIIIHEKGHQPTASTFHTEGNNLADKLATQGSYVVNAGKRTADGSEFEKRTADGSEFESPKKKAKVE

SEQ ID NO: 670 - protein, 2176 aa, synthetic construct
MPAAKRVKLDGGDKKYSIGLDIGTNSVGWAVITDEYKVPSKKFKVLGNTDRHSIKKNLIGALLFDSGETAEATRLKRTARRRYTRRKNRICYLQEIFSNEMAKVDDSFFHRLEESFLVEEDKKHERHPIFGNIVDEVAYHEKYPTIYHLRKKLVDSTDKADLRLIYLALAHMIKFRGHFLIEGDLNPDNSDVDKLFIQLVQTYNQLFEENPINASGVDAKAILSARLSKSRRLENLIAQLPGEKKNGLFGNLIALSLGLTPNFKSNFDLAEDAKLQLSKDTYDDDLDNLLAQIGDQYADLFLAAKNLSDAILLSDILRVNTEITKAPLSASMIKRYDEHHQDLTLLKALVRQQLPEKYKEIFFDQSKNGYAGYIDGGASQEEFYKFIKPILEKMDGTEELLVKLNREDLLRKQRTFDNGSIPHQIHLGELHAILRRQEDFYPFLKDNREKIEKILTFRIPYYVGPLARGNSRFAWMTRKSEETITPWNFEEVVDKGASAQSFIERMTNFDKNLPNEKVLPKHSLLYEYFTVYNELTKVKYVTEGMRKPAFLSGEQKKAIVDLLFKTNRKVTVKQLKEDYFKKIECFDSVEISGVEDRFNASLGTYHDLLKIIKDKDFLDNEENEDILEDIVLTLTLFEDREMIEERLKTYAHLFDDKVMKQLKRRRYTGWGRLSRKLINGIRDKQSGKTILDFLKSDGFANRNFMQLIHDDSLTFKEDIQKAQVSGQGDSLHEHIANLAGSPAIKKGILQTVKVVDELVKVMGRHKPENIVIEMARENQTTQKGQKNSRERMKRIEEGIKELGSQILKEHPVENTQLQNEKLYLYYLQNGRDMYVDQELDINRLSDYDVDHIVPQSFLKDDSIDNKVLTRSDKARGKSDNVPSEEVVKKMKNYWRQLLNAKLITQRKFDNLTKAERGGLSELDKAGFIKRQLVETRQITKHVAQILDSRMNTKYDENDKLIREVKVITLKSKLVSDFRKDFQFYKVREINNYHHAHDAYLNAVVGTALIKKYPKLESEFVYGDYKVYDVRKMIAKSEQEIGKATAKYFFYSNIMNFFKTEITLANGEIRKRPLIETNGETGEIVWDKGRDFATVRKVLSMPQVNIVKKTEVQTGGFSKESILPKRNSDKLIARKKDWDPKKYGGFDSPTVAYSVLVVAKVEKGKSKKLKSVKELLGITIMERSSFEKNPIDFLEAKGYKEVKKDLIIKLPKYSLFELENGRKRMLASAGELQKGNELALPSKYVNFLYLASHYEKLKGSPEDNEQKQLFVEQHKHYLDEIIEQISEFSKRVILADANLDKVLSAYNKHRDKPIREQAENIIHLFTLTNLGAPAAFKYFDTTIDRKRYTSTKEVLDATLIHQSITGLYETRIDLSQLGGDGGGSSGGSEAAAKGGMDPLQLLQPLEAEIKGTKLKAHWNSGATITCVPQAFLEEEVPIKNIWIKTIHGEKEQPVYYLTFKIQGRKVEAEVISSPYDYILVSPSDIPWLMKKPLQLTTLVPLQEYEERLLKQTMLTGSYKEKLQSLFLKYDALWQHWENQVGHRRIKPHHIATGTVNPRPQKQYPINPKAKASIQTVINDLLKQGVLIQQNSIMNTPVYPVPKPDGKWRMVLDYREVNKTIPLIAAQNQHSAGILSSIFRGKYKTTLDLSNGFWAHSITPESYWLTAFTWLGQQYCWTRLPQGFLNSPALFNADVVDLLKEVPNVQVYVDDIYISHDDPREHLEQLEKVFSLLLNAGYVVSLKKSEIAQHEVEFLGFNITKEGRGLTETFKQKLLNITPPRDLKQLQSILGKLNFARNFIPNFSELVKPLYNIIATAPGKYITWTTDNSQQLQNIISMLNSAENLEERNPEVRLIMKVNTSPSAGYIRFYNEFAKRPIMYLNYVYTKAEVKFTNTEKLLTTIHKGLIKALDLGMGQEILVYSPIVSMTKIQKTPLPERKALPIRWITWMSYLEDPRIQFHYDKTLPELQQVPTVTDDIIAKIKHPSEFSMVFYTDGSAIKHPNVNKSHNAGMGIAQVQFKPEFTVINTWSIPLGDHTAQLAEVAAVEFACKKALKIDGPVLIVTDSFYVAESVNKELPYWQSNGFFNNKKKPLKHVSKWKSIADCIQLKPDIIIIHEKGHQPTASTFHTEGNNLADKLATQGSYVVNAGKRTADGSEFEKRTADGSEFESPKKKAKVE

SEQ ID NO: 671 - protein, 2176 aa, synthetic construct
MPAAKRVKLDGGDKKYSIGLDIGTNSVGWAVITDEYKVPSKKFKVLGNTDRHSIKKNLIGALLFDSGETAEATRLKRTARRRYTRRKNRICYLQEIFSNEMAKVDDSFFHRLEESFLVEEDKKHERHPIFGNIVDEVAYHEKYPTIYHLRKKLVDSTDKADLRLIYLALAHMIKFRGHFLIEGDLNPDNSDVDKLFIQLVQTYNQLFEENPINASGVDAKAILSARLSKSRRLENLIAQLPGEKKNGLFGNLIALSLGLTPNFKSNFDLAEDAKLQLSKDTYDDDLDNLLAQIGDQYADLFLAAKNLSDAILLSDILRVNTEITKAPLSASMIKRYDEHHQDLTLLKALVRQQLPEKYKEIFFDQSKNGYAGYIDGGASQEEFYKFIKPILEKMDGTEELLVKLNREDLLRKQRTFDNGSIPHQIHLGELHAILRRQEDFYPFLKDNREKIEKILTFRIPYYVGPLARGNSRFAWMTRKSEETITPWNFEEVVDKGASAQSFIERMTNFDKNLPNEKVLPKHSLLYEYFTVYNELTKVKYVTEGMRKPAFLSGEQKKAIVDLLFKTNRKVTVKQLKEDYFKKIECFDSVEISGVEDRFNASLGTYHDLLKIIKDKDFLDNEENEDILEDIVLTLTLFEDREMIEERLKTYAHLFDDKVMKQLKRRRYTGWGRLSRKLINGIRDKQSGKTILDFLKSDGFANRNFMQLIHDDSLTFKEDIQKAQVSGQGDSLHEHIANLAGSPAIKKGILQTVKVVDELVKVMGRHKPENIVIEMARENQTTQKGQKNSRERMKRIEEGIKELGSQILKEHPVENTQLQNEKLYLYYLQNGRDMYVDQELDINRLSDYDVDHIVPQSFLKDDSIDNKVLTRSDKARGKSDNVPSEEVVKKMKNYWRQLLNAKLITQRKFDNLTKAERGGLSELDKAGFIKRQLVETRQITKHVAQILDSRMNTKYDENDKLIREVKVITLKSKLVSDFRKDFQFYKVREINNYHHAHDAYLNAVVGTALIKKYPKLESEFVYGDYKVYDVRKMIAKSEQEIGKATAKYFFYSNIMNFFKTEITLANGEIRKRPLIETNGETGEIVWDKGRDFATVRKVLSMPQVNIVKKTEVQTGGFSKESILPKRNSDKLIARKKDWDPKKYGGFDSPTVAYSVLVVAKVEKGKSKKLKSVKELLGITIMERSSFEKNPIDFLEAKGYKEVKKDLIIKLPKYSLFELENGRKRMLASAGELQKGNELALPSKYVNFLYLASHYEKLKGSPEDNEQKQLFVEQHKHYLDEIIEQISEFSKRVILADANLDKVLSAYNKHRDKPIREQAENIIHLFTLTNLGAPAAFKYFDTTIDRKRYTSTKEVLDATLIHQSITGLYETRIDLSQLGGDGGEAAAKGSSGGGGGMDPLQLLQPLEAEIKGTKLKAHWNSGATITCVPQAFLEEEVPIKNIWIKTIHGEKEQPVYYLTFKIQGRKVEAEVISSPYDYILVSPSDIPWLMKKPLQLTTLVPLQEYEERLLKQTMLTGSYKEKLQSLFLKYDALWQHWENQVGHRRIKPHHIATGTVNPRPQKQYPINPKAKASIQTVINDLLKQGVLIQQNSIMNTPVYPVPKPDGKWRMVLDYREVNKTIPLIAAQNQHSAGILSSIFRGKYKTTLDLSNGFWAHSITPESYWLTAFTWLGQQYCWTRLPQGFLNSPALFNADVVDLLKEVPNVQVYVDDIYISHDDPREHLEQLEKVFSLLLNAGYVVSLKKSEIAQHEVEFLGFNITKEGRGLTETFKQKLLNITPPRDLKQLQSILGKLNFARNFIPNFSELVKPLYNIIATAPGKYITWTTDNSQQLQNIISMLNSAENLEERNPEVRLIMKVNTSPSAGYIRFYNEFAKRPIMYLNYVYTKAEVKFTNTEKLLTTIHKGLIKALDLGMGQEILVYSPIVSMTKIQKTPLPERKALPIRWITWMSYLEDPRIQFHYDKTLPELQQVPTVTDDIIAKIKHPSEFSMVFYTDGSAIKHPNVNKSHNAGMGIAQVQFKPEFTVINTWSIPLGDHTAQLAEVAAVEFACKKALKIDGPVLIVTDSFYVAESVNKELPYWQSNGFFNNKKKPLKHVSKWKSIADCIQLKPDIIIIHEKGHQPTASTFHTEGNNLADKLATQGSYVVNAGKRTADGSEFEKRTADGSEFESPKKKAKVE

SEQ ID NO: 672 - protein, 2171 aa, synthetic construct
MPAAKRVKLDGGDKKYSIGLDIGTNSVGWAVITDEYKVPSKKFKVLGNTDRHSIKKNLIGALLFDSGETAEATRLKRTARRRYTRRKNRICYLQEIFSNEMAKVDDSFFHRLEESFLVEEDKKHERHPIFGNIVDEVAYHEKYPTIYHLRKKLVDSTDKADLRLIYLALAHMIKFRGHFLIEGDLNPDNSDVDKLFIQLVQTYNQLFEENPINASGVDAKAILSARLSKSRRLENLIAQLPGEKKNGLFGNLIALSLGLTPNFKSNFDLAEDAKLQLSKDTYDDDLDNLLAQIGDQYADLFLAAKNLSDAILLSDILRVNTEITKAPLSASMIKRYDEHHQDLTLLKALVRQQLPEKYKEIFFDQSKNGYAGYIDGGASQEEFYKFIKPILEKMDGTEELLVKLNREDLLRKQRTFDNGSIPHQIHLGELHAILRRQEDFYPFLKDNREKIEKILTFRIPYYVGPLARGNSRFAWMTRKSEETITPWNFEEVVDKGASAQSFIERMTNFDKNLPNEKVLPKHSLLYEYFTVYNELTKVKYVTEGMRKPAFLSGEQKKAIVDLLFKTNRKVTVKQLKEDYFKKIECFDSVEISGVEDRFNASLGTYHDLLKIIKDKDFLDNEENEDILEDIVLTLTLFEDREMIEERLKTYAHLFDDKVMKQLKRRRYTGWGRLSRKLINGIRDKQSGKTILDFLKSDGFANRNFMQLIHDDSLTFKEDIQKAQVSGQGDSLHEHIANLAGSPAIKKGILQTVKVVDELVKVMGRHKPENIVIEMARENQTTQKGQKNSRERMKRIEEGIKELGSQILKEHPVENTQLQNEKLYLYYLQNGRDMYVDQELDINRLSDYDVDHIVPQSFLKDDSIDNKVLTRSDKARGKSDNVPSEEVVKKMKNYWRQLLNAKLITQRKFDNLTKAERGGLSELDKAGFIKRQLVETRQITKHVAQILDSRMNTKYDENDKLIREVKVITLKSKLVSDFRKDFQFYKVREINNYHHAHDAYLNAVVGTALIKKYPKLESEFVYGDYKVYDVRKMIAKSEQEIGKATAKYFFYSNIMNFFKTEITLANGEIRKRPLIETNGETGEIVWDKGRDFATVRKVLSMPQVNIVKKTEVQTGGFSKESILPKRNSDKLIARKKDWDPKKYGGFDSPTVAYSVLVVAKVEKGKSKKLKSVKELLGITIMERSSFEKNPIDFLEAKGYKEVKKDLIIKLPKYSLFELENGRKRMLASAGELQKGNELALPSKYVNFLYLASHYEKLKGSPEDNEQKQLFVEQHKHYLDEIIEQISEFSKRVILADANLDKVLSAYNKHRDKPIREQAENIIHLFTLTNLGAPAAFKYFDTTIDRKRYTSTKEVLDATLIHQSITGLYETRIDLSQLGGDGGGGSPAPGGMDPLQLLQPLEAEIKGTKLKAHWNSGATITCVPQAFLEEEVPIKNIWIKTIHGEKEQPVYYLTFKIQGRKVEAEVISSPYDYILVSPSDIPWLMKKPLQLTTLVPLQEYEERLLKQTMLTGSYKEKLQSLFLKYDALWQHWENQVGHRRIKPHHIATGTVNPRPQKQYPINPKAKASIQTVINDLLKQGVLIQQNSIMNTPVYPVPKPDGKWRMVLDYREVNKTIPLIAAQNQHSAGILSSIFRGKYKTTLDLSNGFWAHSITPESYWLTAFTWLGQQYCWTRLPQGFLNSPALFNADVVDLLKEVPNVQVYVDDIYISHDDPREHLEQLEKVFSLLLNAGYVVSLKKSEIAQHEVEFLGFNITKEGRGLTETFKQKLLNITPPRDLKQLQSILGKLNFARNFIPNFSELVKPLYNIIATAPGKYITWTTDNSQQLQNIISMLNSAENLEERNPEVRLIMKVNTSPSAGYIRFYNEFAKRPIMYLNYVYTKAEVKFTNTEKLLTTIHKGLIKALDLGMGQEILVYSPIVSMTKIQKTPLPERKALPIRWITWMSYLEDPRIQFHYDKTLPELQQVPTVTDDIIAKIKHPSEFSMVFYTDGSAIKHPNVNKSHNAGMGIAQVQFKPEFTVINTWSIPLGDHTAQLAEVAAVEFACKKALKIDGPVLIVTDSFYVAESVNKELPYWQSNGFFNNKKKPLKHVSKWKSIADCIQLKPDIIIIHEKGHQPTASTFHTEGNNLADKLATQGSYVVNAGKRTADGSEFEKRTADGSEFESPKKKAKVE

SEQ ID NO: 673 - protein, 2185 aa, synthetic construct
MPAAKRVKLDGGDKKYSIGLDIGTNSVGWAVITDEYKVPSKKFKVLGNTDRHSIKKNLIGALLFDSGETAEATRLKRTARRRYTRRKNRICYLQEIFSNEMAKVDDSFFHRLEESFLVEEDKKHERHPIFGNIVDEVAYHEKYPTIYHLRKKLVDSTDKADLRLIYLALAHMIKFRGHFLIEGDLNPDNSDVDKLFIQLVQTYNQLFEENPINASGVDAKAILSARLSKSRRLENLIAQLPGEKKNGLFGNLIALSLGLTPNFKSNFDLAEDAKLQLSKDTYDDDLDNLLAQIGDQYADLFLAAKNLSDAILLSDILRVNTEITKAPLSASMIKRYDEHHQDLTLLKALVRQQLPEKYKEIFFDQSKNGYAGYIDGGASQEEFYKFIKPILEKMDGTEELLVKLNREDLLRKQRTFDNGSIPHQIHLGELHAILRRQEDFYPFLKDNREKIEKILTFRIPYYVGPLARGNSRFAWMTRKSEETITPWNFEEVVDKGASAQSFIERMTNFDKNLPNEKVLPKHSLLYEYFTVYNELTKVKYVTEGMRKPAFLSGEQKKAIVDLLFKTNRKVTVKQLKEDYFKKIECFDSVEISGVEDRFNASLGTYHDLLKIIKDKDFLDNEENEDILEDIVLTLTLFEDREMIEERLKTYAHLFDDKVMKQLKRRRYTGWGRLSRKLINGIRDKQSGKTILDFLKSDGFANRNFMQLIHDDSLTFKEDIQKAQVSGQGDSLHEHIANLAGSPAIKKGILQTVKVVDELVKVMGRHKPENIVIEMARENQTTQKGQKNSRERMKRIEEGIKELGSQILKEHPVENTQLQNEKLYLYYLQNGRDMYVDQELDINRLSDYDVDHIVPQSFLKDDSIDNKVLTRSDKARGKSDNVPSEEVVKKMKNYWRQLLNAKLITQRKFDNLTKAERGGLSELDKAGFIKRQLVETRQITKHVAQILDSRMNTKYDENDKLIREVKVITLKSKLVSDFRKDFQFYKVREINNYHHAHDAYLNAVVGTALIKKYPKLESEFVYGDYKVYDVRKMIAKSEQEIGKATAKYFFYSNIMNFFKTEITLANGEIRKRPLIETNGETGEIVWDKGRDFATVRKVLSMPQVNIVKKTEVQTGGFSKESILPKRNSDKLIARKKDWDPKKYGGFDSPTVAYSVLVVAKVEKGKSKKLKSVKELLGITIMERSSFEKNPIDFLEAKGYKEVKKDLIIKLPKYSLFELENGRKRMLASAGELQKGNELALPSKYVNFLYLASHYEKLKGSPEDNEQKQLFVEQHKHYLDEIIEQISEFSKRVILADANLDKVLSAYNKHRDKPIREQAENIIHLFTLTNLGAPAAFKYFDTTIDRKRYTSTKEVLDATLIHQSITGLYETRIDLSQLGGDGGGGGGSGGGGSGGGGSGGGGSGGMDPLQLLQPLEAEIKGTKLKAHWNSGATITCVPQAFLEEEVPIKNIWIKTIHGEKEQPVYYLTFKIQGRKVEAEVISSPYDYILVSPSDIPWLMKKPLQLTTLVPLQEYEERLLKQTMLTGSYKEKLQSLFLKYDALWQHWENQVGHRRIKPHHIATGTVNPRPQKQYPINPKAKASIQTVINDLLKQGVLIQQNSIMNTPVYPVPKPDGKWRMVLDYREVNKTIPLIAAQNQHSAGILSSIFRGKYKTTLDLSNGFWAHSITPESYWLTAFTWLGQQYCWTRLPQGFLNSPALFNADVVDLLKEVPNVQVYVDDIYISHDDPREHLEQLEKVFSLLLNAGYVVSLKKSEIAQHEVEFLGFNITKEGRGLTETFKQKLLNITPPRDLKQLQSILGKLNFARNFIPNFSELVKPLYNIIATAPGKYITWTTDNSQQLQNIISMLNSAENLEERNPEVRLIMKVNTSPSAGYIRFYNEFAKRPIMYLNYVYTKAEVKFTNTEKLLTTIHKGLIKALDLGMGQEILVYSPIVSMTKIQKTPLPERKALPIRWITWMSYLEDPRIQFHYDKTLPELQQVPTVTDDIIAKIKHPSEFSMVFYTDGSAIKHPNVNKSHNAGMGIAQVQFKPEFTVINTWSIPLGDHTAQLAEVAAVEFACKKALKIDGPVLIVTDSFYVAESVNKELPYWQSNGFFNNKKKPLKHVSKWKSIADCIQLKPDIIIIHEKGHQPTASTFHTEGNNLADKLATQGSYVVNAGKRTADGSEFEKRTADGSEFESPKKKAKVE

SEQ ID NO: 674 - protein, 2176 aa, synthetic construct
MPAAKRVKLDGGDKKYSIGLDIGTNSVGWAVITDEYKVPSKKFKVLGNTDRHSIKKNLIGALLFDSGETAEATRLKRTARRRYTRRKNRICYLQEIFSNEMAKVDDSFFHRLEESFLVEEDKKHERHPIFGNIVDEVAYHEKYPTIYHLRKKLVDSTDKADLRLIYLALAHMIKFRGHFLIEGDLNPDNSDVDKLFIQLVQTYNQLFEENPINASGVDAKAILSARLSKSRRLENLIAQLPGEKKNGLFGNLIALSLGLTPNFKSNFDLAEDAKLQLSKDTYDDDLDNLLAQIGDQYADLFLAAKNLSDAILLSDILRVNTEITKAPLSASMIKRYDEHHQDLTLLKALVRQQLPEKYKEIFFDQSKNGYAGYIDGGASQEEFYKFIKPILEKMDGTEELLVKLNREDLLRKQRTFDNGSIPHQIHLGELHAILRRQEDFYPFLKDNREKIEKILTFRIPYYVGPLARGNSRFAWMTRKSEETITPWNFEEVVDKGASAQSFIERMTNFDKNLPNEKVLPKHSLLYEYFTVYNELTKVKYVTEGMRKPAFLSGEQKKAIVDLLFKTNRKVTVKQLKEDYFKKIECFDSVEISGVEDRFNASLGTYHDLLKIIKDKDFLDNEENEDILEDIVLTLTLFEDREMIEERLKTYAHLFDDKVMKQLKRRRYTGWGRLSRKLINGIRDKQSGKTILDFLKSDGFANRNFMQLIHDDSLTFKEDIQKAQVSGQGDSLHEHIANLAGSPAIKKGILQTVKVVDELVKVMGRHKPENIVIEMARENQTTQKGQKNSRERMKRIEEGIKELGSQILKEHPVENTQLQNEKLYLYYLQNGRDMYVDQELDINRLSDYDVDHIVPQSFLKDDSIDNKVLTRSDKARGKSDNVPSEEVVKKMKNYWRQLLNAKLITQRKFDNLTKAERGGLSELDKAGFIKRQLVETRQITKHVAQILDSRMNTKYDENDKLIREVKVITLKSKLVSDFRKDFQFYKVREINNYHHAHDAYLNAVVGTALIKKYPKLESEFVYGDYKVYDVRKMIAKSEQEIGKATAKYFFYSNIMNFFKTEITLANGEIRKRPLIETNGETGEIVWDKGRDFATVRKVLSMPQVNIVKKTEVQTGGFSKESILPKRNSDKLIARKKDWDPKKYGGFDSPTVAYSVLVVAKVEKGKSKKLKSVKELLGITIMERSSFEKNPIDFLEAKGYKEVKKDLIIKLPKYSLFELENGRKRMLASAGELQKGNELALPSKYVNFLYLASHYEKLKGSPEDNEQKQLFVEQHKHYLDEIIEQISEFSKRVILADANLDKVLSAYNKHRDKPIREQAENIIHLFTLTNLGAPAAFKYFDTTIDRKRYTSTKEVLDATLIHQSITGLYETRIDLSQLGGDGGGSSEAAAKGGGGGMDPLQLLQPLEAEIKGTKLKAHWNSGATITCVPQAFLEEEVPIKNIWIKTIHGEKEQPVYYLTFKIQGRKVEAEVISSPYDYILVSPSDIPWLMKKPLQLTTLVPLQEYEERLLKQTMLTGSYKEKLQSLFLKYDALWQHWENQVGHRRIKPHHIATGTVNPRPQKQYPINPKAKASIQTVINDLLKQGVLIQQNSIMNTPVYPVPKPDGKWRMVLDYREVNKTIPLIAAQNQHSAGILSSIFRGKYKTTLDLSNGFWAHSITPESYWLTAFTWLGQQYCWTRLPQGFLNSPALFNADVVDLLKEVPNVQVYVDDIYISHDDPREHLEQLEKVFSLLLNAGYVVSLKKSEIAQHEVEFLGFNITKEGRGLTETFKQKLLNITPPRDLKQLQSILGKLNFARNFIPNFSELVKPLYNIIATAPGKYITWTTDNSQQLQNIISMLNSAENLEERNPEVRLIMKVNTSPSAGYIRFYNEFAKRPIMYLNYVYTKAEVKFTNTEKLLTTIHKGLIKALDLGMGQEILVYSPIVSMTKIQKTPLPERKALPIRWITWMSYLEDPRIQFHYDKTLPELQQVPTVTDDIIAKIKHPSEFSMVFYTDGSAIKHPNVNKSHNAGMGIAQVQFKPEFTVINTWSIPLGDHTAQLAEVAAVEFACKKALKIDGPVLIVTDSFYVAESVNKELPYWQSNGFFNNKKKPLKHVSKWKSIADCIQLKPDIIIIHEKGHQPTASTFHTEGNNLADKLATQGSYVVNAGKRTADGSEFEKRTADGSEFESPKKKAKVE

SEQ ID NO: 675 - protein, 2176 aa, synthetic construct
MPAAKRVKLDGGDKKYSIGLDIGTNSVGWAVITDEYKVPSKKFKVLGNTDRHSIKKNLIGALLFDSGETAEATRLKRTARRRYTRRKNRICYLQEIFSNEMAKVDDSFFHRLEESFLVEEDKKHERHPIFGNIVDEVAYHEKYPTIYHLRKKLVDSTDKADLRLIYLALAHMIKFRGHFLIEGDLNPDNSDVDKLFIQLVQTYNQLFEENPINASGVDAKAILSARLSKSRRLENLIAQLPGEKKNGLFGNLIALSLGLTPNFKSNFDLAEDAKLQLSKDTYDDDLDNLLAQIGDQYADLFLAAKNLSDAILLSDILRVNTEITKAPLSASMIKRYDEHHQDLTLLKALVRQQLPEKYKEIFFDQSKNGYAGYIDGGASQEEFYKFIKPILEKMDGTEELLVKLNREDLLRKQRTFDNGSIPHQIHLGELHAILRRQEDFYPFLKDNREKIEKILTFRIPYYVGPLARGNSRFAWMTRKSEETITPWNFEEVVDKGASAQSFIERMTNFDKNLPNEKVLPKHSLLYEYFTVYNELTKVKYVTEGMRKPAFLSGEQKKAIVDLLFKTNRKVTVKQLKEDYFKKIECFDSVEISGVEDRFNASLGTYHDLLKIIKDKDFLDNEENEDILEDIVLTLTLFEDREMIEERLKTYAHLFDDKVMKQLKRRRYTGWGRLSRKLINGIRDKQSGKTILDFLKSDGFANRNFMQLIHDDSLTFKEDIQKAQVSGQGDSLHEHIANLAGSPAIKKGILQTVKVVDELVKVMGRHKPENIVIEMARENQTTQKGQKNSRERMKRIEEGIKELGSQILKEHPVENTQLQNEKLYLYYLQNGRDMYVDQELDINRLSDYDVDHIVPQSFLKDDSIDNKVLTRSDKARGKSDNVPSEEVVKKMKNYWRQLLNAKLITQRKFDNLTKAERGGLSELDKAGFIKRQLVETRQITKHVAQILDSRMNTKYDENDKLIREVKVITLKSKLVSDFRKDFQFYKVREINNYHHAHDAYLNAVVGTALIKKYPKLESEFVYGDYKVYDVRKMIAKSEQEIGKATAKYFFYSNIMNFFKTEITLANGEIRKRPLIETNGETGEIVWDKGRDFATVRKVLSMPQVNIVKKTEVQTGGFSKESILPKRNSDKLIARKKDWDPKKYGGFDSPTVAYSVLVVAKVEKGKSKKLKSVKELLGITIMERSSFEKNPIDFLEAKGYKEVKKDLIIKLPKYSLFELENGRKRMLASAGELQKGNELALPSKYVNFLYLASHYEKLKGSPEDNEQKQLFVEQHKHYLDEIIEQISEFSKRVILADANLDKVLSAYNKHRDKPIREQAENIIHLFTLTNLGAPAAFKYFDTTIDRKRYTSTKEVLDATLIHQSITGLYETRIDLSQLGGDGGGSSPAPEAAAKGGMDPLQLLQPLEAEIKGTKLKAHWNSGATITCVPQAFLEEEVPIKNIWIKTIHGEKEQPVYYLTFKIQGRKVEAEVISSPYDYILVSPSDIPWLMKKPLQLTTLVPLQEYEERLLKQTMLTGSYKEKLQSLFLKYDALWQHWENQVGHRRIKPHHIATGTVNPRPQKQYPINPKAKASIQTVINDLLKQGVLIQQNSIMNTPVYPVPKPDGKWRMVLDYREVNKTIPLIAAQNQHSAGILSSIFRGKYKTTLDLSNGFWAHSITPESYWLTAFTWLGQQYCWTRLPQGFLNSPALFNADVVDLLKEVPNVQVYVDDIYISHDDPREHLEQLEKVFSLLLNAGYVVSLKKSEIAQHEVEFLGFNITKEGRGLTETFKQKLLNITPPRDLKQLQSILGKLNFARNFIPNFSELVKPLYNIIATAPGKYITWTTDNSQQLQNIISMLNSAENLEERNPEVRLIMKVNTSPSAGYIRFYNEFAKRPIMYLNYVYTKAEVKFTNTEKLLTTIHKGLIKALDLGMGQEILVYSPIVSMTKIQKTPLPERKALPIRWITWMSYLEDPRIQFHYDKTLPELQQVPTVTDDIIAKIKHPSEFSMVFYTDGSAIKHPNVNKSHNAGMGIAQVQFKPEFTVINTWSIPLGDHTAQLAEVAAVEFACKKALKIDGPVLIVTDSFYVAESVNKELPYWQSNGFFNNKKKPLKHVSKWKSIADCIQLKPDIIIIHEKGHQPTASTFHTEGNNLADKLATQGSYVVNAGKRTADGSEFEKRTADGSEFESPKKKAKVE

SEQ ID NO: 676 - protein, 2171 aa, synthetic construct
MPAAKRVKLDGGDKKYSIGLDIGTNSVGWAVITDEYKVPSKKFKVLGNTDRHSIKKNLIGALLFDSGETAEATRLKRTARRRYTRRKNRICYLQEIFSNEMAKVDDSFFHRLEESFLVEEDKKHERHPIFGNIVDEVAYHEKYPTIYHLRKKLVDSTDKADLRLIYLALAHMIKFRGHFLIEGDLNPDNSDVDKLFIQLVQTYNQLFEENPINASGVDAKAILSARLSKSRRLENLIAQLPGEKKNGLFGNLIALSLGLTPNFKSNFDLAEDAKLQLSKDTYDDDLDNLLAQIGDQYADLFLAAKNLSDAILLSDILRVNTEITKAPLSASMIKRYDEHHQDLTLLKALVRQQLPEKYKEIFFDQSKNGYAGYIDGGASQEEFYKFIKPILEKMDGTEELLVKLNREDLLRKQRTFDNGSIPHQIHLGELHAILRRQEDFYPFLKDNREKIEKILTFRIPYYVGPLARGNSRFAWMTRKSEETITPWNFEEVVDKGASAQSFIERMTNFDKNLPNEKVLPKHSLLYEYFTVYNELTKVKYVTEGMRKPAFLSGEQKKAIVDLLFKTNRKVTVKQLKEDYFKKIECFDSVEISGVEDRFNASLGTYHDLLKIIKDKDFLDNEENEDILEDIVLTLTLFEDREMIEERLKTYAHLFDDKVMKQLKRRRYTGWGRLSRKLINGIRDKQSGKTILDFLKSDGFANRNFMQLIHDDSLTFKEDIQKAQVSGQGDSLHEHIANLAGSPAIKKGILQTVKVVDELVKVMGRHKPENIVIEMARENQTTQKGQKNSRERMKRIEEGIKELGSQILKEHPVENTQLQNEKLYLYYLQNGRDMYVDQELDINRLSDYDVDHIVPQSFLKDDSIDNKVLTRSDKARGKSDNVPSEEVVKKMKNYWRQLLNAKLITQRKFDNLTKAERGGLSELDKAGFIKRQLVETRQITKHVAQILDSRMNTKYDENDKLIREVKVITLKSKLVSDFRKDFQFYKVREINNYHHAHDAYLNAVVGTALIKKYPKLESEFVYGDYKVYDVRKMIAKSEQEIGKATAKYFFYSNIMNFFKTEITLANGEIRKRPLIETNGETGEIVWDKGRDFATVRKVLSMPQVNIVKKTEVQTGGFSKESILPKRNSDKLIARKKDWDPKKYGGFDSPTVAYSVLVVAKVEKGKSKKLKSVKELLGITIMERSSFEKNPIDFLEAKGYKEVKKDLIIKLPKYSLFELENGRKRMLASAGELQKGNELALPSKYVNFLYLASHYEKLKGSPEDNEQKQLFVEQHKHYLDEIIEQISEFSKRVILADANLDKVLSAYNKHRDKPIREQAENIIHLFTLTNLGAPAAFKYFDTTIDRKRYTSTKEVLDATLIHQSITGLYETRIDLSQLGGDGGPAPGGGGGMDPLQLLQPLEAEIKGTKLKAHWNSGATITCVPQAFLEEEVPIKNIWIKTIHGEKEQPVYYLTFKIQGRKVEAEVISSPYDYILVSPSDIPWLMKKPLQLTTLVPLQEYEERLLKQTMLTGSYKEKLQSLFLKYDALWQHWENQVGHRRIKPHHIATGTVNPRPQKQYPINPKAKASIQTVINDLLKQGVLIQQNSIMNTPVYPVPKPDGKWRMVLDYREVNKTIPLIAAQNQHSAGILSSIFRGKYKTTLDLSNGFWAHSITPESYWLTAFTWLGQQYCWTRLPQGFLNSPALFNADVVDLLKEVPNVQVYVDDIYISHDDPREHLEQLEKVFSLLLNAGYVVSLKKSEIAQHEVEFLGFNITKEGRGLTETFKQKLLNITPPRDLKQLQSILGKLNFARNFIPNFSELVKPLYNIIATAPGKYITWTTDNSQQLQNIISMLNSAENLEERNPEVRLIMKVNTSPSAGYIRFYNEFAKRPIMYLNYVYTKAEVKFTNTEKLLTTIHKGLIKALDLGMGQEILVYSPIVSMTKIQKTPLPERKALPIRWITWMSYLEDPRIQFHYDKTLPELQQVPTVTDDIIAKIKHPSEFSMVFYTDGSAIKHPNVNKSHNAGMGIAQVQFKPEFTVINTWSIPLGDHTAQLAEVAAVEFACKKALKIDGPVLIVTDSFYVAESVNKELPYWQSNGFFNNKKKPLKHVSKWKSIADCIQLKPDIIIIHEKGHQPTASTFHTEGNNLADKLATQGSYVVNAGKRTADGSEFEKRTADGSEFESPKKKAKVE

SEQ ID NO: 677 - protein, 2180 aa, synthetic construct
MPAAKRVKLDGGDKKYSIGLDIGTNSVGWAVITDEYKVPSKKFKVLGNTDRHSIKKNLIGALLFDSGETAEATRLKRTARRRYTRRKNRICYLQEIFSNEMAKVDDSFFHRLEESFLVEEDKKHERHPIFGNIVDEVAYHEKYPTIYHLRKKLVDSTDKADLRLIYLALAHMIKFRGHFLIEGDLNPDNSDVDKLFIQLVQTYNQLFEENPINASGVDAKAILSARLSKSRRLENLIAQLPGEKKNGLFGNLIALSLGLTPNFKSNFDLAEDAKLQLSKDTYDDDLDNLLAQIGDQYADLFLAAKNLSDAILLSDILRVNTEITKAPLSASMIKRYDEHHQDLTLLKALVRQQLPEKYKEIFFDQSKNGYAGYIDGGASQEEFYKFIKPILEKMDGTEELLVKLNREDLLRKQRTFDNGSIPHQIHLGELHAILRRQEDFYPFLKDNREKIEKILTFRIPYYVGPLARGNSRFAWMTRKSEETITPWNFEEVVDKGASAQSFIERMTNFDKNLPNEKVLPKHSLLYEYFTVYNELTKVKYVTEGMRKPAFLSGEQKKAIVDLLFKTNRKVTVKQLKEDYFKKIECFDSVEISGVEDRFNASLGTYHDLLKIIKDKDFLDNEENEDILEDIVLTLTLFEDREMIEERLKTYAHLFDDKVMKQLKRRRYTGWGRLSRKLINGIRDKQSGKTILDFLKSDGFANRNFMQLIHDDSLTFKEDIQKAQVSGQGDSLHEHIANLAGSPAIKKGILQTVKVVDELVKVMGRHKPENIVIEMARENQTTQKGQKNSRERMKRIEEGIKELGSQILKEHPVENTQLQNEKLYLYYLQNGRDMYVDQELDINRLSDYDVDHIVPQSFLKDDSIDNKVLTRSDKARGKSDNVPSEEVVKKMKNYWRQLLNAKLITQRKFDNLTKAERGGLSELDKAGFIKRQLVETRQITKHVAQILDSRMNTKYDENDKLIREVKVITLKSKLVSDFRKDFQFYKVREINNYHHAHDAYLNAVVGTALIKKYPKLESEFVYGDYKVYDVRKMIAKSEQEIGKATAKYFFYSNIMNFFKTEITLANGEIRKRPLIETNGETGEIVWDKGRDFATVRKVLSMPQVNIVKKTEVQTGGFSKESILPKRNSDKLIARKKDWDPKKYGGFDSPTVAYSVLVVAKVEKGKSKKLKSVKELLGITIMERSSFEKNPIDFLEAKGYKEVKKDLIIKLPKYSLFELENGRKRMLASAGELQKGNELALPSKYVNFLYLASHYEKLKGSPEDNEQKQLFVEQHKHYLDEIIEQISEFSKRVILADANLDKVLSAYNKHRDKPIREQAENIIHLFTLTNLGAPAAFKYFDTTIDRKRYTSTKEVLDATLIHQSITGLYETRIDLSQLGGDGGGSSGSSGSSGSSGSSGGMDPLQLLQPLEAEIKGTKLKAHWNSGATITCVPQAFLEEEVPIKNIWIKTIHGEKEQPVYYLTFKIQGRKVEAEVISSPYDYILVSPSDIPWLMKKPLQLTTLVPLQEYEERLLKQTMLTGSYKEKLQSLFLKYDALWQHWENQVGHRRIKPHHIATGTVNPRPQKQYPINPKAKASIQTVINDLLKQGVLIQQNSIMNTPVYPVPKPDGKWRMVLDYREVNKTIPLIAAQNQHSAGILSSIFRGKYKTTLDLSNGFWAHSITPESYWLTAFTWLGQQYCWTRLPQGFLNSPALFNADVVDLLKEVPNVQVYVDDIYISHDDPREHLEQLEKVFSLLLNAGYVVSLKKSEIAQHEVEFLGFNITKEGRGLTETFKQKLLNITPPRDLKQLQSILGKLNFARNFIPNFSELVKPLYNIIATAPGKYITWTTDNSQQLQNIISMLNSAENLEERNPEVRLIMKVNTSPSAGYIRFYNEFAKRPIMYLNYVYTKAEVKFTNTEKLLTTIHKGLIKALDLGMGQEILVYSPIVSMTKIQKTPLPERKALPIRWITWMSYLEDPRIQFHYDKTLPELQQVPTVTDDIIAKIKHPSEFSMVFYTDGSAIKHPNVNKSHNAGMGIAQVQFKPEFTVINTWSIPLGDHTAQLAEVAAVEFACKKALKIDGPVLIVTDSFYVAESVNKELPYWQSNGFFNNKKKPLKHVSKWKSIADCIQLKPDIIIIHEKGHQPTASTFHTEGNNLADKLATQGSYVVNAGKRTADGSEFEKRTADGSEFESPKKKAKVE

SEQ ID NO: 678 - protein, 2174 aa, synthetic construct
MPAAKRVKLDGGDKKYSIGLDIGTNSVGWAVITDEYKVPSKKFKVLGNTDRHSIKKNLIGALLFDSGETAEATRLKRTARRRYTRRKNRICYLQEIFSNEMAKVDDSFFHRLEESFLVEEDKKHERHPIFGNIVDEVAYHEKYPTIYHLRKKLVDSTDKADLRLIYLALAHMIKFRGHFLIEGDLNPDNSDVDKLFIQLVQTYNQLFEENPINASGVDAKAILSARLSKSRRLENLIAQLPGEKKNGLFGNLIALSLGLTPNFKSNFDLAEDAKLQLSKDTYDDDLDNLLAQIGDQYADLFLAAKNLSDAILLSDILRVNTEITKAPLSASMIKRYDEHHQDLTLLKALVRQQLPEKYKEIFFDQSKNGYAGYIDGGASQEEFYKFIKPILEKMDGTEELLVKLNREDLLRKQRTFDNGSIPHQIHLGELHAILRRQEDFYPFLKDNREKIEKILTFRIPYYVGPLARGNSRFAWMTRKSEETITPWNFEEVVDKGASAQSFIERMTNFDKNLPNEKVLPKHSLLYEYFTVYNELTKVKYVTEGMRKPAFLSGEQKKAIVDLLFKTNRKVTVKQLKEDYFKKIECFDSVEISGVEDRFNASLGTYHDLLKIIKDKDFLDNEENEDILEDIVLTLTLFEDREMIEERLKTYAHLFDDKVMKQLKRRRYTGWGRLSRKLINGIRDKQSGKTILDFLKSDGFANRNFMQLIHDDSLTFKEDIQKAQVSGQGDSLHEHIANLAGSPAIKKGILQTVKVVDELVKVMGRHKPENIVIEMARENQTTQKGQKNSRERMKRIEEGIKELGSQILKEHPVENTQLQNEKLYLYYLQNGRDMYVDQELDINRLSDYDVDHIVPQSFLKDDSIDNKVLTRSDKARGKSDNVPSEEVVKKMKNYWRQLLNAKLITQRKFDNLTKAERGGLSELDKAGFIKRQLVETRQITKHVAQILDSRMNTKYDENDKLIREVKVITLKSKLVSDFRKDFQFYKVREINNYHHAHDAYLNAVVGTALIKKYPKLESEFVYGDYKVYDVRKMIAKSEQEIGKATAKYFFYSNIMNFFKTEITLANGEIRKRPLIETNGETGEIVWDKGRDFATVRKVLSMPQVNIVKKTEVQTGGFSKESILPKRNSDKLIARKKDWDPKKYGGFDSPTVAYSVLVVAKVEKGKSKKLKSVKELLGITIMERSSFEKNPIDFLEAKGYKEVKKDLIIKLPKYSLFELENGRKRMLASAGELQKGNELALPSKYVNFLYLASHYEKLKGSPEDNEQKQLFVEQHKHYLDEIIEQISEFSKRVILADANLDKVLSAYNKHRDKPIREQAENIIHLFTLTNLGAPAAFKYFDTTIDRKRYTSTKEVLDATLIHQSITGLYETRIDLSQLGGDGGGGGPAPGGSGGMDPLQLLQPLEAEIKGTKLKAHWNSGATITCVPQAFLEEEVPIKNIWIKTIHGEKEQPVYYLTFKIQGRKVEAEVISSPYDYILVSPSDIPWLMKKPLQLTTLVPLQEYEERLLKQTMLTGSYKEKLQSLFLKYDALWQHWENQVGHRRIKPHHIATGTVNPRPQKQYPINPKAKASIQTVINDLLKQGVLIQQNSIMNTPVYPVPKPDGKWRMVLDYREVNKTIPLIAAQNQHSAGILSSIFRGKYKTTLDLSNGFWAHSITPESYWLTAFTWLGQQYCWTRLPQGFLNSPALFNADVVDLLKEVPNVQVYVDDIYISHDDPREHLEQLEKVFSLLLNAGYVVSLKKSEIAQHEVEFLGFNITKEGRGLTETFKQKLLNITPPRDLKQLQSILGKLNFARNFIPNFSELVKPLYNIIATAPGKYITWTTDNSQQLQNIISMLNSAENLEERNPEVRLIMKVNTSPSAGYIRFYNEFAKRPIMYLNYVYTKAEVKFTNTEKLLTTIHKGLIKALDLGMGQEILVYSPIVSMTKIQKTPLPERKALPIRWITWMSYLEDPRIQFHYDKTLPELQQVPTVTDDIIAKIKHPSEFSMVFYTDGSAIKHPNVNKSHNAGMGIAQVQFKPEFTVINTWSIPLGDHTAQLAEVAAVEFACKKALKIDGPVLIVTDSFYVAESVNKELPYWQSNGFFNNKKKPLKHVSKWKSIADCIQLKPDIIIIHEKGHQPTASTFHTEGNNLADKLATQGSYVVNAGKRTADGSEFEKRTADGSEFESPKKKAKVE

SEQ ID NO: 679 - protein, 2176 aa, synthetic construct
MPAAKRVKLDGGDKKYSIGLDIGTNSVGWAVITDEYKVPSKKFKVLGNTDRHSIKKNLIGALLFDSGETAEATRLKRTARRRYTRRKNRICYLQEIFSNEMAKVDDSFFHRLEESFLVEEDKKHERHPIFGNIVDEVAYHEKYPTIYHLRKKLVDSTDKADLRLIYLALAHMIKFRGHFLIEGDLNPDNSDVDKLFIQLVQTYNQLFEENPINASGVDAKAILSARLSKSRRLENLIAQLPGEKKNGLFGNLIALSLGLTPNFKSNFDLAEDAKLQLSKDTYDDDLDNLLAQIGDQYADLFLAAKNLSDAILLSDILRVNTEITKAPLSASMIKRYDEHHQDLTLLKALVRQQLPEKYKEIFFDQSKNGYAGYIDGGASQEEFYKFIKPILEKMDGTEELLVKLNREDLLRKQRTFDNGSIPHQIHLGELHAILRRQEDFYPFLKDNREKIEKILTFRIPYYVGPLARGNSRFAWMTRKSEETITPWNFEEVVDKGASAQSFIERMTNFDKNLPNEKVLPKHSLLYEYFTVYNELTKVKYVTEGMRKPAFLSGEQKKAIVDLLFKTNRKVTVKQLKEDYFKKIECFDSVEISGVEDRFNASLGTYHDLLKIIKDKDFLDNEENEDILEDIVLTLTLFEDREMIEERLKTYAHLFDDKVMKQLKRRRYTGWGRLSRKLINGIRDKQSGKTILDFLKSDGFANRNFMQLIHDDSLTFKEDIQKAQVSGQGDSLHEHIANLAGSPAIKKGILQTVKVVDELVKVMGRHKPENIVIEMARENQTTQKGQKNSRERMKRIEEGIKELGSQILKEHPVENTQLQNEKLYLYYLQNGRDMYVDQELDINRLSDYDVDHIVPQSFLKDDSIDNKVLTRSDKARGKSDNVPSEEVVKKMKNYWRQLLNAKLITQRKFDNLTKAERGGLSELDKAGFIKRQLVETRQITKHVAQILDSRMNTKYDENDKLIREVKVITLKSKLVSDFRKDFQFYKVREINNYHHAHDAYLNAVVGTALIKKYPKLESEFVYGDYKVYDVRKMIAKSEQEIGKATAKYFFYSNIMNFFKTEITLANGEIRKRPLIETNGETGEIVWDKGRDFATVRKVLSMPQVNIVKKTEVQTGGFSKESILPKRNSDKLIARKKDWDPKKYGGFDSPTVAYSVLVVAKVEKGKSKKLKSVKELLGITIMERSSFEKNPIDFLEAKGYKEVKKDLIIKLPKYSLFELENGRKRMLASAGELQKGNELALPSKYVNFLYLASHYEKLKGSPEDNEQKQLFVEQHKHYLDEIIEQISEFSKRVILADANLDKVLSAYNKHRDKPIREQAENIIHLFTLTNLGAPAAFKYFDTTIDRKRYTSTKEVLDATLIHQSITGLYETRIDLSQLGGDGGGGSGSSEAAAKGGMDPLQLLQPLEAEIKGTKLKAHWNSGATITCVPQAFLEEEVPIKNIWIKTIHGEKEQPVYYLTFKIQGRKVEAEVISSPYDYILVSPSDIPWLMKKPLQLTTLVPLQEYEERLLKQTMLTGSYKEKLQSLFLKYDALWQHWENQVGHRRIKPHHIATGTVNPRPQKQYPINPKAKASIQTVINDLLKQGVLIQQNSIMNTPVYPVPKPDGKWRMVLDYREVNKTIPLIAAQNQHSAGILSSIFRGKYKTTLDLSNGFWAHSITPESYWLTAFTWLGQQYCWTRLPQGFLNSPALFNADVVDLLKEVPNVQVYVDDIYISHDDPREHLEQLEKVFSLLLNAGYVVSLKKSEIAQHEVEFLGFNITKEGRGLTETFKQKLLNITPPRDLKQLQSILGKLNFARNFIPNFSELVKPLYNIIATAPGKYITWTTDNSQQLQNIISMLNSAENLEERNPEVRLIMKVNTSPSAGYIRFYNEFAKRPIMYLNYVYTKAEVKFTNTEKLLTTIHKGLIKALDLGMGQEILVYSPIVSMTKIQKTPLPERKALPIRWITWMSYLEDPRIQFHYDKTLPELQQVPTVTDDIIAKIKHPSEFSMVFYTDGSAIKHPNVNKSHNAGMGIAQVQFKPEFTVINTWSIPLGDHTAQLAEVAAVEFACKKALKIDGPVLIVTDSFYVAESVNKELPYWQSNGFFNNKKKPLKHVSKWKSIADCIQLKPDIIIIHEKGHQPTASTFHTEGNNLADKLATQGSYVVNAGKRTADGSEFEKRTADGSEFESPKKKAKVE

SEQ ID NO: 680 - protein, 2176 aa, synthetic construct
MPAAKRVKLDGGDKKYSIGLDIGTNSVGWAVITDEYKVPSKKFKVLGNTDRHSIKKNLIGALLFDSGETAEATRLKRTARRRYTRRKNRICYLQEIFSNEMAKVDDSFFHRLEESFLVEEDKKHERHPIFGNIVDEVAYHEKYPTIYHLRKKLVDSTDKADLRLIYLALAHMIKFRGHFLIEGDLNPDNSDVDKLFIQLVQTYNQLFEENPINASGVDAKAILSARLSKSRRLENLIAQLPGEKKNGLFGNLIALSLGLTPNFKSNFDLAEDAKLQLSKDTYDDDLDNLLAQIGDQYADLFLAAKNLSDAILLSDILRVNTEITKAPLSASMIKRYDEHHQDLTLLKALVRQQLPEKYKEIFFDQSKNGYAGYIDGGASQEEFYKFIKPILEKMDGTEELLVKLNREDLLRKQRTFDNGSIPHQIHLGELHAILRRQEDFYPFLKDNREKIEKILTFRIPYYVGPLARGNSRFAWMTRKSEETITPWNFEEVVDKGASAQSFIERMTNFDKNLPNEKVLPKHSLLYEYFTVYNELTKVKYVTEGMRKPAFLSGEQKKAIVDLLFKTNRKVTVKQLKEDYFKKIECFDSVEISGVEDRFNASLGTYHDLLKIIKDKDFLDNEENEDILEDIVLTLTLFEDREMIEERLKTYAHLFDDKVMKQLKRRRYTGWGRLSRKLINGIRDKQSGKTILDFLKSDGFANRNFMQLIHDDSLTFKEDIQKAQVSGQGDSLHEHIANLAGSPAIKKGILQTVKVVDELVKVMGRHKPENIVIEMARENQTTQKGQKNSRERMKRIEEGIKELGSQILKEHPVENTQLQNEKLYLYYLQNGRDMYVDQELDINRLSDYDVDHIVPQSFLKDDSIDNKVLTRSDKARGKSDNVPSEEVVKKMKNYWRQLLNAKLITQRKFDNLTKAERGGLSELDKAGFIKRQLVETRQITKHVAQILDSRMNTKYDENDKLIREVKVITLKSKLVSDFRKDFQFYKVREINNYHHAHDAYLNAVVGTALIKKYPKLESEFVYGDYKVYDVRKMIAKSEQEIGKATAKYFFYSNIMNFFKTEITLANGEIRKRPLIETNGETGEIVWDKGRDFATVRKVLSMPQVNIVKKTEVQTGGFSKESILPKRNSDKLIARKKDWDPKKYGGFDSPTVAYSVLVVAKVEKGKSKKLKSVKELLGITIMERSSFEKNPIDFLEAKGYKEVKKDLIIKLPKYSLFELENGRKRMLASAGELQKGNELALPSKYVNFLYLASHYEKLKGSPEDNEQKQLFVEQHKHYLDEIIEQISEFSKRVILADANLDKVLSAYNKHRDKPIREQAENIIHLFTLTNLGAPAAFKYFDTTIDRKRYTSTKEVLDATLIHQSITGLYETRIDLSQLGGDGGEAAAKGGSPAPGGMDPLQLLQPLEAEIKGTKLKAHWNSGATITCVPQAFLEEEVPIKNIWIKTIHGEKEQPVYYLTFKIQGRKVEAEVISSPYDYILVSPSDIPWLMKKPLQLTTLVPLQEYEERLLKQTMLTGSYKEKLQSLFLKYDALWQHWENQVGHRRIKPHHIATGTVNPRPQKQYPINPKAKASIQTVINDLLKQGVLIQQNSIMNTPVYPVPKPDGKWRMVLDYREVNKTIPLIAAQNQHSAGILSSIFRGKYKTTLDLSNGFWAHSITPESYWLTAFTWLGQQYCWTRLPQGFLNSPALFNADVVDLLKEVPNVQVYVDDIYISHDDPREHLEQLEKVFSLLLNAGYVVSLKKSEIAQHEVEFLGFNITKEGRGLTETFKQKLLNITPPRDLKQLQSILGKLNFARNFIPNFSELVKPLYNIIATAPGKYITWTTDNSQQLQNIISMLNSAENLEERNPEVRLIMKVNTSPSAGYIRFYNEFAKRPIMYLNYVYTKAEVKFTNTEKLLTTIHKGLIKALDLGMGQEILVYSPIVSMTKIQKTPLPERKALPIRWITWMSYLEDPRIQFHYDKTLPELQQVPTVTDDIIAKIKHPSEFSMVFYTDGSAIKHPNVNKSHNAGMGIAQVQFKPEFTVINTWSIPLGDHTAQLAEVAAVEFACKKALKIDGPVLIVTDSFYVAESVNKELPYWQSNGFFNNKKKPLKHVSKWKSIADCIQLKPDIIIIHEKGHQPTASTFHTEGNNLADKLATQGSYVVNAGKRTADGSEFEKRTADGSEFESPKKKAKVE

SEQ ID NO: 681 - protein, 2175 aa, synthetic construct
MPAAKRVKLDGGDKKYSIGLDIGTNSVGWAVITDEYKVPSKKFKVLGNTDRHSIKKNLIGALLFDSGETAEATRLKRTARRRYTRRKNRICYLQEIFSNEMAKVDDSFFHRLEESFLVEEDKKHERHPIFGNIVDEVAYHEKYPTIYHLRKKLVDSTDKADLRLIYLALAHMIKFRGHFLIEGDLNPDNSDVDKLFIQLVQTYNQLFEENPINASGVDAKAILSARLSKSRRLENLIAQLPGEKKNGLFGNLIALSLGLTPNFKSNFDLAEDAKLQLSKDTYDDDLDNLLAQIGDQYADLFLAAKNLSDAILLSDILRVNTEITKAPLSASMIKRYDEHHQDLTLLKALVRQQLPEKYKEIFFDQSKNGYAGYIDGGASQEEFYKFIKPILEKMDGTEELLVKLNREDLLRKQRTFDNGSIPHQIHLGELHAILRRQEDFYPFLKDNREKIEKILTFRIPYYVGPLARGNSRFAWMTRKSEETITPWNFEEVVDKGASAQSFIERMTNFDKNLPNEKVLPKHSLLYEYFTVYNELTKVKYVTEGMRKPAFLSGEQKKAIVDLLFKTNRKVTVKQLKEDYFKKIECFDSVEISGVEDRFNASLGTYHDLLKIIKDKDFLDNEENEDILEDIVLTLTLFEDREMIEERLKTYAHLFDDKVMKQLKRRRYTGWGRLSRKLINGIRDKQSGKTILDFLKSDGFANRNFMQLIHDDSLTFKEDIQKAQVSGQGDSLHEHIANLAGSPAIKKGILQTVKVVDELVKVMGRHKPENIVIEMARENQTTQKGQKNSRERMKRIEEGIKELGSQILKEHPVENTQLQNEKLYLYYLQNGRDMYVDQELDINRLSDYDVDHIVPQSFLKDDSIDNKVLTRSDKARGKSDNVPSEEVVKKMKNYWRQLLNAKLITQRKFDNLTKAERGGLSELDKAGFIKRQLVETRQITKHVAQILDSRMNTKYDENDKLIREVKVITLKSKLVSDFRKDFQFYKVREINNYHHAHDAYLNAVVGTALIKKYPKLESEFVYGDYKVYDVRKMIAKSEQEIGKATAKYFFYSNIMNFFKTEITLANGEIRKRPLIETNGETGEIVWDKGRDFATVRKVLSMPQVNIVKKTEVQTGGFSKESILPKRNSDKLIARKKDWDPKKYGGFDSPTVAYSVLVVAKVEKGKSKKLKSVKELLGITIMERSSFEKNPIDFLEAKGYKEVKKDLIIKLPKYSLFELENGRKRMLASAGELQKGNELALPSKYVNFLYLASHYEKLKGSPEDNEQKQLFVEQHKHYLDEIIEQISEFSKRVILADANLDKVLSAYNKHRDKPIREQAENIIHLFTLTNLGAPAAFKYFDTTIDRKRYTSTKEVLDATLIHQSITGLYETRIDLSQLGGDGGGGGGSGGGGSGGMDPLQLLQPLEAEIKGTKLKAHWNSGATITCVPQAFLEEEVPIKNIWIKTIHGEKEQPVYYLTFKIQGRKVEAEVISSPYDYILVSPSDIPWLMKKPLQLTTLVPLQEYEERLLKQTMLTGSYKEKLQSLFLKYDALWQHWENQVGHRRIKPHHIATGTVNPRPQKQYPINPKAKASIQTVINDLLKQGVLIQQNSIMNTPVYPVPKPDGKWRMVLDYREVNKTIPLIAAQNQHSAGILSSIFRGKYKTTLDLSNGFWAHSITPESYWLTAFTWLGQQYCWTRLPQGFLNSPALFNADVVDLLKEVPNVQVYVDDIYISHDDPREHLEQLEKVFSLLLNAGYVVSLKKSEIAQHEVEFLGFNITKEGRGLTETFKQKLLNITPPRDLKQLQSILGKLNFARNFIPNFSELVKPLYNIIATAPGKYITWTTDNSQQLQNIISMLNSAENLEERNPEVRLIMKVNTSPSAGYIRFYNEFAKRPIMYLNYVYTKAEVKFTNTEKLLTTIHKGLIKALDLGMGQEILVYSPIVSMTKIQKTPLPERKALPIRWITWMSYLEDPRIQFHYDKTLPELQQVPTVTDDIIAKIKHPSEFSMVFYTDGSAIKHPNVNKSHNAGMGIAQVQFKPEFTVINTWSIPLGDHTAQLAEVAAVEFACKKALKIDGPVLIVTDSFYVAESVNKELPYWQSNGFFNNKKKPLKHVSKWKSIADCIQLKPDIIIIHEKGHQPTASTFHTEGNNLADKLATQGSYVVNAGKRTADGSEFEKRTADGSEFESPKKKAKVE

SEQ ID NO: 682 - protein, 2171 aa, synthetic construct
MPAAKRVKLDGGDKKYSIGLDIGTNSVGWAVITDEYKVPSKKFKVLGNTDRHSIKKNLIGALLFDSGETAEATRLKRTARRRYTRRKNRICYLQEIFSNEMAKVDDSFFHRLEESFLVEEDKKHERHPIFGNIVDEVAYHEKYPTIYHLRKKLVDSTDKADLRLIYLALAHMIKFRGHFLIEGDLNPDNSDVDKLFIQLVQTYNQLFEENPINASGVDAKAILSARLSKSRRLENLIAQLPGEKKNGLFGNLIALSLGLTPNFKSNFDLAEDAKLQLSKDTYDDDLDNLLAQIGDQYADLFLAAKNLSDAILLSDILRVNTEITKAPLSASMIKRYDEHHQDLTLLKALVRQQLPEKYKEIFFDQSKNGYAGYIDGGASQEEFYKFIKPILEKMDGTEELLVKLNREDLLRKQRTFDNGSIPHQIHLGELHAILRRQEDFYPFLKDNREKIEKILTFRIPYYVGPLARGNSRFAWMTRKSEETITPWNFEEVVDKGASAQSFIERMTNFDKNLPNEKVLPKHSLLYEYFTVYNELTKVKYVTEGMRKPAFLSGEQKKAIVDLLFKTNRKVTVKQLKEDYFKKIECFDSVEISGVEDRFNASLGTYHDLLKIIKDKDFLDNEENEDILEDIVLTLTLFEDREMIEERLKTYAHLFDDKVMKQLKRRRYTGWGRLSRKLINGIRDKQSGKTILDFLKSDGFANRNFMQLIHDDSLTFKEDIQKAQVSGQGDSLHEHIANLAGSPAIKKGILQTVKVVDELVKVMGRHKPENIVIEMARENQTTQKGQKNSRERMKRIEEGIKELGSQILKEHPVENTQLQNEKLYLYYLQNGRDMYVDQELDINRLSDYDVDHIVPQSFLKDDSIDNKVLTRSDKARGKSDNVPSEEVVKKMKNYWRQLLNAKLITQRKFDNLTKAERGGLSELDKAGFIKRQLVETRQITKHVAQILDSRMNTKYDENDKLIREVKVITLKSKLVSDFRKDFQFYKVREINNYHHAHDAYLNAVVGTALIKKYPKLESEFVYGDYKVYDVRKMIAKSEQEIGKATAKYFFYSNIMNFFKTEITLANGEIRKRPLIETNGETGEIVWDKGRDFATVRKVLSMPQVNIVKKTEVQTGGFSKESILPKRNSDKLIARKKDWDPKKYGGFDSPTVAYSVLVVAKVEKGKSKKLKSVKELLGITIMERSSFEKNPIDFLEAKGYKEVKKDLIIKLPKYSLFELENGRKRMLASAGELQKGNELALPSKYVNFLYLASHYEKLKGSPEDNEQKQLFVEQHKHYLDEIIEQISEFSKRVILADANLDKVLSAYNKHRDKPIREQAENIIHLFTLTNLGAPAAFKYFDTTIDRKRYTSTKEVLDATLIHQSITGLYETRIDLSQLGGDGGGGSGGSGGMDPLQLLQPLEAEIKGTKLKAHWNSGATITCVPQAFLEEEVPIKNIWIKTIHGEKEQPVYYLTFKIQGRKVEAEVISSPYDYILVSPSDIPWLMKKPLQLTTLVPLQEYEERLLKQTMLTGSYKEKLQSLFLKYDALWQHWENQVGHRRIKPHHIATGTVNPRPQKQYPINPKAKASIQTVINDLLKQGVLIQQNSIMNTPVYPVPKPDGKWRMVLDYREVNKTIPLIAAQNQHSAGILSSIFRGKYKTTLDLSNGFWAHSITPESYWLTAFTWLGQQYCWTRLPQGFLNSPALFNADVVDLLKEVPNVQVYVDDIYISHDDPREHLEQLEKVFSLLLNAGYVVSLKKSEIAQHEVEFLGFNITKEGRGLTETFKQKLLNITPPRDLKQLQSILGKLNFARNFIPNFSELVKPLYNIIATAPGKYITWTTDNSQQLQNIISMLNSAENLEERNPEVRLIMKVNTSPSAGYIRFYNEFAKRPIMYLNYVYTKAEVKFTNTEKLLTTIHKGLIKALDLGMGQEILVYSPIVSMTKIQKTPLPERKALPIRWITWMSYLEDPRIQFHYDKTLPELQQVPTVTDDIIAKIKHPSEFSMVFYTDGSAIKHPNVNKSHNAGMGIAQVQFKPEFTVINTWSIPLGDHTAQLAEVAAVEFACKKALKIDGPVLIVTDSFYVAESVNKELPYWQSNGFFNNKKKPLKHVSKWKSIADCIQLKPDIIIIHEKGHQPTASTFHTEGNNLADKLATQGSYVVNAGKRTADGSEFEKRTADGSEFESPKKKAKVE

SEQ ID NO: 683 - protein, 2174 aa, synthetic construct
MPAAKRVKLDGGDKKYSIGLDIGTNSVGWAVITDEYKVPSKKFKVLGNTDRHSIKKNLIGALLFDSGETAEATRLKRTARRRYTRRKNRICYLQEIFSNEMAKVDDSFFHRLEESFLVEEDKKHERHPIFGNIVDEVAYHEKYPTIYHLRKKLVDSTDKADLRLIYLALAHMIKFRGHFLIEGDLNPDNSDVDKLFIQLVQTYNQLFEENPINASGVDAKAILSARLSKSRRLENLIAQLPGEKKNGLFGNLIALSLGLTPNFKSNFDLAEDAKLQLSKDTYDDDLDNLLAQIGDQYADLFLAAKNLSDAILLSDILRVNTEITKAPLSASMIKRYDEHHQDLTLLKALVRQQLPEKYKEIFFDQSKNGYAGYIDGGASQEEFYKFIKPILEKMDGTEELLVKLNREDLLRKQRTFDNGSIPHQIHLGELHAILRRQEDFYPFLKDNREKIEKILTFRIPYYVGPLARGNSRFAWMTRKSEETITPWNFEEVVDKGASAQSFIERMTNFDKNLPNEKVLPKHSLLYEYFTVYNELTKVKYVTEGMRKPAFLSGEQKKAIVDLLFKTNRKVTVKQLKEDYFKKIECFDSVEISGVEDRFNASLGTYHDLLKIIKDKDFLDNEENEDILEDIVLTLTLFEDREMIEERLKTYAHLFDDKVMKQLKRRRYTGWGRLSRKLINGIRDKQSGKTILDFLKSDGFANRNFMQLIHDDSLTFKEDIQKAQVSGQGDSLHEHIANLAGSPAIKKGILQTVKVVDELVKVMGRHKPENIVIEMARENQTTQKGQKNSRERMKRIEEGIKELGSQILKEHPVENTQLQNEKLYLYYLQNGRDMYVDQELDINRLSDYDVDHIVPQSFLKDDSIDNKVLTRSDKARGKSDNVPSEEVVKKMKNYWRQLLNAKLITQRKFDNLTKAERGGLSELDKAGFIKRQLVETRQITKHVAQILDSRMNTKYDENDKLIREVKVITLKSKLVSDFRKDFQFYKVREINNYHHAHDAYLNAVVGTALIKKYPKLESEFVYGDYKVYDVRKMIAKSEQEIGKATAKYFFYSNIMNFFKTEITLANGEIRKRPLIETNGETGEIVWDKGRDFATVRKVLSMPQVNIVKKTEVQTGGFSKESILPKRNSDKLIARKKDWDPKKYGGFDSPTVAYSVLVVAKVEKGKSKKLKSVKELLGITIMERSSFEKNPIDFLEAKGYKEVKKDLIIKLPKYSLFELENGRKRMLASAGELQKGNELALPSKYVNFLYLASHYEKLKGSPEDNEQKQLFVEQHKHYLDEIIEQISEFSKRVILADANLDKVLSAYNKHRDKPIREQAENIIHLFTLTNLGAPAAFKYFDTTIDRKRYTSTKEVLDATLIHQSITGLYETRIDLSQLGGDGGGSSGGSPAPGGMDPLQLLQPLEAEIKGTKLKAHWNSGATITCVPQAFLEEEVPIKNIWIKTIHGEKEQPVYYLTFKIQGRKVEAEVISSPYDYILVSPSDIPWLMKKPLQLTTLVPLQEYEERLLKQTMLTGSYKEKLQSLFLKYDALWQHWENQVGHRRIKPHHIATGTVNPRPQKQYPINPKAKASIQTVINDLLKQGVLIQQNSIMNTPVYPVPKPDGKWRMVLDYREVNKTIPLIAAQNQHSAGILSSIFRGKYKTTLDLSNGFWAHSITPESYWLTAFTWLGQQYCWTRLPQGFLNSPALFNADVVDLLKEVPNVQVYVDDIYISHDDPREHLEQLEKVFSLLLNAGYVVSLKKSEIAQHEVEFLGFNITKEGRGLTETFKQKLLNITPPRDLKQLQSILGKLNFARNFIPNFSELVKPLYNIIATAPGKYITWTTDNSQQLQNIISMLNSAENLEERNPEVRLIMKVNTSPSAGYIRFYNEFAKRPIMYLNYVYTKAEVKFTNTEKLLTTIHKGLIKALDLGMGQEILVYSPIVSMTKIQKTPLPERKALPIRWITWMSYLEDPRIQFHYDKTLPELQQVPTVTDDIIAKIKHPSEFSMVFYTDGSAIKHPNVNKSHNAGMGIAQVQFKPEFTVINTWSIPLGDHTAQLAEVAAVEFACKKALKIDGPVLIVTDSFYVAESVNKELPYWQSNGFFNNKKKPLKHVSKWKSIADCIQLKPDIIIIHEKGHQPTASTFHTEGNNLADKLATQGSYVVNAGKRTADGSEFEKRTADGSEFESPKKKAKVE

SEQ ID NO: 684 - protein, 2176 aa, synthetic construct
MPAAKRVKLDGGDKKYSIGLDIGTNSVGWAVITDEYKVPSKKFKVLGNTDRHSIKKNLIGALLFDSGETAEATRLKRTARRRYTRRKNRICYLQEIFSNEMAKVDDSFFHRLEESFLVEEDKKHERHPIFGNIVDEVAYHEKYPTIYHLRKKLVDSTDKADLRLIYLALAHMIKFRGHFLIEGDLNPDNSDVDKLFIQLVQTYNQLFEENPINASGVDAKAILSARLSKSRRLENLIAQLPGEKKNGLFGNLIALSLGLTPNFKSNFDLAEDAKLQLSKDTYDDDLDNLLAQIGDQYADLFLAAKNLSDAILLSDILRVNTEITKAPLSASMIKRYDEHHQDLTLLKALVRQQLPEKYKEIFFDQSKNGYAGYIDGGASQEEFYKFIKPILEKMDGTEELLVKLNREDLLRKQRTFDNGSIPHQIHLGELHAILRRQEDFYPFLKDNREKIEKILTFRIPYYVGPLARGNSRFAWMTRKSEETITPWNFEEVVDKGASAQSFIERMTNFDKNLPNEKVLPKHSLLYEYFTVYNELTKVKYVTEGMRKPAFLSGEQKKAIVDLLFKTNRKVTVKQLKEDYFKKIECFDSVEISGVEDRFNASLGTYHDLLKIIKDKDFLDNEENEDILEDIVLTLTLFEDREMIEERLKTYAHLFDDKVMKQLKRRRYTGWGRLSRKLINGIRDKQSGKTILDFLKSDGFANRNFMQLIHDDSLTFKEDIQKAQVSGQGDSLHEHIANLAGSPAIKKGILQTVKVVDELVKVMGRHKPENIVIEMARENQTTQKGQKNSRERMKRIEEGIKELGSQILKEHPVENTQLQNEKLYLYYLQNGRDMYVDQELDINRLSDYDVDHIVPQSFLKDDSIDNKVLTRSDKARGKSDNVPSEEVVKKMKNYWRQLLNAKLITQRKFDNLTKAERGGLSELDKAGFIKRQLVETRQITKHVAQILDSRMNTKYDENDKLIREVKVITLKSKLVSDFRKDFQFYKVREINNYHHAHDAYLNAVVGTALIKKYPKLESEFVYGDYKVYDVRKMIAKSEQEIGKATAKYFFYSNIMNFFKTEITLANGEIRKRPLIETNGETGEIVWDKGRDFATVRKVLSMPQVNIVKKTEVQTGGFSKESILPKRNSDKLIARKKDWDPKKYGGFDSPTVAYSVLVVAKVEKGKSKKLKSVKELLGITIMERSSFEKNPIDFLEAKGYKEVKKDLIIKLPKYSLFELENGRKRMLASAGELQKGNELALPSKYVNFLYLASHYEKLKGSPEDNEQKQLFVEQHKHYLDEIIEQISEFSKRVILADANLDKVLSAYNKHRDKPIREQAENIIHLFTLTNLGAPAAFKYFDTTIDRKRYTSTKEVLDATLIHQSITGLYETRIDLSQLGGDGGGGSEAAAKGSSGGMDPLQLLQPLEAEIKGTKLKAHWNSGATITCVPQAFLEEEVPIKNIWIKTIHGEKEQPVYYLTFKIQGRKVEAEVISSPYDYILVSPSDIPWLMKKPLQLTTLVPLQEYEERLLKQTMLTGSYKEKLQSLFLKYDALWQHWENQVGHRRIKPHHIATGTVNPRPQKQYPINPKAKASIQTVINDLLKQGVLIQQNSIMNTPVYPVPKPDGKWRMVLDYREVNKTIPLIAAQNQHSAGILSSIFRGKYKTTLDLSNGFWAHSITPESYWLTAFTWLGQQYCWTRLPQGFLNSPALFNADVVDLLKEVPNVQVYVDDIYISHDDPREHLEQLEKVFSLLLNAGYVVSLKKSEIAQHEVEFLGFNITKEGRGLTETFKQKLLNITPPRDLKQLQSILGKLNFARNFIPNFSELVKPLYNIIATAPGKYITWTTDNSQQLQNIISMLNSAENLEERNPEVRLIMKVNTSPSAGYIRFYNEFAKRPIMYLNYVYTKAEVKFTNTEKLLTTIHKGLIKALDLGMGQEILVYSPIVSMTKIQKTPLPERKALPIRWITWMSYLEDPRIQFHYDKTLPELQQVPTVTDDIIAKIKHPSEFSMVFYTDGSAIKHPNVNKSHNAGMGIAQVQFKPEFTVINTWSIPLGDHTAQLAEVAAVEFACKKALKIDGPVLIVTDSFYVAESVNKELPYWQSNGFFNNKKKPLKHVSKWKSIADCIQLKPDIIIIHEKGHQPTASTFHTEGNNLADKLATQGSYVVNAGKRTADGSEFEKRTADGSEFESPKKKAKVE

SEQ ID NO: 685 - protein, 2176 aa, synthetic construct
MPAAKRVKLDGGDKKYSIGLDIGTNSVGWAVITDEYKVPSKKFKVLGNTDRHSIKKNLIGALLFDSGETAEATRLKRTARRRYTRRKNRICYLQEIFSNEMAKVDDSFFHRLEESFLVEEDKKHERHPIFGNIVDEVAYHEKYPTIYHLRKKLVDSTDKADLRLIYLALAHMIKFRGHFLIEGDLNPDNSDVDKLFIQLVQTYNQLFEENPINASGVDAKAILSARLSKSRRLENLIAQLPGEKKNGLFGNLIALSLGLTPNFKSNFDLAEDAKLQLSKDTYDDDLDNLLAQIGDQYADLFLAAKNLSDAILLSDILRVNTEITKAPLSASMIKRYDEHHQDLTLLKALVRQQLPEKYKEIFFDQSKNGYAGYIDGGASQEEFYKFIKPILEKMDGTEELLVKLNREDLLRKQRTFDNGSIPHQIHLGELHAILRRQEDFYPFLKDNREKIEKILTFRIPYYVGPLARGNSRFAWMTRKSEETITPWNFEEVVDKGASAQSFIERMTNFDKNLPNEKVLPKHSLLYEYFTVYNELTKVKYVTEGMRKPAFLSGEQKKAIVDLLFKTNRKVTVKQLKEDYFKKIECFDSVEISGVEDRFNASLGTYHDLLKIIKDKDFLDNEENEDILEDIVLTLTLFEDREMIEERLKTYAHLFDDKVMKQLKRRRYTGWGRLSRKLINGIRDKQSGKTILDFLKSDGFANRNFMQLIHDDSLTFKEDIQKAQVSGQGDSLHEHIANLAGSPAIKKGILQTVKVVDELVKVMGRHKPENIVIEMARENQTTQKGQKNSRERMKRIEEGIKELGSQILKEHPVENTQLQNEKLYLYYLQNGRDMYVDQELDINRLSDYDVDHIVPQSFLKDDSIDNKVLTRSDKARGKSDNVPSEEVVKKMKNYWRQLLNAKLITQRKFDNLTKAERGGLSELDKAGFIKRQLVETRQITKHVAQILDSRMNTKYDENDKLIREVKVITLKSKLVSDFRKDFQFYKVREINNYHHAHDAYLNAVVGTALIKKYPKLESEFVYGDYKVYDVRKMIAKSEQEIGKATAKYFFYSNIMNFFKTEITLANGEIRKRPLIETNGETGEIVWDKGRDFATVRKVLSMPQVNIVKKTEVQTGGFSKESILPKRNSDKLIARKKDWDPKKYGGFDSPTVAYSVLVVAKVEKGKSKKLKSVKELLGITIMERSSFEKNPIDFLEAKGYKEVKKDLIIKLPKYSLFELENGRKRMLASAGELQKGNELALPSKYVNFLYLASHYEKLKGSPEDNEQKQLFVEQHKHYLDEIIEQISEFSKRVILADANLDKVLSAYNKHRDKPIREQAENIIHLFTLTNLGAPAAFKYFDTTIDRKRYTSTKEVLDATLIHQSITGLYETRIDLSQLGGDGGGGGEAAAKGSSGGMDPLQLLQPLEAEIKGTKLKAHWNSGATITCVPQAFLEEEVPIKNIWIKTIHGEKEQPVYYLTFKIQGRKVEAEVISSPYDYILVSPSDIPWLMKKPLQLTTLVPLQEYEERLLKQTMLTGSYKEKLQSLFLKYDALWQHWENQVGHRRIKPHHIATGTVNPRPQKQYPINPKAKASIQTVINDLLKQGVLIQQNSIMNTPVYPVPKPDGKWRMVLDYREVNKTIPLIAAQNQHSAGILSSIFRGKYKTTLDLSNGFWAHSITPESYWLTAFTWLGQQYCWTRLPQGFLNSPALFNADVVDLLKEVPNVQVYVDDIYISHDDPREHLEQLEKVFSLLLNAGYVVSLKKSEIAQHEVEFLGFNITKEGRGLTETFKQKLLNITPPRDLKQLQSILGKLNFARNFIPNFSELVKPLYNIIATAPGKYITWTTDNSQQLQNIISMLNSAENLEERNPEVRLIMKVNTSPSAGYIRFYNEFAKRPIMYLNYVYTKAEVKFTNTEKLLTTIHKGLIKALDLGMGQEILVYSPIVSMTKIQKTPLPERKALPIRWITWMSYLEDPRIQFHYDKTLPELQQVPTVTDDIIAKIKHPSEFSMVFYTDGSAIKHPNVNKSHNAGMGIAQVQFKPEFTVINTWSIPLGDHTAQLAEVAAVEFACKKALKIDGPVLIVTDSFYVAESVNKELPYWQSNGFFNNKKKPLKHVSKWKSIADCIQLKPDIIIIHEKGHQPTASTFHTEGNNLADKLATQGSYVVNAGKRTADGSEFEKRTADGSEFESPKKKAKVE

SEQ ID NO: 686 - protein, 2176 aa, synthetic construct
MPAAKRVKLDGGDKKYSIGLDIGTNSVGWAVITDEYKVPSKKFKVLGNTDRHSIKKNLIGALLFDSGETAEATRLKRTARRRYTRRKNRICYLQEIFSNEMAKVDDSFFHRLEESFLVEEDKKHERHPIFGNIVDEVAYHEKYPTIYHLRKKLVDSTDKADLRLIYLALAHMIKFRGHFLIEGDLNPDNSDVDKLFIQLVQTYNQLFEENPINASGVDAKAILSARLSKSRRLENLIAQLPGEKKNGLFGNLIALSLGLTPNFKSNFDLAEDAKLQLSKDTYDDDLDNLLAQIGDQYADLFLAAKNLSDAILLSDILRVNTEITKAPLSASMIKRYDEHHQDLTLLKALVRQQLPEKYKEIFFDQSKNGYAGYIDGGASQEEFYKFIKPILEKMDGTEELLVKLNREDLLRKQRTFDNGSIPHQIHLGELHAILRRQEDFYPFLKDNREKIEKILTFRIPYYVGPLARGNSRFAWMTRKSEETITPWNFEEVVDKGASAQSFIERMTNFDKNLPNEKVLPKHSLLYEYFTVYNELTKVKYVTEGMRKPAFLSGEQKKAIVDLLFKTNRKVTVKQLKEDYFKKIECFDSVEISGVEDRFNASLGTYHDLLKIIKDKDFLDNEENEDILEDIVLTLTLFEDREMIEERLKTYAHLFDDKVMKQLKRRRYTGWGRLSRKLINGIRDKQSGKTILDFLKSDGFANRNFMQLIHDDSLTFKEDIQKAQVSGQGDSLHEHIANLAGSPAIKKGILQTVKVVDELVKVMGRHKPENIVIEMARENQTTQKGQKNSRERMKRIEEGIKELGSQILKEHPVENTQLQNEKLYLYYLQNGRDMYVDQELDINRLSDYDVDHIVPQSFLKDDSIDNKVLTRSDKARGKSDNVPSEEVVKKMKNYWRQLLNAKLITQRKFDNLTKAERGGLSELDKAGFIKRQLVETRQITKHVAQILDSRMNTKYDENDKLIREVKVITLKSKLVSDFRKDFQFYKVREINNYHHAHDAYLNAVVGTALIKKYPKLESEFVYGDYKVYDVRKMIAKSEQEIGKATAKYFFYSNIMNFFKTEITLANGEIRKRPLIETNGETGEIVWDKGRDFATVRKVLSMPQVNIVKKTEVQTGGFSKESILPKRNSDKLIARKKDWDPKKYGGFDSPTVAYSVLVVAKVEKGKSKKLKSVKELLGITIMERSSFEKNPIDFLEAKGYKEVKKDLIIKLPKYSLFELENGRKRMLASAGELQKGNELALPSKYVNFLYLASHYEKLKGSPEDNEQKQLFVEQHKHYLDEIIEQISEFSKRVILADANLDKVLSAYNKHRDKPIREQAENIIHLFTLTNLGAPAAFKYFDTTIDRKRYTSTKEVLDATLIHQSITGLYETRIDLSQLGGDGGEAAAKPAPGSSGGMDPLQLLQPLEAEIKGTKLKAHWNSGATITCVPQAFLEEEVPIKNIWIKTIHGEKEQPVYYLTFKIQGRKVEAEVISSPYDYILVSPSDIPWLMKKPLQLTTLVPLQEYEERLLKQTMLTGSYKEKLQSLFLKYDALWQHWENQVGHRRIKPHHIATGTVNPRPQKQYPINPKAKASIQTVINDLLKQGVLIQQNSIMNTPVYPVPKPDGKWRMVLDYREVNKTIPLIAAQNQHSAGILSSIFRGKYKTTLDLSNGFWAHSITPESYWLTAFTWLGQQYCWTRLPQGFLNSPALFNADVVDLLKEVPNVQVYVDDIYISHDDPREHLEQLEKVFSLLLNAGYVVSLKKSEIAQHEVEFLGFNITKEGRGLTETFKQKLLNITPPRDLKQLQSILGKLNFARNFIPNFSELVKPLYNIIATAPGKYITWTTDNSQQLQNIISMLNSAENLEERNPEVRLIMKVNTSPSAGYIRFYNEFAKRPIMYLNYVYTKAEVKFTNTEKLLTTIHKGLIKALDLGMGQEILVYSPIVSMTKIQKTPLPERKALPIRWITWMSYLEDPRIQFHYDKTLPELQQVPTVTDDIIAKIKHPSEFSMVFYTDGSAIKHPNVNKSHNAGMGIAQVQFKPEFTVINTWSIPLGDHTAQLAEVAAVEFACKKALKIDGPVLIVTDSFYVAESVNKELPYWQSNGFFNNKKKPLKHVSKWKSIADCIQLKPDIIIIHEKGHQPTASTFHTEGNNLADKLATQGSYVVNAGKRTADGSEFEKRTADGSEFESPKKKAKVE

SEQ ID NO: 687 - protein, 2174 aa, synthetic construct
MPAAKRVKLDGGDKKYSIGLDIGTNSVGWAVITDEYKVPSKKFKVLGNTDRHSIKKNLIGALLFDSGETAEATRLKRTARRRYTRRKNRICYLQEIFSNEMAKVDDSFFHRLEESFLVEEDKKHERHPIFGNIVDEVAYHEKYPTIYHLRKKLVDSTDKADLRLIYLALAHMIKFRGHFLIEGDLNPDNSDVDKLFIQLVQTYNQLFEENPINASGVDAKAILSARLSKSRRLENLIAQLPGEKKNGLFGNLIALSLGLTPNFKSNFDLAEDAKLQLSKDTYDDDLDNLLAQIGDQYADLFLAAKNLSDAILLSDILRVNTEITKAPLSASMIKRYDEHHQDLTLLKALVRQQLPEKYKEIFFDQSKNGYAGYIDGGASQEEFYKFIKPILEKMDGTEELLVKLNREDLLRKQRTFDNGSIPHQIHLGELHAILRRQEDFYPFLKDNREKIEKILTFRIPYYVGPLARGNSRFAWMTRKSEETITPWNFEEVVDKGASAQSFIERMTNFDKNLPNEKVLPKHSLLYEYFTVYNELTKVKYVTEGMRKPAFLSGEQKKAIVDLLFKTNRKVTVKQLKEDYFKKIECFDSVEISGVEDRFNASLGTYHDLLKIIKDKDFLDNEENEDILEDIVLTLTLFEDREMIEERLKTYAHLFDDKVMKQLKRRRYTGWGRLSRKLINGIRDKQSGKTILDFLKSDGFANRNFMQLIHDDSLTFKEDIQKAQVSGQGDSLHEHIANLAGSPAIKKGILQTVKVVDELVKVMGRHKPENIVIEMARENQTTQKGQKNSRERMKRIEEGIKELGSQILKEHPVENTQLQNEKLYLYYLQNGRDMYVDQELDINRLSDYDVDHIVPQSFLKDDSIDNKVLTRSDKARGKSDNVPSEEVVKKMKNYWRQLLNAKLITQRKFDNLTKAERGGLSELDKAGFIKRQLVETRQITKHVAQILDSRMNTKYDENDKLIREVKVITLKSKLVSDFRKDFQFYKVREINNYHHAHDAYLNAVVGTALIKKYPKLESEFVYGDYKVYDVRKMIAKSEQEIGKATAKYFFYSNIMNFFKTEITLANGEIRKRPLIETNGETGEIVWDKGRDFATVRKVLSMPQVNIVKKTEVQTGGFSKESILPKRNSDKLIARKKDWDPKKYGGFDSPTVAYSVLVVAKVEKGKSKKLKSVKELLGITIMERSSFEKNPIDFLEAKGYKEVKKDLIIKLPKYSLFELENGRKRMLASAGELQKGNELALPSKYVNFLYLASHYEKLKGSPEDNEQKQLFVEQHKHYLDEIIEQISEFSKRVILADANLDKVLSAYNKHRDKPIREQAENIIHLFTLTNLGAPAAFKYFDTTIDRKRYTSTKEVLDATLIHQSITGLYETRIDLSQLGGDGGGGGPAPGSSGGMDPLQLLQPLEAEIKGTKLKAHWNSGATITCVPQAFLEEEVPIKNIWIKTIHGEKEQPVYYLTFKIQGRKVEAEVISSPYDYILVSPSDIPWLMKKPLQLTTLVPLQEYEERLLKQTMLTGSYKEKLQSLFLKYDALWQHWENQVGHRRIKPHHIATGTVNPRPQKQYPINPKAKASIQTVINDLLKQGVLIQQNSIMNTPVYPVPKPDGKWRMVLDYREVNKTIPLIAAQNQHSAGILSSIFRGKYKTTLDLSNGFWAHSITPESYWLTAFTWLGQQYCWTRLPQGFLNSPALFNADVVDLLKEVPNVQVYVDDIYISHDDPREHLEQLEKVFSLLLNAGYVVSLKKSEIAQHEVEFLGFNITKEGRGLTETFKQKLLNITPPRDLKQLQSILGKLNFARNFIPNFSELVKPLYNIIATAPGKYITWTTDNSQQLQNIISMLNSAENLEERNPEVRLIMKVNTSPSAGYIRFYNEFAKRPIMYLNYVYTKAEVKFTNTEKLLTTIHKGLIKALDLGMGQEILVYSPIVSMTKIQKTPLPERKALPIRWITWMSYLEDPRIQFHYDKTLPELQQVPTVTDDIIAKIKHPSEFSMVFYTDGSAIKHPNVNKSHNAGMGIAQVQFKPEFTVINTWSIPLGDHTAQLAEVAAVEFACKKALKIDGPVLIVTDSFYVAESVNKELPYWQSNGFFNNKKKPLKHVSKWKSIADCIQLKPDIIIIHEKGHQPTASTFHTEGNNLADKLATQGSYVVNAGKRTADGSEFEKRTADGSEFESPKKKAKVE

SEQ ID NO: 688 - protein, 2173 aa, synthetic construct
MPAAKRVKLDGGDKKYSIGLDIGTNSVGWAVITDEYKVPSKKFKVLGNTDRHSIKKNLIGALLFDSGETAEATRLKRTARRRYTRRKNRICYLQEIFSNEMAKVDDSFFHRLEESFLVEEDKKHERHPIFGNIVDEVAYHEKYPTIYHLRKKLVDSTDKADLRLIYLALAHMIKFRGHFLIEGDLNPDNSDVDKLFIQLVQTYNQLFEENPINASGVDAKAILSARLSKSRRLENLIAQLPGEKKNGLFGNLIALSLGLTPNFKSNFDLAEDAKLQLSKDTYDDDLDNLLAQIGDQYADLFLAAKNLSDAILLSDILRVNTEITKAPLSASMIKRYDEHHQDLTLLKALVRQQLPEKYKEIFFDQSKNGYAGYIDGGASQEEFYKFIKPILEKMDGTEELLVKLNREDLLRKQRTFDNGSIPHQIHLGELHAILRRQEDFYPFLKDNREKIEKILTFRIPYYVGPLARGNSRFAWMTRKSEETITPWNFEEVVDKGASAQSFIERMTNFDKNLPNEKVLPKHSLLYEYFTVYNELTKVKYVTEGMRKPAFLSGEQKKAIVDLLFKTNRKVTVKQLKEDYFKKIECFDSVEISGVEDRFNASLGTYHDLLKIIKDKDFLDNEENEDILEDIVLTLTLFEDREMIEERLKTYAHLFDDKVMKQLKRRRYTGWGRLSRKLINGIRDKQSGKTILDFLKSDGFANRNFMQLIHDDSLTFKEDIQKAQVSGQGDSLHEHIANLAGSPAIKKGILQTVKVVDELVKVMGRHKPENIVIEMARENQTTQKGQKNSRERMKRIEEGIKELGSQILKEHPVENTQLQNEKLYLYYLQNGRDMYVDQELDINRLSDYDVDHIVPQSFLKDDSIDNKVLTRSDKARGKSDNVPSEEVVKKMKNYWRQLLNAKLITQRKFDNLTKAERGGLSELDKAGFIKRQLVETRQITKHVAQILDSRMNTKYDENDKLIREVKVITLKSKLVSDFRKDFQFYKVREINNYHHAHDAYLNAVVGTALIKKYPKLESEFVYGDYKVYDVRKMIAKSEQEIGKATAKYFFYSNIMNFFKTEITLANGEIRKRPLIETNGETGEIVWDKGRDFATVRKVLSMPQVNIVKKTEVQTGGFSKESILPKRNSDKLIARKKDWDPKKYGGFDSPTVAYSVLVVAKVEKGKSKKLKSVKELLGITIMERSSFEKNPIDFLEAKGYKEVKKDLIIKLPKYSLFELENGRKRMLASAGELQKGNELALPSKYVNFLYLASHYEKLKGSPEDNEQKQLFVEQHKHYLDEIIEQISEFSKRVILADANLDKVLSAYNKHRDKPIREQAENIIHLFTLTNLGAPAAFKYFDTTIDRKRYTSTKEVLDATLIHQSITGLYETRIDLSQLGGDGGEAAAKGSSGGMDPLQLLQPLEAEIKGTKLKAHWNSGATITCVPQAFLEEEVPIKNIWIKTIHGEKEQPVYYLTFKIQGRKVEAEVISSPYDYILVSPSDIPWLMKKPLQLTTLVPLQEYEERLLKQTMLTGSYKEKLQSLFLKYDALWQHWENQVGHRRIKPHHIATGTVNPRPQKQYPINPKAKASIQTVINDLLKQGVLIQQNSIMNTPVYPVPKPDGKWRMVLDYREVNKTIPLIAAQNQHSAGILSSIFRGKYKTTLDLSNGFWAHSITPESYWLTAFTWLGQQYCWTRLPQGFLNSPALFNADVVDLLKEVPNVQVYVDDIYISHDDPREHLEQLEKVFSLLLNAGYVVSLKKSEIAQHEVEFLGFNITKEGRGLTETFKQKLLNITPPRDLKQLQSILGKLNFARNFIPNFSELVKPLYNIIATAPGKYITWTTDNSQQLQNIISMLNSAENLEERNPEVRLIMKVNTSPSAGYIRFYNEFAKRPIMYLNYVYTKAEVKFTNTEKLLTTIHKGLIKALDLGMGQEILVYSPIVSMTKIQKTPLPERKALPIRWITWMSYLEDPRIQFHYDKTLPELQQVPTVTDDIIAKIKHPSEFSMVFYTDGSAIKHPNVNKSHNAGMGIAQVQFKPEFTVINTWSIPLGDHTAQLAEVAAVEFACKKALKIDGPVLIVTDSFYVAESVNKELPYWQSNGFFNNKKKPLKHVSKWKSIADCIQLKPDIIIIHEKGHQPTASTFHTEGNNLADKLATQGSYVVNAGKRTADGSEFEKRTADGSEFESPKKKAKVE

SEQ ID NO: 689 - protein, 2176 aa, synthetic construct
MPAAKRVKLDGGDKKYSIGLDIGTNSVGWAVITDEYKVPSKKFKVLGNTDRHSIKKNLIGALLFDSGETAEATRLKRTARRRYTRRKNRICYLQEIFSNEMAKVDDSFFHRLEESFLVEEDKKHERHPIFGNIVDEVAYHEKYPTIYHLRKKLVDSTDKADLRLIYLALAHMIKFRGHFLIEGDLNPDNSDVDKLFIQLVQTYNQLFEENPINASGVDAKAILSARLSKSRRLENLIAQLPGEKKNGLFGNLIALSLGLTPNFKSNFDLAEDAKLQLSKDTYDDDLDNLLAQIGDQYADLFLAAKNLSDAILLSDILRVNTEITKAPLSASMIKRYDEHHQDLTLLKALVRQQLPEKYKEIFFDQSKNGYAGYIDGGASQEEFYKFIKPILEKMDGTEELLVKLNREDLLRKQRTFDNGSIPHQIHLGELHAILRRQEDFYPFLKDNREKIEKILTFRIPYYVGPLARGNSRFAWMTRKSEETITPWNFEEVVDKGASAQSFIERMTNFDKNLPNEKVLPKHSLLYEYFTVYNELTKVKYVTEGMRKPAFLSGEQKKAIVDLLFKTNRKVTVKQLKEDYFKKIECFDSVEISGVEDRFNASLGTYHDLLKIIKDKDFLDNEENEDILEDIVLTLTLFEDREMIEERLKTYAHLFDDKVMKQLKRRRYTGWGRLSRKLINGIRDKQSGKTILDFLKSDGFANRNFMQLIHDDSLTFKEDIQKAQVSGQGDSLHEHIANLAGSPAIKKGILQTVKVVDELVKVMGRHKPENIVIEMARENQTTQKGQKNSRERMKRIEEGIKELGSQILKEHPVENTQLQNEKLYLYYLQNGRDMYVDQELDINRLSDYDVDHIVPQSFLKDDSIDNKVLTRSDKARGKSDNVPSEEVVKKMKNYWRQLLNAKLITQRKFDNLTKAERGGLSELDKAGFIKRQLVETRQITKHVAQILDSRMNTKYDENDKLIREVKVITLKSKLVSDFRKDFQFYKVREINNYHHAHDAYLNAVVGTALIKKYPKLESEFVYGDYKVYDVRKMIAKSEQEIGKATAKYFFYSNIMNFFKTEITLANGEIRKRPLIETNGETGEIVWDKGRDFATVRKVLSMPQVNIVKKTEVQTGGFSKESILPKRNSDKLIARKKDWDPKKYGGFDSPTVAYSVLVVAKVEKGKSKKLKSVKELLGITIMERSSFEKNPIDFLEAKGYKEVKKDLIIKLPKYSLFELENGRKRMLASAGELQKGNELALPSKYVNFLYLASHYEKLKGSPEDNEQKQLFVEQHKHYLDEIIEQISEFSKRVILADANLDKVLSAYNKHRDKPIREQAENIIHLFTLTNLGAPAAFKYFDTTIDRKRYTSTKEVLDATLIHQSITGLYETRIDLSQLGGDGGEAAAKPAPGGSGGMNPLQLLQPLPAEVKGTKLLAHWNSGATITCIPESFLEDEQPIKQTLIKTIHGEKQQNVYYLTFKVKGRKVEAEVIASPYEYILLSPTDVPWLTQQPLQLTILVPLQEYQDRILNKTALPEEQKQQLKALFTKYDNLWQHWENQVGHRKIRPHNIATGDYPPRPQKQYPINPKAKPSIQIVIDDLLKQGVLTPQNSTMNTPVYPVPKPDGRWRMVLDYREVNKTIPLTAAQNQHSAGILATIVRQKYKTTLDLANGFWAHPITPDSYWLTAFTWQGKQYCWTRLPQGFLNSPALFTADAVDLLKEVPNVQVYVDDIYLSHDNPHEHIQQLEKVFQILLQAGYVVSLKKSEIGQRTVEFLGFNITKEGRGLTDTFKTKLLNVTPPKDLKQLQSILGLLNFARNFIPNFAELVQTLYNLIASSKGKYIEWTEDNTKQLNKVIEALNTASNLEERLPDQRLVIKVNTSPSAGYVRYYNESGKKPIMYLNYVFSKAELKFSMLEKLLTTMHKALIKAMDLAMGQEILVYSPIVSMTKIQKTPLPERKALPIRWITWMTYLEDPRIQFHYDKTLPELKHIPDVYTSSIPPLKHPSQYEGVFCTDGSAIKSPDPTKSNNAGMGIVHAIYNPEYKILNQWSIPLGHHTAQMAEIAAVEFACKKALKVPGPVLVITDSFYVAESANKELPYWKSNGFVNNKKEPLKHISKWKSIAECLSIKPDITIQHEKGHQPINTSIHTEGNALADKLATQGSYVVNAGKRTADGSEFEKRTADGSEFESPKKKAKVE

SEQ ID NO: 690 - protein, 2176 aa, synthetic construct
MPAAKRVKLDGGDKKYSIGLDIGTNSVGWAVITDEYKVPSKKFKVLGNTDRHSIKKNLIGALLFDSGETAEATRLKRTARRRYTRRKNRICYLQEIFSNEMAKVDDSFFHRLEESFLVEEDKKHERHPIFGNIVDEVAYHEKYPTIYHLRKKLVDSTDKADLRLIYLALAHMIKFRGHFLIEGDLNPDNSDVDKLFIQLVQTYNQLFEENPINASGVDAKAILSARLSKSRRLENLIAQLPGEKKNGLFGNLIALSLGLTPNFKSNFDLAEDAKLQLSKDTYDDDLDNLLAQIGDQYADLFLAAKNLSDAILLSDILRVNTEITKAPLSASMIKRYDEHHQDLTLLKALVRQQLPEKYKEIFFDQSKNGYAGYIDGGASQEEFYKFIKPILEKMDGTEELLVKLNREDLLRKQRTFDNGSIPHQIHLGELHAILRRQEDFYPFLKDNREKIEKILTFRIPYYVGPLARGNSRFAWMTRKSEETITPWNFEEVVDKGASAQSFIERMTNFDKNLPNEKVLPKHSLLYEYFTVYNELTKVKYVTEGMRKPAFLSGEQKKAIVDLLFKTNRKVTVKQLKEDYFKKIECFDSVEISGVEDRFNASLGTYHDLLKIIKDKDFLDNEENEDILEDIVLTLTLFEDREMIEERLKTYAHLFDDKVMKQLKRRRYTGWGRLSRKLINGIRDKQSGKTILDFLKSDGFANRNFMQLIHDDSLTFKEDIQKAQVSGQGDSLHEHIANLAGSPAIKKGILQTVKVVDELVKVMGRHKPENIVIEMARENQTTQKGQKNSRERMKRIEEGIKELGSQILKEHPVENTQLQNEKLYLYYLQNGRDMYVDQELDINRLSDYDVDHIVPQSFLKDDSIDNKVLTRSDKARGKSDNVPSEEVVKKMKNYWRQLLNAKLITQRKFDNLTKAERGGLSELDKAGFIKRQLVETRQITKHVAQILDSRMNTKYDENDKLIREVKVITLKSKLVSDFRKDFQFYKVREINNYHHAHDAYLNAVVGTALIKKYPKLESEFVYGDYKVYDVRKMIAKSEQEIGKATAKYFFYSNIMNFFKTEITLANGEIRKRPLIETNGETGEIVWDKGRDFATVRKVLSMPQVNIVKKTEVQTGGFSKESILPKRNSDKLIARKKDWDPKKYGGFDSPTVAYSVLVVAKVEKGKSKKLKSVKELLGITIMERSSFEKNPIDFLEAKGYKEVKKDLIIKLPKYSLFELENGRKRMLASAGELQKGNELALPSKYVNFLYLASHYEKLKGSPEDNEQKQLFVEQHKHYLDEIIEQISEFSKRVILADANLDKVLSAYNKHRDKPIREQAENIIHLFTLTNLGAPAAFKYFDTTIDRKRYTSTKEVLDATLIHQSITGLYETRIDLSQLGGDGGGGSEAAAKPAPGGMNPLQLLQPLPAEVKGTKLLAHWNSGATITCIPESFLEDEQPIKQTLIKTIHGEKQQNVYYLTFKVKGRKVEAEVIASPYEYILLSPTDVPWLTQQPLQLTILVPLQEYQDRILNKTALPEEQKQQLKALFTKYDNLWQHWENQVGHRKIRPHNIATGDYPPRPQKQYPINPKAKPSIQIVIDDLLKQGVLTPQNSTMNTPVYPVPKPDGRWRMVLDYREVNKTIPLTAAQNQHSAGILATIVRQKYKTTLDLANGFWAHPITPDSYWLTAFTWQGKQYCWTRLPQGFLNSPALFTADAVDLLKEVPNVQVYVDDIYLSHDNPHEHIQQLEKVFQILLQAGYVVSLKKSEIGQRTVEFLGFNITKEGRGLTDTFKTKLLNVTPPKDLKQLQSILGLLNFARNFIPNFAELVQTLYNLIASSKGKYIEWTEDNTKQLNKVIEALNTASNLEERLPDQRLVIKVNTSPSAGYVRYYNESGKKPIMYLNYVFSKAELKFSMLEKLLTTMHKALIKAMDLAMGQEILVYSPIVSMTKIQKTPLPERKALPIRWITWMTYLEDPRIQFHYDKTLPELKHIPDVYTSSIPPLKHPSQYEGVFCTDGSAIKSPDPTKSNNAGMGIVHAIYNPEYKILNQWSIPLGHHTAQMAEIAAVEFACKKALKVPGPVLVITDSFYVAESANKELPYWKSNGFVNNKKEPLKHISKWKSIAECLSIKPDITIQHEKGHQPINTSIHTEGNALADKLATQGSYVVNAGKRTADGSEFEKRTADGSEFESPKKKAKVE

SEQ ID NO: 691 - protein, 2173 aa, synthetic construct
MPAAKRVKLDGGDKKYSIGLDIGTNSVGWAVITDEYKVPSKKFKVLGNTDRHSIKKNLIGALLFDSGETAEATRLKRTARRRYTRRKNRICYLQEIFSNEMAKVDDSFFHRLEESFLVEEDKKHERHPIFGNIVDEVAYHEKYPTIYHLRKKLVDSTDKADLRLIYLALAHMIKFRGHFLIEGDLNPDNSDVDKLFIQLVQTYNQLFEENPINASGVDAKAILSARLSKSRRLENLIAQLPGEKKNGLFGNLIALSLGLTPNFKSNFDLAEDAKLQLSKDTYDDDLDNLLAQIGDQYADLFLAAKNLSDAILLSDILRVNTEITKAPLSASMIKRYDEHHQDLTLLKALVRQQLPEKYKEIFFDQSKNGYAGYIDGGASQEEFYKFIKPILEKMDGTEELLVKLNREDLLRKQRTFDNGSIPHQIHLGELHAILRRQEDFYPFLKDNREKIEKILTFRIPYYVGPLARGNSRFAWMTRKSEETITPWNFEEVVDKGASAQSFIERMTNFDKNLPNEKVLPKHSLLYEYFTVYNELTKVKYVTEGMRKPAFLSGEQKKAIVDLLFKTNRKVTVKQLKEDYFKKIECFDSVEISGVEDRFNASLGTYHDLLKIIKDKDFLDNEENEDILEDIVLTLTLFEDREMIEERLKTYAHLFDDKVMKQLKRRRYTGWGRLSRKLINGIRDKQSGKTILDFLKSDGFANRNFMQLIHDDSLTFKEDIQKAQVSGQGDSLHEHIANLAGSPAIKKGILQTVKVVDELVKVMGRHKPENIVIEMARENQTTQKGQKNSRERMKRIEEGIKELGSQILKEHPVENTQLQNEKLYLYYLQNGRDMYVDQELDINRLSDYDVDHIVPQSFLKDDSIDNKVLTRSDKARGKSDNVPSEEVVKKMKNYWRQLLNAKLITQRKFDNLTKAERGGLSELDKAGFIKRQLVETRQITKHVAQILDSRMNTKYDENDKLIREVKVITLKSKLVSDFRKDFQFYKVREINNYHHAHDAYLNAVVGTALIKKYPKLESEFVYGDYKVYDVRKMIAKSEQEIGKATAKYFFYSNIMNFFKTEITLANGEIRKRPLIETNGETGEIVWDKGRDFATVRKVLSMPQVNIVKKTEVQTGGFSKESILPKRNSDKLIARKKDWDPKKYGGFDSPTVAYSVLVVAKVEKGKSKKLKSVKELLGITIMERSSFEKNPIDFLEAKGYKEVKKDLIIKLPKYSLFELENGRKRMLASAGELQKGNELALPSKYVNFLYLASHYEKLKGSPEDNEQKQLFVEQHKHYLDEIIEQISEFSKRVILADANLDKVLSAYNKHRDKPIREQAENIIHLFTLTNLGAPAAFKYFDTTIDRKRYTSTKEVLDATLIHQSITGLYETRIDLSQLGGDGGGSSEAAAKGGMNPLQLLQPLPAEVKGTKLLAHWNSGATITCIPESFLEDEQPIKQTLIKTIHGEKQQNVYYLTFKVKGRKVEAEVIASPYEYILLSPTDVPWLTQQPLQLTILVPLQEYQDRILNKTALPEEQKQQLKALFTKYDNLWQHWENQVGHRKIRPHNIATGDYPPRPQKQYPINPKAKPSIQIVIDDLLKQGVLTPQNSTMNTPVYPVPKPDGRWRMVLDYREVNKTIPLTAAQNQHSAGILATIVRQKYKTTLDLANGFWAHPITPDSYWLTAFTWQGKQYCWTRLPQGFLNSPALFTADAVDLLKEVPNVQVYVDDIYLSHDNPHEHIQQLEKVFQILLQAGYVVSLKKSEIGQRTVEFLGFNITKEGRGLTDTFKTKLLNVTPPKDLKQLQSILGLLNFARNFIPNFAELVQTLYNLIASSKGKYIEWTEDNTKQLNKVIEALNTASNLEERLPDQRLVIKVNTSPSAGYVRYYNESGKKPIMYLNYVFSKAELKFSMLEKLLTTMHKALIKAMDLAMGQEILVYSPIVSMTKIQKTPLPERKALPIRWITWMTYLEDPRIQFHYDKTLPELKHIPDVYTSSIPPLKHPSQYEGVFCTDGSAIKSPDPTKSNNAGMGIVHAIYNPEYKILNQWSIPLGHHTAQMAEIAAVEFACKKALKVPGPVLVITDSFYVAESANKELPYWKSNGFVNNKKEPLKHISKWKSIAECLSIKPDITIQHEKGHQPINTSIHTEGNALADKLATQGSYVVNAGKRTADGSEFEKRTADGSEFESPKKKAKVE

SEQ ID NO: 692 - protein, 2180 aa, synthetic construct
MPAAKRVKLDGGDKKYSIGLDIGTNSVGWAVITDEYKVPSKKFKVLGNTDRHSIKKNLIGALLFDSGETAEATRLKRTARRRYTRRKNRICYLQEIFSNEMAKVDDSFFHRLEESFLVEEDKKHERHPIFGNIVDEVAYHEKYPTIYHLRKKLVDSTDKADLRLIYLALAHMIKFRGHFLIEGDLNPDNSDVDKLFIQLVQTYNQLFEENPINASGVDAKAILSARLSKSRRLENLIAQLPGEKKNGLFGNLIALSLGLTPNFKSNFDLAEDAKLQLSKDTYDDDLDNLLAQIGDQYADLFLAAKNLSDAILLSDILRVNTEITKAPLSASMIKRYDEHHQDLTLLKALVRQQLPEKYKEIFFDQSKNGYAGYIDGGASQEEFYKFIKPILEKMDGTEELLVKLNREDLLRKQRTFDNGSIPHQIHLGELHAILRRQEDFYPFLKDNREKIEKILTFRIPYYVGPLARGNSRFAWMTRKSEETITPWNFEEVVDKGASAQSFIERMTNFDKNLPNEKVLPKHSLLYEYFTVYNELTKVKYVTEGMRKPAFLSGEQKKAIVDLLFKTNRKVTVKQLKEDYFKKIECFDSVEISGVEDRFNASLGTYHDLLKIIKDKDFLDNEENEDILEDIVLTLTLFEDREMIEERLKTYAHLFDDKVMKQLKRRRYTGWGRLSRKLINGIRDKQSGKTILDFLKSDGFANRNFMQLIHDDSLTFKEDIQKAQVSGQGDSLHEHIANLAGSPAIKKGILQTVKVVDELVKVMGRHKPENIVIEMARENQTTQKGQKNSRERMKRIEEGIKELGSQILKEHPVENTQLQNEKLYLYYLQNGRDMYVDQELDINRLSDYDVDHIVPQSFLKDDSIDNKVLTRSDKARGKSDNVPSEEVVKKMKNYWRQLLNAKLITQRKFDNLTKAERGGLSELDKAGFIKRQLVETRQITKHVAQILDSRMNTKYDENDKLIREVKVITLKSKLVSDFRKDFQFYKVREINNYHHAHDAYLNAVVGTALIKKYPKLESEFVYGDYKVYDVRKMIAKSEQEIGKATAKYFFYSNIMNFFKTEITLANGEIRKRPLIETNGETGEIVWDKGRDFATVRKVLSMPQVNIVKKTEVQTGGFSKESILPKRNSDKLIARKKDWDPKKYGGFDSPTVAYSVLVVAKVEKGKSKKLKSVKELLGITIMERSSFEKNPIDFLEAKGYKEVKKDLIIKLPKYSLFELENGRKRMLASAGELQKGNELALPSKYVNFLYLASHYEKLKGSPEDNEQKQLFVEQHKHYLDEIIEQISEFSKRVILADANLDKVLSAYNKHRDKPIREQAENIIHLFTLTNLGAPAAFKYFDTTIDRKRYTSTKEVLDATLIHQSITGLYETRIDLSQLGGDGGEAAAKGGGGSEAAAKGGMNPLQLLQPLPAEVKGTKLLAHWNSGATITCIPESFLEDEQPIKQTLIKTIHGEKQQNVYYLTFKVKGRKVEAEVIASPYEYILLSPTDVPWLTQQPLQLTILVPLQEYQDRILNKTALPEEQKQQLKALFTKYDNLWQHWENQVGHRKIRPHNIATGDYPPRPQKQYPINPKAKPSIQIVIDDLLKQGVLTPQNSTMNTPVYPVPKPDGRWRMVLDYREVNKTIPLTAAQNQHSAGILATIVRQKYKTTLDLANGFWAHPITPDSYWLTAFTWQGKQYCWTRLPQGFLNSPALFTADAVDLLKEVPNVQVYVDDIYLSHDNPHEHIQQLEKVFQILLQAGYVVSLKKSEIGQRTVEFLGFNITKEGRGLTDTFKTKLLNVTPPKDLKQLQSILGLLNFARNFIPNFAELVQTLYNLIASSKGKYIEWTEDNTKQLNKVIEALNTASNLEERLPDQRLVIKVNTSPSAGYVRYYNESGKKPIMYLNYVFSKAELKFSMLEKLLTTMHKALIKAMDLAMGQEILVYSPIVSMTKIQKTPLPERKALPIRWITWMTYLEDPRIQFHYDKTLPELKHIPDVYTSSIPPLKHPSQYEGVFCTDGSAIKSPDPTKSNNAGMGIVHAIYNPEYKILNQWSIPLGHHTAQMAEIAAVEFACKKALKVPGPVLVITDSFYVAESANKELPYWKSNGFVNNKKEPLKHISKWKSIAECLSIKPDITIQHEKGHQPINTSIHTEGNALADKLATQGSYVVNAGKRTADGSEFEKRTADGSEFESPKKKAKVE

SEQ ID NO: 693 - protein, 2170 aa, synthetic construct
MPAAKRVKLDGGDKKYSIGLDIGTNSVGWAVITDEYKVPSKKFKVLGNTDRHSIKKNLIGALLFDSGETAEATRLKRTARRRYTRRKNRICYLQEIFSNEMAKVDDSFFHRLEESFLVEEDKKHERHPIFGNIVDEVAYHEKYPTIYHLRKKLVDSTDKADLRLIYLALAHMIKFRGHFLIEGDLNPDNSDVDKLFIQLVQTYNQLFEENPINASGVDAKAILSARLSKSRRLENLIAQLPGEKKNGLFGNLIALSLGLTPNFKSNFDLAEDAKLQLSKDTYDDDLDNLLAQIGDQYADLFLAAKNLSDAILLSDILRVNTEITKAPLSASMIKRYDEHHQDLTLLKALVRQQLPEKYKEIFFDQSKNGYAGYIDGGASQEEFYKFIKPILEKMDGTEELLVKLNREDLLRKQRTFDNGSIPHQIHLGELHAILRRQEDFYPFLKDNREKIEKILTFRIPYYVGPLARGNSRFAWMTRKSEETITPWNFEEVVDKGASAQSFIERMTNFDKNLPNEKVLPKHSLLYEYFTVYNELTKVKYVTEGMRKPAFLSGEQKKAIVDLLFKTNRKVTVKQLKEDYFKKIECFDSVEISGVEDRFNASLGTYHDLLKIIKDKDFLDNEENEDILEDIVLTLTLFEDREMIEERLKTYAHLFDDKVMKQLKRRRYTGWGRLSRKLINGIRDKQSGKTILDFLKSDGFANRNFMQLIHDDSLTFKEDIQKAQVSGQGDSLHEHIANLAGSPAIKKGILQTVKVVDELVKVMGRHKPENIVIEMARENQTTQKGQKNSRERMKRIEEGIKELGSQILKEHPVENTQLQNEKLYLYYLQNGRDMYVDQELDINRLSDYDVDHIVPQSFLKDDSIDNKVLTRSDKARGKSDNVPSEEVVKKMKNYWRQLLNAKLITQRKFDNLTKAERGGLSELDKAGFIKRQLVETRQITKHVAQILDSRMNTKYDENDKLIREVKVITLKSKLVSDFRKDFQFYKVREINNYHHAHDAYLNAVVGTALIKKYPKLESEFVYGDYKVYDVRKMIAKSEQEIGKATAKYFFYSNIMNFFKTEITLANGEIRKRPLIETNGETGEIVWDKGRDFATVRKVLSMPQVNIVKKTEVQTGGFSKESILPKRNSDKLIARKKDWDPKKYGGFDSPTVAYSVLVVAKVEKGKSKKLKSVKELLGITIMERSSFEKNPIDFLEAKGYKEVKKDLIIKLPKYSLFELENGRKRMLASAGELQKGNELALPSKYVNFLYLASHYEKLKGSPEDNEQKQLFVEQHKHYLDEIIEQISEFSKRVILADANLDKVLSAYNKHRDKPIREQAENIIHLFTLTNLGAPAAFKYFDTTIDRKRYTSTKEVLDATLIHQSITGLYETRIDLSQLGGDGGPAPAPGGMNPLQLLQPLPAEVKGTKLLAHWNSGATITCIPESFLEDEQPIKQTLIKTIHGEKQQNVYYLTFKVKGRKVEAEVIASPYEYILLSPTDVPWLTQQPLQLTILVPLQEYQDRILNKTALPEEQKQQLKALFTKYDNLWQHWENQVGHRKIRPHNIATGDYPPRPQKQYPINPKAKPSIQIVIDDLLKQGVLTPQNSTMNTPVYPVPKPDGRWRMVLDYREVNKTIPLTAAQNQHSAGILATIVRQKYKTTLDLANGFWAHPITPDSYWLTAFTWQGKQYCWTRLPQGFLNSPALFTADAVDLLKEVPNVQVYVDDIYLSHDNPHEHIQQLEKVFQILLQAGYVVSLKKSEIGQRTVEFLGFNITKEGRGLTDTFKTKLLNVTPPKDLKQLQSILGLLNFARNFIPNFAELVQTLYNLIASSKGKYIEWTEDNTKQLNKVIEALNTASNLEERLPDQRLVIKVNTSPSAGYVRYYNESGKKPIMYLNYVFSKAELKFSMLEKLLTTMHKALIKAMDLAMGQEILVYSPIVSMTKIQKTPLPERKALPIRWITWMTYLEDPRIQFHYDKTLPELKHIPDVYTSSIPPLKHPSQYEGVFCTDGSAIKSPDPTKSNNAGMGIVHAIYNPEYKILNQWSIPLGHHTAQMAEIAAVEFACKKALKVPGPVLVITDSFYVAESANKELPYWKSNGFVNNKKEPLKHISKWKSIAECLSIKPDITIQHEKGHQPINTSIHTEGNALADKLATQGSYVVNAGKRTADGSEFEKRTADGSEFESPKKKAKVE

SEQ ID NO: 694 - protein, 2185 aa, synthetic construct
MPAAKRVKLDGGDKKYSIGLDIGTNSVGWAVITDEYKVPSKKFKVLGNTDRHSIKKNLIGALLFDSGETAEATRLKRTARRRYTRRKNRICYLQEIFSNEMAKVDDSFFHRLEESFLVEEDKKHERHPIFGNIVDEVAYHEKYPTIYHLRKKLVDSTDKADLRLIYLALAHMIKFRGHFLIEGDLNPDNSDVDKLFIQLVQTYNQLFEENPINASGVDAKAILSARLSKSRRLENLIAQLPGEKKNGLFGNLIALSLGLTPNFKSNFDLAEDAKLQLSKDTYDDDLDNLLAQIGDQYADLFLAAKNLSDAILLSDILRVNTEITKAPLSASMIKRYDEHHQDLTLLKALVRQQLPEKYKEIFFDQSKNGYAGYIDGGASQEEFYKFIKPILEKMDGTEELLVKLNREDLLRKQRTFDNGSIPHQIHLGELHAILRRQEDFYPFLKDNREKIEKILTFRIPYYVGPLARGNSRFAWMTRKSEETITPWNFEEVVDKGASAQSFIERMTNFDKNLPNEKVLPKHSLLYEYFTVYNELTKVKYVTEGMRKPAFLSGEQKKAIVDLLFKTNRKVTVKQLKEDYFKKIECFDSVEISGVEDRFNASLGTYHDLLKIIKDKDFLDNEENEDILEDIVLTLTLFEDREMIEERLKTYAHLFDDKVMKQLKRRRYTGWGRLSRKLINGIRDKQSGKTILDFLKSDGFANRNFMQLIHDDSLTFKEDIQKAQVSGQGDSLHEHIANLAGSPAIKKGILQTVKVVDELVKVMGRHKPENIVIEMARENQTTQKGQKNSRERMKRIEEGIKELGSQILKEHPVENTQLQNEKLYLYYLQNGRDMYVDQELDINRLSDYDVDHIVPQSFLKDDSIDNKVLTRSDKARGKSDNVPSEEVVKKMKNYWRQLLNAKLITQRKFDNLTKAERGGLSELDKAGFIKRQLVETRQITKHVAQILDSRMNTKYDENDKLIREVKVITLKSKLVSDFRKDFQFYKVREINNYHHAHDAYLNAVVGTALIKKYPKLESEFVYGDYKVYDVRKMIAKSEQEIGKATAKYFFYSNIMNFFKTEITLANGEIRKRPLIETNGETGEIVWDKGRDFATVRKVLSMPQVNIVKKTEVQTGGFSKESILPKRNSDKLIARKKDWDPKKYGGFDSPTVAYSVLVVAKVEKGKSKKLKSVKELLGITIMERSSFEKNPIDFLEAKGYKEVKKDLIIKLPKYSLFELENGRKRMLASAGELQKGNELALPSKYVNFLYLASHYEKLKGSPEDNEQKQLFVEQHKHYLDEIIEQISEFSKRVILADANLDKVLSAYNKHRDKPIREQAENIIHLFTLTNLGAPAAFKYFDTTIDRKRYTSTKEVLDATLIHQSITGLYETRIDLSQLGGDGGEAAAKEAAAKEAAAKEAAAKGGMNPLQLLQPLPAEVKGTKLLAHWNSGATITCIPESFLEDEQPIKQTLIKTIHGEKQQNVYYLTFKVKGRKVEAEVIASPYEYILLSPTDVPWLTQQPLQLTILVPLQEYQDRILNKTALPEEQKQQLKALFTKYDNLWQHWENQVGHRKIRPHNIATGDYPPRPQKQYPINPKAKPSIQIVIDDLLKQGVLTPQNSTMNTPVYPVPKPDGRWRMVLDYREVNKTIPLTAAQNQHSAGILATIVRQKYKTTLDLANGFWAHPITPDSYWLTAFTWQGKQYCWTRLPQGFLNSPALFTADAVDLLKEVPNVQVYVDDIYLSHDNPHEHIQQLEKVFQILLQAGYVVSLKKSEIGQRTVEFLGFNITKEGRGLTDTFKTKLLNVTPPKDLKQLQSILGLLNFARNFIPNFAELVQTLYNLIASSKGKYIEWTEDNTKQLNKVIEALNTASNLEERLPDQRLVIKVNTSPSAGYVRYYNESGKKPIMYLNYVFSKAELKFSMLEKLLTTMHKALIKAMDLAMGQEILVYSPIVSMTKIQKTPLPERKALPIRWITWMTYLEDPRIQFHYDKTLPELKHIPDVYTSSIPPLKHPSQYEGVFCTDGSAIKSPDPTKSNNAGMGIVHAIYNPEYKILNQWSIPLGHHTAQMAEIAAVEFACKKALKVPGPVLVITDSFYVAESANKELPYWKSNGFVNNKKEPLKHISKWKSIAECLSIKPDITIQHEKGHQPINTSIHTEGNALADKLATQGSYVVNAGKRTADGSEFEKRTADGSEFESPKKKAKVE

SEQ ID NO: 695 - protein, 2081 aa, synthetic construct
MPAAKRVKLDGGDKKYSIGLDIGTNSVGWAVITDEYKVPSKKFKVLGNTDRHSIKKNLIGALLFDSGETAEATRLKRTARRRYTRRKNRICYLQEIFSNEMAKVDDSFFHRLEESFLVEEDKKHERHPIFGNIVDEVAYHEKYPTIYHLRKKLVDSTDKADLRLIYLALAHMIKFRGHFLIEGDLNPDNSDVDKLFIQLVQTYNQLFEENPINASGVDAKAILSARLSKSRRLENLIAQLPGEKKNGLFGNLIALSLGLTPNFKSNFDLAEDAKLQLSKDTYDDDLDNLLAQIGDQYADLFLAAKNLSDAILLSDILRVNTEITKAPLSASMIKRYDEHHQDLTLLKALVRQQLPEKYKEIFFDQSKNGYAGYIDGGASQEEFYKFIKPILEKMDGTEELLVKLNREDLLRKQRTFDNGSIPHQIHLGELHAILRRQEDFYPFLKDNREKIEKILTFRIPYYVGPLARGNSRFAWMTRKSEETITPWNFEEVVDKGASAQSFIERMTNFDKNLPNEKVLPKHSLLYEYFTVYNELTKVKYVTEGMRKPAFLSGEQKKAIVDLLFKTNRKVTVKQLKEDYFKKIECFDSVEISGVEDRFNASLGTYHDLLKIIKDKDFLDNEENEDILEDIVLTLTLFEDREMIEERLKTYAHLFDDKVMKQLKRRRYTGWGRLSRKLINGIRDKQSGKTILDFLKSDGFANRNFMQLIHDDSLTFKEDIQKAQVSGQGDSLHEHIANLAGSPAIKKGILQTVKVVDELVKVMGRHKPENIVIEMARENQTTQKGQKNSRERMKRIEEGIKELGSQILKEHPVENTQLQNEKLYLYYLQNGRDMYVDQELDINRLSDYDVDHIVPQSFLKDDSIDNKVLTRSDKARGKSDNVPSEEVVKKMKNYWRQLLNAKLITQRKFDNLTKAERGGLSELDKAGFIKRQLVETRQITKHVAQILDSRMNTKYDENDKLIREVKVITLKSKLVSDFRKDFQFYKVREINNYHHAHDAYLNAVVGTALIKKYPKLESEFVYGDYKVYDVRKMIAKSEQEIGKATAKYFFYSNIMNFFKTEITLANGEIRKRPLIETNGETGEIVWDKGRDFATVRKVLSMPQVNIVKKTEVQTGGFSKESILPKRNSDKLIARKKDWDPKKYGGFDSPTVAYSVLVVAKVEKGKSKKLKSVKELLGITIMERSSFEKNPIDFLEAKGYKEVKKDLIIKLPKYSLFELENGRKRMLASAGELQKGNELALPSKYVNFLYLASHYEKLKGSPEDNEQKQLFVEQHKHYLDEIIEQISEFSKRVILADANLDKVLSAYNKHRDKPIREQAENIIHLFTLTNLGAPAAFKYFDTTIDRKRYTSTKEVLDATLIHQSITGLYETRIDLSQLGGDGGPAPAPGGVPWLTQQPLQLTILVPLQEYQDRILNKTALPEEQKQQLKALFTKYDNLWQHWENQVGHRKIRPHNIATGDYPPRPQKQYPINPKAKPSIQIVIDDLLKQGVLTPQNSTMNTPVYPVPKPDGRWRMVLDYREVNKTIPLTAAQNQHSAGILATIVRQKYKTTLDLANGFWAHPITPDSYWLTAFTWQGKQYCWTRLPQGFLNSPALFTADAVDLLKEVPNVQVYVDDIYLSHDNPHEHIQQLEKVFQILLQAGYVVSLKKSEIGQRTVEFLGFNITKEGRGLTDTFKTKLLNVTPPKDLKQLQSILGLLNFARNFIPNFAELVQTLYNLIASSKGKYIEWTEDNTKQLNKVIEALNTASNLEERLPDQRLVIKVNTSPSAGYVRYYNESGKKPIMYLNYVFSKAELKFSMLEKLLTTMHKALIKAMDLAMGQEILVYSPIVSMTKIQKTPLPERKALPIRWITWMTYLEDPRIQFHYDKTLPELKHIPDVYTSSIPPLKHPSQYEGVFCTDGSAIKSPDPTKSNNAGMGIVHAIYNPEYKILNQWSIPLGHHTAQMAEIAAVEFACKKALKVPGPVLVITDSFYVAESANKELPYWKSNGFVNNKKEPLKHISKWKSIAECLSIKPDITIQHEKGHQPINTSIHTEGNALADKLATQGSYVVNAGKRTADGSEFEKRTADGSEFESPKKKAKVE

SEQ ID NO: 696 - protein, 2087 aa, synthetic construct
MPAAKRVKLDGGDKKYSIGLDIGTNSVGWAVITDEYKVPSKKFKVLGNTDRHSIKKNLIGALLFDSGETAEATRLKRTARRRYTRRKNRICYLQEIFSNEMAKVDDSFFHRLEESFLVEEDKKHERHPIFGNIVDEVAYHEKYPTIYHLRKKLVDSTDKADLRLIYLALAHMIKFRGHFLIEGDLNPDNSDVDKLFIQLVQTYNQLFEENPINASGVDAKAILSARLSKSRRLENLIAQLPGEKKNGLFGNLIALSLGLTPNFKSNFDLAEDAKLQLSKDTYDDDLDNLLAQIGDQYADLFLAAKNLSDAILLSDILRVNTEITKAPLSASMIKRYDEHHQDLTLLKALVRQQLPEKYKEIFFDQSKNGYAGYIDGGASQEEFYKFIKPILEKMDGTEELLVKLNREDLLRKQRTFDNGSIPHQIHLGELHAILRRQEDFYPFLKDNREKIEKILTFRIPYYVGPLARGNSRFAWMTRKSEETITPWNFEEVVDKGASAQSFIERMTNFDKNLPNEKVLPKHSLLYEYFTVYNELTKVKYVTEGMRKPAFLSGEQKKAIVDLLFKTNRKVTVKQLKEDYFKKIECFDSVEISGVEDRFNASLGTYHDLLKIIKDKDFLDNEENEDILEDIVLTLTLFEDREMIEERLKTYAHLFDDKVMKQLKRRRYTGWGRLSRKLINGIRDKQSGKTILDFLKSDGFANRNFMQLIHDDSLTFKEDIQKAQVSGQGDSLHEHIANLAGSPAIKKGILQTVKVVDELVKVMGRHKPENIVIEMARENQTTQKGQKNSRERMKRIEEGIKELGSQILKEHPVENTQLQNEKLYLYYLQNGRDMYVDQELDINRLSDYDVDHIVPQSFLKDDSIDNKVLTRSDKARGKSDNVPSEEVVKKMKNYWRQLLNAKLITQRKFDNLTKAERGGLSELDKAGFIKRQLVETRQITKHVAQILDSRMNTKYDENDKLIREVKVITLKSKLVSDFRKDFQFYKVREINNYHHAHDAYLNAVVGTALIKKYPKLESEFVYGDYKVYDVRKMIAKSEQEIGKATAKYFFYSNIMNFFKTEITLANGEIRKRPLIETNGETGEIVWDKGRDFATVRKVLSMPQVNIVKKTEVQTGGFSKESILPKRNSDKLIARKKDWDPKKYGGFDSPTVAYSVLVVAKVEKGKSKKLKSVKELLGITIMERSSFEKNPIDFLEAKGYKEVKKDLIIKLPKYSLFELENGRKRMLASAGELQKGNELALPSKYVNFLYLASHYEKLKGSPEDNEQKQLFVEQHKHYLDEIIEQISEFSKRVILADANLDKVLSAYNKHRDKPIREQAENIIHLFTLTNLGAPAAFKYFDTTIDRKRYTSTKEVLDATLIHQSITGLYETRIDLSQLGGDGGPAPGGGEAAAKGGVPWLTQQPLQLTILVPLQEYQDRILNKTALPEEQKQQLKALFTKYDNLWQHWENQVGHRKIRPHNIATGDYPPRPQKQYPINPKAKPSIQIVIDDLLKQGVLTPQNSTMNTPVYPVPKPDGRWRMVLDYREVNKTIPLTAAQNQHSAGILATIVRQKYKTTLDLANGFWAHPITPDSYWLTAFTWQGKQYCWTRLPQGFLNSPALFTADAVDLLKEVPNVQVYVDDIYLSHDNPHEHIQQLEKVFQILLQAGYVVSLKKSEIGQRTVEFLGFNITKEGRGLTDTFKTKLLNVTPPKDLKQLQSILGLLNFARNFIPNFAELVQTLYNLIASSKGKYIEWTEDNTKQLNKVIEALNTASNLEERLPDQRLVIKVNTSPSAGYVRYYNESGKKPIMYLNYVFSKAELKFSMLEKLLTTMHKALIKAMDLAMGQEILVYSPIVSMTKIQKTPLPERKALPIRWITWMTYLEDPRIQFHYDKTLPELKHIPDVYTSSIPPLKHPSQYEGVFCTDGSAIKSPDPTKSNNAGMGIVHAIYNPEYKILNQWSIPLGHHTAQMAEIAAVEFACKKALKVPGPVLVITDSFYVAESANKELPYWKSNGFVNNKKEPLKHISKWKSIAECLSIKPDITIQHEKGHQPINTSIHTEGNALADKLATQGSYVVNAGKRTADGSEFEKRTADGSEFESPKKKAKVE

SEQ ID NO: 697 - protein, 2087 aa, synthetic construct
MPAAKRVKLDGGDKKYSIGLDIGTNSVGWAVITDEYKVPSKKFKVLGNTDRHSIKKNLIGALLFDSGETAEATRLKRTARRRYTRRKNRICYLQEIFSNEMAKVDDSFFHRLEESFLVEEDKKHERHPIFGNIVDEVAYHEKYPTIYHLRKKLVDSTDKADLRLIYLALAHMIKFRGHFLIEGDLNPDNSDVDKLFIQLVQTYNQLFEENPINASGVDAKAILSARLSKSRRLENLIAQLPGEKKNGLFGNLIALSLGLTPNFKSNFDLAEDAKLQLSKDTYDDDLDNLLAQIGDQYADLFLAAKNLSDAILLSDILRVNTEITKAPLSASMIKRYDEHHQDLTLLKALVRQQLPEKYKEIFFDQSKNGYAGYIDGGASQEEFYKFIKPILEKMDGTEELLVKLNREDLLRKQRTFDNGSIPHQIHLGELHAILRRQEDFYPFLKDNREKIEKILTFRIPYYVGPLARGNSRFAWMTRKSEETITPWNFEEVVDKGASAQSFIERMTNFDKNLPNEKVLPKHSLLYEYFTVYNELTKVKYVTEGMRKPAFLSGEQKKAIVDLLFKTNRKVTVKQLKEDYFKKIECFDSVEISGVEDRFNASLGTYHDLLKIIKDKDFLDNEENEDILEDIVLTLTLFEDREMIEERLKTYAHLFDDKVMKQLKRRRYTGWGRLSRKLINGIRDKQSGKTILDFLKSDGFANRNFMQLIHDDSLTFKEDIQKAQVSGQGDSLHEHIANLAGSPAIKKGILQTVKVVDELVKVMGRHKPENIVIEMARENQTTQKGQKNSRERMKRIEEGIKELGSQILKEHPVENTQLQNEKLYLYYLQNGRDMYVDQELDINRLSDYDVDHIVPQSFLKDDSIDNKVLTRSDKARGKSDNVPSEEVVKKMKNYWRQLLNAKLITQRKFDNLTKAERGGLSELDKAGFIKRQLVETRQITKHVAQILDSRMNTKYDENDKLIREVKVITLKSKLVSDFRKDFQFYKVREINNYHHAHDAYLNAVVGTALIKKYPKLESEFVYGDYKVYDVRKMIAKSEQEIGKATAKYFFYSNIMNFFKTEITLANGEIRKRPLIETNGETGEIVWDKGRDFATVRKVLSMPQVNIVKKTEVQTGGFSKESILPKRNSDKLIARKKDWDPKKYGGFDSPTVAYSVLVVAKVEKGKSKKLKSVKELLGITIMERSSFEKNPIDFLEAKGYKEVKKDLIIKLPKYSLFELENGRKRMLASAGELQKGNELALPSKYVNFLYLASHYEKLKGSPEDNEQKQLFVEQHKHYLDEIIEQISEFSKRVILADANLDKVLSAYNKHRDKPIREQAENIIHLFTLTNLGAPAAFKYFDTTIDRKRYTSTKEVLDATLIHQSITGLYETRIDLSQLGGDGGGGGEAAAKGGSGGVPWLTQQPLQLTILVPLQEYQDRILNKTALPEEQKQQLKALFTKYDNLWQHWENQVGHRKIRPHNIATGDYPPRPQKQYPINPKAKPSIQIVIDDLLKQGVLTPQNSTMNTPVYPVPKPDGRWRMVLDYREVNKTIPLTAAQNQHSAGILATIVRQKYKTTLDLANGFWAHPITPDSYWLTAFTWQGKQYCWTRLPQGFLNSPALFTADAVDLLKEVPNVQVYVDDIYLSHDNPHEHIQQLEKVFQILLQAGYVVSLKKSEIGQRTVEFLGFNITKEGRGLTDTFKTKLLNVTPPKDLKQLQSILGLLNFARNFIPNFAELVQTLYNLIASSKGKYIEWTEDNTKQLNKVIEALNTASNLEERLPDQRLVIKVNTSPSAGYVRYYNESGKKPIMYLNYVFSKAELKFSMLEKLLTTMHKALIKAMDLAMGQEILVYSPIVSMTKIQKTPLPERKALPIRWITWMTYLEDPRIQFHYDKTLPELKHIPDVYTSSIPPLKHPSQYEGVFCTDGSAIKSPDPTKSNNAGMGIVHAIYNPEYKILNQWSIPLGHHTAQMAEIAAVEFACKKALKVPGPVLVITDSFYVAESANKELPYWKSNGFVNNKKEPLKHISKWKSIAECLSIKPDITIQHEKGHQPINTSIHTEGNALADKLATQGSYVVNAGKRTADGSEFEKRTADGSEFESPKKKAKVE

SEQ ID NO: 698 - protein, 2087 aa, synthetic construct
MPAAKRVKLDGGDKKYSIGLDIGTNSVGWAVITDEYKVPSKKFKVLGNTDRHSIKKNLIGALLFDSGETAEATRLKRTARRRYTRRKNRICYLQEIFSNEMAKVDDSFFHRLEESFLVEEDKKHERHPIFGNIVDEVAYHEKYPTIYHLRKKLVDSTDKADLRLIYLALAHMIKFRGHFLIEGDLNPDNSDVDKLFIQLVQTYNQLFEENPINASGVDAKAILSARLSKSRRLENLIAQLPGEKKNGLFGNLIALSLGLTPNFKSNFDLAEDAKLQLSKDTYDDDLDNLLAQIGDQYADLFLAAKNLSDAILLSDILRVNTEITKAPLSASMIKRYDEHHQDLTLLKALVRQQLPEKYKEIFFDQSKNGYAGYIDGGASQEEFYKFIKPILEKMDGTEELLVKLNREDLLRKQRTFDNGSIPHQIHLGELHAILRRQEDFYPFLKDNREKIEKILTFRIPYYVGPLARGNSRFAWMTRKSEETITPWNFEEVVDKGASAQSFIERMTNFDKNLPNEKVLPKHSLLYEYFTVYNELTKVKYVTEGMRKPAFLSGEQKKAIVDLLFKTNRKVTVKQLKEDYFKKIECFDSVEISGVEDRFNASLGTYHDLLKIIKDKDFLDNEENEDILEDIVLTLTLFEDREMIEERLKTYAHLFDDKVMKQLKRRRYTGWGRLSRKLINGIRDKQSGKTILDFLKSDGFANRNFMQLIHDDSLTFKEDIQKAQVSGQGDSLHEHIANLAGSPAIKKGILQTVKVVDELVKVMGRHKPENIVIEMARENQTTQKGQKNSRERMKRIEEGIKELGSQILKEHPVENTQLQNEKLYLYYLQNGRDMYVDQELDINRLSDYDVDHIVPQSFLKDDSIDNKVLTRSDKARGKSDNVPSEEVVKKMKNYWRQLLNAKLITQRKFDNLTKAERGGLSELDKAGFIKRQLVETRQITKHVAQILDSRMNTKYDENDKLIREVKVITLKSKLVSDFRKDFQFYKVREINNYHHAHDAYLNAVVGTALIKKYPKLESEFVYGDYKVYDVRKMIAKSEQEIGKATAKYFFYSNIMNFFKTEITLANGEIRKRPLIETNGETGEIVWDKGRDFATVRKVLSMPQVNIVKKTEVQTGGFSKESILPKRNSDKLIARKKDWDPKKYGGFDSPTVAYSVLVVAKVEKGKSKKLKSVKELLGITIMERSSFEKNPIDFLEAKGYKEVKKDLIIKLPKYSLFELENGRKRMLASAGELQKGNELALPSKYVNFLYLASHYEKLKGSPEDNEQKQLFVEQHKHYLDEIIEQISEFSKRVILADANLDKVLSAYNKHRDKPIREQAENIIHLFTLTNLGAPAAFKYFDTTIDRKRYTSTKEVLDATLIHQSITGLYETRIDLSQLGGDGGGGGEAAAKGSSGGVPWLTQQPLQLTILVPLQEYQDRILNKTALPEEQKQQLKALFTKYDNLWQHWENQVGHRKIRPHNIATGDYPPRPQKQYPINPKAKPSIQIVIDDLLKQGVLTPQNSTMNTPVYPVPKPDGRWRMVLDYREVNKTIPLTAAQNQHSAGILATIVRQKYKTTLDLANGFWAHPITPDSYWLTAFTWQGKQYCWTRLPQGFLNSPALFTADAVDLLKEVPNVQVYVDDIYLSHDNPHEHIQQLEKVFQILLQAGYVVSLKKSEIGQRTVEFLGFNITKEGRGLTDTFKTKLLNVTPPKDLKQLQSILGLLNFARNFIPNFAELVQTLYNLIASSKGKYIEWTEDNTKQLNKVIEALNTASNLEERLPDQRLVIKVNTSPSAGYVRYYNESGKKPIMYLNYVFSKAELKFSMLEKLLTTMHKALIKAMDLAMGQEILVYSPIVSMTKIQKTPLPERKALPIRWITWMTYLEDPRIQFHYDKTLPELKHIPDVYTSSIPPLKHPSQYEGVFCTDGSAIKSPDPTKSNNAGMGIVHAIYNPEYKILNQWSIPLGHHTAQMAEIAAVEFACKKALKVPGPVLVITDSFYVAESANKELPYWKSNGFVNNKKEPLKHISKWKSIAECLSIKPDITIQHEKGHQPINTSIHTEGNALADKLATQGSYVVNAGKRTADGSEFEKRTADGSEFESPKKKAKVE

SEQ ID NO: 699 - protein, 2087 aa, synthetic construct
MPAAKRVKLDGGDKKYSIGLDIGTNSVGWAVITDEYKVPSKKFKVLGNTDRHSIKKNLIGALLFDSGETAEATRLKRTARRRYTRRKNRICYLQEIFSNEMAKVDDSFFHRLEESFLVEEDKKHERHPIFGNIVDEVAYHEKYPTIYHLRKKLVDSTDKADLRLIYLALAHMIKFRGHFLIEGDLNPDNSDVDKLFIQLVQTYNQLFEENPINASGVDAKAILSARLSKSRRLENLIAQLPGEKKNGLFGNLIALSLGLTPNFKSNFDLAEDAKLQLSKDTYDDDLDNLLAQIGDQYADLFLAAKNLSDAILLSDILRVNTEITKAPLSASMIKRYDEHHQDLTLLKALVRQQLPEKYKEIFFDQSKNGYAGYIDGGASQEEFYKFIKPILEKMDGTEELLVKLNREDLLRKQRTFDNGSIPHQIHLGELHAILRRQEDFYPFLKDNREKIEKILTFRIPYYVGPLARGNSRFAWMTRKSEETITPWNFEEVVDKGASAQSFIERMTNFDKNLPNEKVLPKHSLLYEYFTVYNELTKVKYVTEGMRKPAFLSGEQKKAIVDLLFKTNRKVTVKQLKEDYFKKIECFDSVEISGVEDRFNASLGTYHDLLKIIKDKDFLDNEENEDILEDIVLTLTLFEDREMIEERLKTYAHLFDDKVMKQLKRRRYTGWGRLSRKLINGIRDKQSGKTILDFLKSDGFANRNFMQLIHDDSLTFKEDIQKAQVSGQGDSLHEHIANLAGSPAIKKGILQTVKVVDELVKVMGRHKPENIVIEMARENQTTQKGQKNSRERMKRIEEGIKELGSQILKEHPVENTQLQNEKLYLYYLQNGRDMYVDQELDINRLSDYDVDHIVPQSFLKDDSIDNKVLTRSDKARGKSDNVPSEEVVKKMKNYWRQLLNAKLITQRKFDNLTKAERGGLSELDKAGFIKRQLVETRQITKHVAQILDSRMNTKYDENDKLIREVKVITLKSKLVSDFRKDFQFYKVREINNYHHAHDAYLNAVVGTALIKKYPKLESEFVYGDYKVYDVRKMIAKSEQEIGKATAKYFFYSNIMNFFKTEITLANGEIRKRPLIETNGETGEIVWDKGRDFATVRKVLSMPQVNIVKKTEVQTGGFSKESILPKRNSDKLIARKKDWDPKKYGGFDSPTVAYSVLVVAKVEKGKSKKLKSVKELLGITIMERSSFEKNPIDFLEAKGYKEVKKDLIIKLPKYSLFELENGRKRMLASAGELQKGNELALPSKYVNFLYLASHYEKLKGSPEDNEQKQLFVEQHKHYLDEIIEQISEFSKRVILADANLDKVLSAYNKHRDKPIREQAENIIHLFTLTNLGAPAAFKYFDTTIDRKRYTSTKEVLDATLIHQSITGLYETRIDLSQLGGDGGGSSGGGEAAAKGGVPWLTQQPLQLTILVPLQEYQDRILNKTALPEEQKQQLKALFTKYDNLWQHWENQVGHRKIRPHNIATGDYPPRPQKQYPINPKAKPSIQIVIDDLLKQGVLTPQNSTMNTPVYPVPKPDGRWRMVLDYREVNKTIPLTAAQNQHSAGILATIVRQKYKTTLDLANGFWAHPITPDSYWLTAFTWQGKQYCWTRLPQGFLNSPALFTADAVDLLKEVPNVQVYVDDIYLSHDNPHEHIQQLEKVFQILLQAGYVVSLKKSEIGQRTVEFLGFNITKEGRGLTDTFKTKLLNVTPPKDLKQLQSILGLLNFARNFIPNFAELVQTLYNLIASSKGKYIEWTEDNTKQLNKVIEALNTASNLEERLPDQRLVIKVNTSPSAGYVRYYNESGKKPIMYLNYVFSKAELKFSMLEKLLTTMHKALIKAMDLAMGQEILVYSPIVSMTKIQKTPLPERKALPIRWITWMTYLEDPRIQFHYDKTLPELKHIPDVYTSSIPPLKHPSQYEGVFCTDGSAIKSPDPTKSNNAGMGIVHAIYNPEYKILNQWSIPLGHHTAQMAEIAAVEFACKKALKVPGPVLVITDSFYVAESANKELPYWKSNGFVNNKKEPLKHISKWKSIAECLSIKPDITIQHEKGHQPINTSIHTEGNALADKLATQGSYVVNAGKRTADGSEFEKRTADGSEFESPKKKAKVE

SEQ ID NO: 700 - protein, 2094 aa, synthetic construct
MPAAKRVKLDGGDKKYSIGLDIGTNSVGWAVITDEYKVPSKKFKVLGNTDRHSIKKNLIGALLFDSGETAEATRLKRTARRRYTRRKNRICYLQEIFSNEMAKVDDSFFHRLEESFLVEEDKKHERHPIFGNIVDEVAYHEKYPTIYHLRKKLVDSTDKADLRLIYLALAHMIKFRGHFLIEGDLNPDNSDVDKLFIQLVQTYNQLFEENPINASGVDAKAILSARLSKSRRLENLIAQLPGEKKNGLFGNLIALSLGLTPNFKSNFDLAEDAKLQLSKDTYDDDLDNLLAQIGDQYADLFLAAKNLSDAILLSDILRVNTEITKAPLSASMIKRYDEHHQDLTLLKALVRQQLPEKYKEIFFDQSKNGYAGYIDGGASQEEFYKFIKPILEKMDGTEELLVKLNREDLLRKQRTFDNGSIPHQIHLGELHAILRRQEDFYPFLKDNREKIEKILTFRIPYYVGPLARGNSRFAWMTRKSEETITPWNFEEVVDKGASAQSFIERMTNFDKNLPNEKVLPKHSLLYEYFTVYNELTKVKYVTEGMRKPAFLSGEQKKAIVDLLFKTNRKVTVKQLKEDYFKKIECFDSVEISGVEDRFNASLGTYHDLLKIIKDKDFLDNEENEDILEDIVLTLTLFEDREMIEERLKTYAHLFDDKVMKQLKRRRYTGWGRLSRKLINGIRDKQSGKTILDFLKSDGFANRNFMQLIHDDSLTFKEDIQKAQVSGQGDSLHEHIANLAGSPAIKKGILQTVKVVDELVKVMGRHKPENIVIEMARENQTTQKGQKNSRERMKRIEEGIKELGSQILKEHPVENTQLQNEKLYLYYLQNGRDMYVDQELDINRLSDYDVDHIVPQSFLKDDSIDNKVLTRSDKARGKSDNVPSEEVVKKMKNYWRQLLNAKLITQRKFDNLTKAERGGLSELDKAGFIKRQLVETRQITKHVAQILDSRMNTKYDENDKLIREVKVITLKSKLVSDFRKDFQFYKVREINNYHHAHDAYLNAVVGTALIKKYPKLESEFVYGDYKVYDVRKMIAKSEQEIGKATAKYFFYSNIMNFFKTEITLANGEIRKRPLIETNGETGEIVWDKGRDFATVRKVLSMPQVNIVKKTEVQTGGFSKESILPKRNSDKLIARKKDWDPKKYGGFDSPTVAYSVLVVAKVEKGKSKKLKSVKELLGITIMERSSFEKNPIDFLEAKGYKEVKKDLIIKLPKYSLFELENGRKRMLASAGELQKGNELALPSKYVNFLYLASHYEKLKGSPEDNEQKQLFVEQHKHYLDEIIEQISEFSKRVILADANLDKVLSAYNKHRDKPIREQAENIIHLFTLTNLGAPAAFKYFDTTIDRKRYTSTKEVLDATLIHQSITGLYETRIDLSQLGGDGGGGSGGSGGSGGSGGSGGSGGVPWLTQQPLQLTILVPLQEYQDRILNKTALPEEQKQQLKALFTKYDNLWQHWENQVGHRKIRPHNIATGDYPPRPQKQYPINPKAKPSIQIVIDDLLKQGVLTPQNSTMNTPVYPVPKPDGRWRMVLDYREVNKTIPLTAAQNQHSAGILATIVRQKYKTTLDLANGFWAHPITPDSYWLTAFTWQGKQYCWTRLPQGFLNSPALFNADAVDLLKEVPNVQVYVDDIYLSHDNPHEHIQQLEKVFQILLQAGYVVSLKKSEIGQRTVEFLGFNITKEGRGLTDTFKTKLLNVTPPKDLKQLQSILGLLNFARNFIPNFAELVQTLYNLIASSPGKYIEWTEDNTKQLNKVIEALNTASNLEERLPDQRLVIKVNTSPSAGYVRYYNESGKKPIMYLNYVFSKAELKFSMLEKLLTTMHKALIKAMDLAMGQEILVYSPIVSMTKIQKTPLPERKALPIRWITWMTYLEDPRIQFHYDKTLPELKHIPDVYTSSIPPLKHPSQYEGVFCTDGSAIKSPDPTKSNNAGMGIVHAIYNPEYKILNQWSIPLGHHTAQMAEIAAVEFACKKALKVPGPVLVITDSFYVAESANKELPYWKSNGFVNNKKEPLKHISKWKSIAECLSIKPDITIQHEKGHQPINTSIHTEGNALADKLATQGSYVVNAGKRTADGSEFEKRTADGSEFESPKKKAKVE

SEQ ID NO: 701 - protein, 2091 aa, synthetic construct
MPAAKRVKLDGGDKKYSIGLDIGTNSVGWAVITDEYKVPSKKFKVLGNTDRHSIKKNLIGALLFDSGETAEATRLKRTARRRYTRRKNRICYLQEIFSNEMAKVDDSFFHRLEESFLVEEDKKHERHPIFGNIVDEVAYHEKYPTIYHLRKKLVDSTDKADLRLIYLALAHMIKFRGHFLIEGDLNPDNSDVDKLFIQLVQTYNQLFEENPINASGVDAKAILSARLSKSRRLENLIAQLPGEKKNGLFGNLIALSLGLTPNFKSNFDLAEDAKLQLSKDTYDDDLDNLLAQIGDQYADLFLAAKNLSDAILLSDILRVNTEITKAPLSASMIKRYDEHHQDLTLLKALVRQQLPEKYKEIFFDQSKNGYAGYIDGGASQEEFYKFIKPILEKMDGTEELLVKLNREDLLRKQRTFDNGSIPHQIHLGELHAILRRQEDFYPFLKDNREKIEKILTFRIPYYVGPLARGNSRFAWMTRKSEETITPWNFEEVVDKGASAQSFIERMTNFDKNLPNEKVLPKHSLLYEYFTVYNELTKVKYVTEGMRKPAFLSGEQKKAIVDLLFKTNRKVTVKQLKEDYFKKIECFDSVEISGVEDRFNASLGTYHDLLKIIKDKDFLDNEENEDILEDIVLTLTLFEDREMIEERLKTYAHLFDDKVMKQLKRRRYTGWGRLSRKLINGIRDKQSGKTILDFLKSDGFANRNFMQLIHDDSLTFKEDIQKAQVSGQGDSLHEHIANLAGSPAIKKGILQTVKVVDELVKVMGRHKPENIVIEMARENQTTQKGQKNSRERMKRIEEGIKELGSQILKEHPVENTQLQNEKLYLYYLQNGRDMYVDQELDINRLSDYDVDHIVPQSFLKDDSIDNKVLTRSDKARGKSDNVPSEEVVKKMKNYWRQLLNAKLITQRKFDNLTKAERGGLSELDKAGFIKRQLVETRQITKHVAQILDSRMNTKYDENDKLIREVKVITLKSKLVSDFRKDFQFYKVREINNYHHAHDAYLNAVVGTALIKKYPKLESEFVYGDYKVYDVRKMIAKSEQEIGKATAKYFFYSNIMNFFKTEITLANGEIRKRPLIETNGETGEIVWDKGRDFATVRKVLSMPQVNIVKKTEVQTGGFSKESILPKRNSDKLIARKKDWDPKKYGGFDSPTVAYSVLVVAKVEKGKSKKLKSVKELLGITIMERSSFEKNPIDFLEAKGYKEVKKDLIIKLPKYSLFELENGRKRMLASAGELQKGNELALPSKYVNFLYLASHYEKLKGSPEDNEQKQLFVEQHKHYLDEIIEQISEFSKRVILADANLDKVLSAYNKHRDKPIREQAENIIHLFTLTNLGAPAAFKYFDTTIDRKRYTSTKEVLDATLIHQSITGLYETRIDLSQLGGDGGEAAAKGGGGSEAAAKGGVPWLTQQPLQLTILVPLQEYQDRILNKTALPEEQKQQLKALFTKYDNLWQHWENQVGHRKIRPHNIATGDYPPRPQKQYPINPKAKPSIQIVIDDLLKQGVLTPQNSTMNTPVYPVPKPDGRWRMVLDYREVNKTIPLTAAQNQHSAGILATIVRQKYKTTLDLANGFWAHPITPDSYWLTAFTWQGKQYCWTRLPQGFLNSPALFNADAVDLLKEVPNVQVYVDDIYLSHDNPHEHIQQLEKVFQILLQAGYVVSLKKSEIGQRTVEFLGFNITKEGRGLTDTFKTKLLNVTPPKDLKQLQSILGLLNFARNFIPNFAELVQTLYNLIASSPGKYIEWTEDNTKQLNKVIEALNTASNLEERLPDQRLVIKVNTSPSAGYVRYYNESGKKPIMYLNYVFSKAELKFSMLEKLLTTMHKALIKAMDLAMGQEILVYSPIVSMTKIQKTPLPERKALPIRWITWMTYLEDPRIQFHYDKTLPELKHIPDVYTSSIPPLKHPSQYEGVFCTDGSAIKSPDPTKSNNAGMGIVHAIYNPEYKILNQWSIPLGHHTAQMAEIAAVEFACKKALKVPGPVLVITDSFYVAESANKELPYWKSNGFVNNKKEPLKHISKWKSIAECLSIKPDITIQHEKGHQPINTSIHTEGNALADKLATQGSYVVNAGKRTADGSEFEKRTADGSEFESPKKKAKVE

SEQ ID NO: 702 - protein, 2091 aa, synthetic construct
MPAAKRVKLDGGDKKYSIGLDIGTNSVGWAVITDEYKVPSKKFKVLGNTDRHSIKKNLIGALLFDSGETAEATRLKRTARRRYTRRKNRICYLQEIFSNEMAKVDDSFFHRLEESFLVEEDKKHERHPIFGNIVDEVAYHEKYPTIYHLRKKLVDSTDKADLRLIYLALAHMIKFRGHFLIEGDLNPDNSDVDKLFIQLVQTYNQLFEENPINASGVDAKAILSARLSKSRRLENLIAQLPGEKKNGLFGNLIALSLGLTPNFKSNFDLAEDAKLQLSKDTYDDDLDNLLAQIGDQYADLFLAAKNLSDAILLSDILRVNTEITKAPLSASMIKRYDEHHQDLTLLKALVRQQLPEKYKEIFFDQSKNGYAGYIDGGASQEEFYKFIKPILEKMDGTEELLVKLNREDLLRKQRTFDNGSIPHQIHLGELHAILRRQEDFYPFLKDNREKIEKILTFRIPYYVGPLARGNSRFAWMTRKSEETITPWNFEEVVDKGASAQSFIERMTNFDKNLPNEKVLPKHSLLYEYFTVYNELTKVKYVTEGMRKPAFLSGEQKKAIVDLLFKTNRKVTVKQLKEDYFKKIECFDSVEISGVEDRFNASLGTYHDLLKIIKDKDFLDNEENEDILEDIVLTLTLFEDREMIEERLKTYAHLFDDKVMKQLKRRRYTGWGRLSRKLINGIRDKQSGKTILDFLKSDGFANRNFMQLIHDDSLTFKEDIQKAQVSGQGDSLHEHIANLAGSPAIKKGILQTVKVVDELVKVMGRHKPENIVIEMARENQTTQKGQKNSRERMKRIEEGIKELGSQILKEHPVENTQLQNEKLYLYYLQNGRDMYVDQELDINRLSDYDVDHIVPQSFLKDDSIDNKVLTRSDKARGKSDNVPSEEVVKKMKNYWRQLLNAKLITQRKFDNLTKAERGGLSELDKAGFIKRQLVETRQITKHVAQILDSRMNTKYDENDKLIREVKVITLKSKLVSDFRKDFQFYKVREINNYHHAHDAYLNAVVGTALIKKYPKLESEFVYGDYKVYDVRKMIAKSEQEIGKATAKYFFYSNIMNFFKTEITLANGEIRKRPLIETNGETGEIVWDKGRDFATVRKVLSMPQVNIVKKTEVQTGGFSKESILPKRNSDKLIARKKDWDPKKYGGFDSPTVAYSVLVVAKVEKGKSKKLKSVKELLGITIMERSSFEKNPIDFLEAKGYKEVKKDLIIKLPKYSLFELENGRKRMLASAGELQKGNELALPSKYVNFLYLASHYEKLKGSPEDNEQKQLFVEQHKHYLDEIIEQISEFSKRVILADANLDKVLSAYNKHRDKPIREQAENIIHLFTLTNLGAPAAFKYFDTTIDRKRYTSTKEVLDATLIHQSITGLYETRIDLSQLGGDGGGGSGGSGGSGGSGGSGGVPWLTQQPLQLTILVPLQEYQDRILNKTALPEEQKQQLKALFTKYDNLWQHWENQVGHRKIRPHNIATGDYPPRPQKQYPINPKAKPSIQIVIDDLLKQGVLTPQNSTMNTPVYPVPKPDGRWRMVLDYREVNKTIPLTAAQNQHSAGILATIVRQKYKTTLDLANGFWAHPITPDSYWLTAFTWQGKQYCWTRLPQGFLNSPALFNADAVDLLKEVPNVQVYVDDIYLSHDNPHEHIQQLEKVFQILLQAGYVVSLKKSEIGQRTVEFLGFNITKEGRGLTDTFKTKLLNVTPPKDLKQLQSILGLLNFARNFIPNFAELVQTLYNLIASSPGKYIEWTEDNTKQLNKVIEALNTASNLEERLPDQRLVIKVNTSPSAGYVRYYNESGKKPIMYLNYVFSKAELKFSMLEKLLTTMHKALIKAMDLAMGQEILVYSPIVSMTKIQKTPLPERKALPIRWITWMTYLEDPRIQFHYDKTLPELKHIPDVYTSSIPPLKHPSQYEGVFCTDGSAIKSPDPTKSNNAGMGIVHAIYNPEYKILNQWSIPLGHHTAQMAEIAAVEFACKKALKVPGPVLVITDSFYVAESANKELPYWKSNGFVNNKKEPLKHISKWKSIAECLSIKPDITIQHEKGHQPINTSIHTEGNALADKLATQGSYVVNAGKRTADGSEFEKRTADGSEFESPKKKAKVE

SEQ ID NO: 703 - protein, 2082 aa, synthetic construct
MPAAKRVKLDGGDKKYSIGLDIGTNSVGWAVITDEYKVPSKKFKVLGNTDRHSIKKNLIGALLFDSGETAEATRLKRTARRRYTRRKNRICYLQEIFSNEMAKVDDSFFHRLEESFLVEEDKKHERHPIFGNIVDEVAYHEKYPTIYHLRKKLVDSTDKADLRLIYLALAHMIKFRGHFLIEGDLNPDNSDVDKLFIQLVQTYNQLFEENPINASGVDAKAILSARLSKSRRLENLIAQLPGEKKNGLFGNLIALSLGLTPNFKSNFDLAEDAKLQLSKDTYDDDLDNLLAQIGDQYADLFLAAKNLSDAILLSDILRVNTEITKAPLSASMIKRYDEHHQDLTLLKALVRQQLPEKYKEIFFDQSKNGYAGYIDGGASQEEFYKFIKPILEKMDGTEELLVKLNREDLLRKQRTFDNGSIPHQIHLGELHAILRRQEDFYPFLKDNREKIEKILTFRIPYYVGPLARGNSRFAWMTRKSEETITPWNFEEVVDKGASAQSFIERMTNFDKNLPNEKVLPKHSLLYEYFTVYNELTKVKYVTEGMRKPAFLSGEQKKAIVDLLFKTNRKVTVKQLKEDYFKKIECFDSVEISGVEDRFNASLGTYHDLLKIIKDKDFLDNEENEDILEDIVLTLTLFEDREMIEERLKTYAHLFDDKVMKQLKRRRYTGWGRLSRKLINGIRDKQSGKTILDFLKSDGFANRNFMQLIHDDSLTFKEDIQKAQVSGQGDSLHEHIANLAGSPAIKKGILQTVKVVDELVKVMGRHKPENIVIEMARENQTTQKGQKNSRERMKRIEEGIKELGSQILKEHPVENTQLQNEKLYLYYLQNGRDMYVDQELDINRLSDYDVDHIVPQSFLKDDSIDNKVLTRSDKARGKSDNVPSEEVVKKMKNYWRQLLNAKLITQRKFDNLTKAERGGLSELDKAGFIKRQLVETRQITKHVAQILDSRMNTKYDENDKLIREVKVITLKSKLVSDFRKDFQFYKVREINNYHHAHDAYLNAVVGTALIKKYPKLESEFVYGDYKVYDVRKMIAKSEQEIGKATAKYFFYSNIMNFFKTEITLANGEIRKRPLIETNGETGEIVWDKGRDFATVRKVLSMPQVNIVKKTEVQTGGFSKESILPKRNSDKLIARKKDWDPKKYGGFDSPTVAYSVLVVAKVEKGKSKKLKSVKELLGITIMERSSFEKNPIDFLEAKGYKEVKKDLIIKLPKYSLFELENGRKRMLASAGELQKGNELALPSKYVNFLYLASHYEKLKGSPEDNEQKQLFVEQHKHYLDEIIEQISEFSKRVILADANLDKVLSAYNKHRDKPIREQAENIIHLFTLTNLGAPAAFKYFDTTIDRKRYTSTKEVLDATLIHQSITGLYETRIDLSQLGGDGGGSSGGSGGVPWLTQQPLQLTILVPLQEYQDRILNKTALPEEQKQQLKALFTKYDNLWQHWENQVGHRKIRPHNIATGDYPPRPQKQYPINPKAKPSIQIVIDDLLKQGVLTPQNSTMNTPVYPVPKPDGRWRMVLDYREVNKTIPLTAAQNQHSAGILATIVRQKYKTTLDLANGFWAHPITPDSYWLTAFTWQGKQYCWTRLPQGFLNSPALFNADAVDLLKEVPNVQVYVDDIYLSHDNPHEHIQQLEKVFQILLQAGYVVSLKKSEIGQRTVEFLGFNITKEGRGLTDTFKTKLLNVTPPKDLKQLQSILGLLNFARNFIPNFAELVQTLYNLIASSPGKYIEWTEDNTKQLNKVIEALNTASNLEERLPDQRLVIKVNTSPSAGYVRYYNESGKKPIMYLNYVFSKAELKFSMLEKLLTTMHKALIKAMDLAMGQEILVYSPIVSMTKIQKTPLPERKALPIRWITWMTYLEDPRIQFHYDKTLPELKHIPDVYTSSIPPLKHPSQYEGVFCTDGSAIKSPDPTKSNNAGMGIVHAIYNPEYKILNQWSIPLGHHTAQMAEIAAVEFACKKALKVPGPVLVITDSFYVAESANKELPYWKSNGFVNNKKEPLKHISKWKSIAECLSIKPDITIQHEKGHQPINTSIHTEGNALADKLATQGSYVVNAGKRTADGSEFEKRTADGSEFESPKKKAKVE

SEQ ID NO: 704 - protein, 2092 aa, synthetic construct
MPAAKRVKLDGGDKKYSIGLDIGTNSVGWAVITDEYKVPSKKFKVLGNTDRHSIKKNLIGALLFDSGETAEATRLKRTARRRYTRRKNRICYLQEIFSNEMAKVDDSFFHRLEESFLVEEDKKHERHPIFGNIVDEVAYHEKYPTIYHLRKKLVDSTDKADLRLIYLALAHMIKFRGHFLIEGDLNPDNSDVDKLFIQLVQTYNQLFEENPINASGVDAKAILSARLSKSRRLENLIAQLPGEKKNGLFGNLIALSLGLTPNFKSNFDLAEDAKLQLSKDTYDDDLDNLLAQIGDQYADLFLAAKNLSDAILLSDILRVNTEITKAPLSASMIKRYDEHHQDLTLLKALVRQQLPEKYKEIFFDQSKNGYAGYIDGGASQEEFYKFIKPILEKMDGTEELLVKLNREDLLRKQRTFDNGSIPHQIHLGELHAILRRQEDFYPFLKDNREKIEKILTFRIPYYVGPLARGNSRFAWMTRKSEETITPWNFEEVVDKGASAQSFIERMTNFDKNLPNEKVLPKHSLLYEYFTVYNELTKVKYVTEGMRKPAFLSGEQKKAIVDLLFKTNRKVTVKQLKEDYFKKIECFDSVEISGVEDRFNASLGTYHDLLKIIKDKDFLDNEENEDILEDIVLTLTLFEDREMIEERLKTYAHLFDDKVMKQLKRRRYTGWGRLSRKLINGIRDKQSGKTILDFLKSDGFANRNFMQLIHDDSLTFKEDIQKAQVSGQGDSLHEHIANLAGSPAIKKGILQTVKVVDELVKVMGRHKPENIVIEMARENQTTQKGQKNSRERMKRIEEGIKELGSQILKEHPVENTQLQNEKLYLYYLQNGRDMYVDQELDINRLSDYDVDHIVPQSFLKDDSIDNKVLTRSDKARGKSDNVPSEEVVKKMKNYWRQLLNAKLITQRKFDNLTKAERGGLSELDKAGFIKRQLVETRQITKHVAQILDSRMNTKYDENDKLIREVKVITLKSKLVSDFRKDFQFYKVREINNYHHAHDAYLNAVVGTALIKKYPKLESEFVYGDYKVYDVRKMIAKSEQEIGKATAKYFFYSNIMNFFKTEITLANGEIRKRPLIETNGETGEIVWDKGRDFATVRKVLSMPQVNIVKKTEVQTGGFSKESILPKRNSDKLIARKKDWDPKKYGGFDSPTVAYSVLVVAKVEKGKSKKLKSVKELLGITIMERSSFEKNPIDFLEAKGYKEVKKDLIIKLPKYSLFELENGRKRMLASAGELQKGNELALPSKYVNFLYLASHYEKLKGSPEDNEQKQLFVEQHKHYLDEIIEQISEFSKRVILADANLDKVLSAYNKHRDKPIREQAENIIHLFTLTNLGAPAAFKYFDTTIDRKRYTSTKEVLDATLIHQSITGLYETRIDLSQLGGDGGSGSETPGTSESATPESGGVPWLTQQPLQLTILVPLQEYQDRILNKTALPEEQKQQLKALFTKYDNLWQHWENQVGHRKIRPHNIATGDYPPRPQKQYPINPKAKPSIQIVIDDLLKQGVLTPQNSTMNTPVYPVPKPDGRWRMVLDYREVNKTIPLTAAQNQHSAGILATIVRQKYKTTLDLANGFWAHPITPDSYWLTAFTWQGKQYCWTRLPQGFLNSPALFNADAVDLLKEVPNVQVYVDDIYLSHDNPHEHIQQLEKVFQILLQAGYVVSLKKSEIGQRTVEFLGFNITKEGRGLTDTFKTKLLNVTPPKDLKQLQSILGKLNFARNFIPNFAELVQTLYNLIASSPGKYIEWTEDNTKQLNKVIEALNTASNLEERLPDQRLVIKVNTSPSAGYVRYYNESGKKPIMYLNYVFSKAELKFSMLEKLLTTMHKALIKAMDLAMGQEILVYSPIVSMTKIQKTPLPERKALPIRWITWMTYLEDPRIQFHYDKTLPELKHIPDVYTSSIPPLKHPSQYEGVFCTDGSAIKSPDPTKSNNAGMGIVHAIYNPEYKILNQWSIPLGHHTAQMAEIAAVEFACKKALKVPGPVLVITDSFYVAESANKELPYWKSNGFVNNKKEPLKHISKWKSIAECLSIKPDITIQHEKGHQPINTSIHTEGNALADKLATQGSYVVNAGKRTADGSEFEKRTADGSEFESPKKKAKVE

SEQ ID NO: 705 - protein, 2087 aa, synthetic construct
MPAAKRVKLDGGDKKYSIGLDIGTNSVGWAVITDEYKVPSKKFKVLGNTDRHSIKKNLIGALLFDSGETAEATRLKRTARRRYTRRKNRICYLQEIFSNEMAKVDDSFFHRLEESFLVEEDKKHERHPIFGNIVDEVAYHEKYPTIYHLRKKLVDSTDKADLRLIYLALAHMIKFRGHFLIEGDLNPDNSDVDKLFIQLVQTYNQLFEENPINASGVDAKAILSARLSKSRRLENLIAQLPGEKKNGLFGNLIALSLGLTPNFKSNFDLAEDAKLQLSKDTYDDDLDNLLAQIGDQYADLFLAAKNLSDAILLSDILRVNTEITKAPLSASMIKRYDEHHQDLTLLKALVRQQLPEKYKEIFFDQSKNGYAGYIDGGASQEEFYKFIKPILEKMDGTEELLVKLNREDLLRKQRTFDNGSIPHQIHLGELHAILRRQEDFYPFLKDNREKIEKILTFRIPYYVGPLARGNSRFAWMTRKSEETITPWNFEEVVDKGASAQSFIERMTNFDKNLPNEKVLPKHSLLYEYFTVYNELTKVKYVTEGMRKPAFLSGEQKKAIVDLLFKTNRKVTVKQLKEDYFKKIECFDSVEISGVEDRFNASLGTYHDLLKIIKDKDFLDNEENEDILEDIVLTLTLFEDREMIEERLKTYAHLFDDKVMKQLKRRRYTGWGRLSRKLINGIRDKQSGKTILDFLKSDGFANRNFMQLIHDDSLTFKEDIQKAQVSGQGDSLHEHIANLAGSPAIKKGILQTVKVVDELVKVMGRHKPENIVIEMARENQTTQKGQKNSRERMKRIEEGIKELGSQILKEHPVENTQLQNEKLYLYYLQNGRDMYVDQELDINRLSDYDVDHIVPQSFLKDDSIDNKVLTRSDKARGKSDNVPSEEVVKKMKNYWRQLLNAKLITQRKFDNLTKAERGGLSELDKAGFIKRQLVETRQITKHVAQILDSRMNTKYDENDKLIREVKVITLKSKLVSDFRKDFQFYKVREINNYHHAHDAYLNAVVGTALIKKYPKLESEFVYGDYKVYDVRKMIAKSEQEIGKATAKYFFYSNIMNFFKTEITLANGEIRKRPLIETNGETGEIVWDKGRDFATVRKVLSMPQVNIVKKTEVQTGGFSKESILPKRNSDKLIARKKDWDPKKYGGFDSPTVAYSVLVVAKVEKGKSKKLKSVKELLGITIMERSSFEKNPIDFLEAKGYKEVKKDLIIKLPKYSLFELENGRKRMLASAGELQKGNELALPSKYVNFLYLASHYEKLKGSPEDNEQKQLFVEQHKHYLDEIIEQISEFSKRVILADANLDKVLSAYNKHRDKPIREQAENIIHLFTLTNLGAPAAFKYFDTTIDRKRYTSTKEVLDATLIHQSITGLYETRIDLSQLGGDGGPAPAPAPAPAPGGVPWLTQQPLQLTILVPLQEYQDRILNKTALPEEQKQQLKALFTKYDNLWQHWENQVGHRKIRPHNIATGDYPPRPQKQYPINPKAKPSIQIVIDDLLKQGVLTPQNSTMNTPVYPVPKPDGRWRMVLDYREVNKTIPLTAAQNQHSAGILATIVRQKYKTTLDLANGFWAHPITPDSYWLTAFTWQGKQYCWTRLPQGFLNSPALFNADAVDLLKEVPNVQVYVDDIYLSHDNPHEHIQQLEKVFQILLQAGYVVSLKKSEIGQRTVEFLGFNITKEGRGLTDTFKTKLLNVTPPKDLKQLQSILGKLNFARNFIPNFAELVQTLYNLIASSPGKYIEWTEDNTKQLNKVIEALNTASNLEERLPDQRLVIKVNTSPSAGYVRYYNESGKKPIMYLNYVFSKAELKFSMLEKLLTTMHKALIKAMDLAMGQEILVYSPIVSMTKIQKTPLPERKALPIRWITWMTYLEDPRIQFHYDKTLPELKHIPDVYTSSIPPLKHPSQYEGVFCTDGSAIKSPDPTKSNNAGMGIVHAIYNPEYKILNQWSIPLGHHTAQMAEIAAVEFACKKALKVPGPVLVITDSFYVAESANKELPYWKSNGFVNNKKEPLKHISKWKSIAECLSIKPDITIQHEKGHQPINTSIHTEGNALADKLATQGSYVVNAGKRTADGSEFEKRTADGSEFESPKKKAKVE

SEQ ID NO: 706 - protein, 2085 aa, synthetic construct
MPAAKRVKLDGGDKKYSIGLDIGTNSVGWAVITDEYKVPSKKFKVLGNTDRHSIKKNLIGALLFDSGETAEATRLKRTARRRYTRRKNRICYLQEIFSNEMAKVDDSFFHRLEESFLVEEDKKHERHPIFGNIVDEVAYHEKYPTIYHLRKKLVDSTDKADLRLIYLALAHMIKFRGHFLIEGDLNPDNSDVDKLFIQLVQTYNQLFEENPINASGVDAKAILSARLSKSRRLENLIAQLPGEKKNGLFGNLIALSLGLTPNFKSNFDLAEDAKLQLSKDTYDDDLDNLLAQIGDQYADLFLAAKNLSDAILLSDILRVNTEITKAPLSASMIKRYDEHHQDLTLLKALVRQQLPEKYKEIFFDQSKNGYAGYIDGGASQEEFYKFIKPILEKMDGTEELLVKLNREDLLRKQRTFDNGSIPHQIHLGELHAILRRQEDFYPFLKDNREKIEKILTFRIPYYVGPLARGNSRFAWMTRKSEETITPWNFEEVVDKGASAQSFIERMTNFDKNLPNEKVLPKHSLLYEYFTVYNELTKVKYVTEGMRKPAFLSGEQKKAIVDLLFKTNRKVTVKQLKEDYFKKIECFDSVEISGVEDRFNASLGTYHDLLKIIKDKDFLDNEENEDILEDIVLTLTLFEDREMIEERLKTYAHLFDDKVMKQLKRRRYTGWGRLSRKLINGIRDKQSGKTILDFLKSDGFANRNFMQLIHDDSLTFKEDIQKAQVSGQGDSLHEHIANLAGSPAIKKGILQTVKVVDELVKVMGRHKPENIVIEMARENQTTQKGQKNSRERMKRIEEGIKELGSQILKEHPVENTQLQNEKLYLYYLQNGRDMYVDQELDINRLSDYDVDHIVPQSFLKDDSIDNKVLTRSDKARGKSDNVPSEEVVKKMKNYWRQLLNAKLITQRKFDNLTKAERGGLSELDKAGFIKRQLVETRQITKHVAQILDSRMNTKYDENDKLIREVKVITLKSKLVSDFRKDFQFYKVREINNYHHAHDAYLNAVVGTALIKKYPKLESEFVYGDYKVYDVRKMIAKSEQEIGKATAKYFFYSNIMNFFKTEITLANGEIRKRPLIETNGETGEIVWDKGRDFATVRKVLSMPQVNIVKKTEVQTGGFSKESILPKRNSDKLIARKKDWDPKKYGGFDSPTVAYSVLVVAKVEKGKSKKLKSVKELLGITIMERSSFEKNPIDFLEAKGYKEVKKDLIIKLPKYSLFELENGRKRMLASAGELQKGNELALPSKYVNFLYLASHYEKLKGSPEDNEQKQLFVEQHKHYLDEIIEQISEFSKRVILADANLDKVLSAYNKHRDKPIREQAENIIHLFTLTNLGAPAAFKYFDTTIDRKRYTSTKEVLDATLIHQSITGLYETRIDLSQLGGDGGPAPGGGGSSGGVPWLTQQPLQLTILVPLQEYQDRILNKTALPEEQKQQLKALFTKYDNLWQHWENQVGHRKIRPHNIATGDYPPRPQKQYPINPKAKPSIQIVIDDLLKQGVLTPQNSTMNTPVYPVPKPDGRWRMVLDYREVNKTIPLTAAQNQHSAGILATIVRQKYKTTLDLANGFWAHPITPDSYWLTAFTWQGKQYCWTRLPQGFLNSPALFNADAVDLLKEVPNVQVYVDDIYLSHDNPHEHIQQLEKVFQILLQAGYVVSLKKSEIGQRTVEFLGFNITKEGRGLTDTFKTKLLNVTPPKDLKQLQSILGKLNFARNFIPNFAELVQTLYNLIASSPGKYIEWTEDNTKQLNKVIEALNTASNLEERLPDQRLVIKVNTSPSAGYVRYYNESGKKPIMYLNYVFSKAELKFSMLEKLLTTMHKALIKAMDLAMGQEILVYSPIVSMTKIQKTPLPERKALPIRWITWMTYLEDPRIQFHYDKTLPELKHIPDVYTSSIPPLKHPSQYEGVFCTDGSAIKSPDPTKSNNAGMGIVHAIYNPEYKILNQWSIPLGHHTAQMAEIAAVEFACKKALKVPGPVLVITDSFYVAESANKELPYWKSNGFVNNKKEPLKHISKWKSIAECLSIKPDITIQHEKGHQPINTSIHTEGNALADKLATQGSYVVNAGKRTADGSEFEKRTADGSEFESPKKKAKVE

SEQ ID NO: 707 - protein, 2168 aa, synthetic construct
MPAAKRVKLDGGDKKYSIGLDIGTNSVGWAVITDEYKVPSKKFKVLGNTDRHSIKKNLIGALLFDSGETAEATRLKRTARRRYTRRKNRICYLQEIFSNEMAKVDDSFFHRLEESFLVEEDKKHERHPIFGNIVDEVAYHEKYPTIYHLRKKLVDSTDKADLRLIYLALAHMIKFRGHFLIEGDLNPDNSDVDKLFIQLVQTYNQLFEENPINASGVDAKAILSARLSKSRRLENLIAQLPGEKKNGLFGNLIALSLGLTPNFKSNFDLAEDAKLQLSKDTYDDDLDNLLAQIGDQYADLFLAAKNLSDAILLSDILRVNTEITKAPLSASMIKRYDEHHQDLTLLKALVRQQLPEKYKEIFFDQSKNGYAGYIDGGASQEEFYKFIKPILEKMDGTEELLVKLNREDLLRKQRTFDNGSIPHQIHLGELHAILRRQEDFYPFLKDNREKIEKILTFRIPYYVGPLARGNSRFAWMTRKSEETITPWNFEEVVDKGASAQSFIERMTNFDKNLPNEKVLPKHSLLYEYFTVYNELTKVKYVTEGMRKPAFLSGEQKKAIVDLLFKTNRKVTVKQLKEDYFKKIECFDSVEISGVEDRFNASLGTYHDLLKIIKDKDFLDNEENEDILEDIVLTLTLFEDREMIEERLKTYAHLFDDKVMKQLKRRRYTGWGRLSRKLINGIRDKQSGKTILDFLKSDGFANRNFMQLIHDDSLTFKEDIQKAQVSGQGDSLHEHIANLAGSPAIKKGILQTVKVVDELVKVMGRHKPENIVIEMARENQTTQKGQKNSRERMKRIEEGIKELGSQILKEHPVENTQLQNEKLYLYYLQNGRDMYVDQELDINRLSDYDVDHIVPQSFLKDDSIDNKVLTRSDKARGKSDNVPSEEVVKKMKNYWRQLLNAKLITQRKFDNLTKAERGGLSELDKAGFIKRQLVETRQITKHVAQILDSRMNTKYDENDKLIREVKVITLKSKLVSDFRKDFQFYKVREINNYHHAHDAYLNAVVGTALIKKYPKLESEFVYGDYKVYDVRKMIAKSEQEIGKATAKYFFYSNIMNFFKTEITLANGEIRKRPLIETNGETGEIVWDKGRDFATVRKVLSMPQVNIVKKTEVQTGGFSKESILPKRNSDKLIARKKDWDPKKYGGFDSPTVAYSVLVVAKVEKGKSKKLKSVKELLGITIMERSSFEKNPIDFLEAKGYKEVKKDLIIKLPKYSLFELENGRKRMLASAGELQKGNELALPSKYVNFLYLASHYEKLKGSPEDNEQKQLFVEQHKHYLDEIIEQISEFSKRVILADANLDKVLSAYNKHRDKPIREQAENIIHLFTLTNLGAPAAFKYFDTTIDRKRYTSTKEVLDATLIHQSITGLYETRIDLSQLGGDGGGSSGGMNPLQLLQPLPAEVKGTKLLAHWNSGATITCIPESFLEDEQPIKQTLIKTIHGEKQQNVYYLTFKVKGRKVEAEVIASPYEYILLSPTDVPWLTQQPLQLTILVPLQEYQDRILNKTALPEEQKQQLKALFTKYDNLWQHWENQVGHRKIRPHNIATGDYPPRPQKQYPINPKAKPSIQIVIDDLLKQGVLTPQNSTMNTPVYPVPKPDGRWRMVLDYREVNKTIPLTAAQNQHSAGILATIVRQKYKTTLDLANGFWAHPITPDSYWLTAFTWQGKQYCWTRLPQGFLNSPALFNADAVDLLKEVPNVQVYVDDIYLSHDNPHEHIQQLEKVFQILLQAGYVVSLKKSEIGQRTVEFLGFNITKEGRGLTDTFKTKLLNVTPPKDLKQLQSILGLLNFARNFIPNFAELVQTLYNLIASSPGKYIEWTEDNTKQLNKVIEALNTASNLEERLPDQRLVIKVNTSPSAGYVRYYNESGKKPIMYLNYVFSKAELKFSMLEKLLTTMHKALIKAMDLAMGQEILVYSPIVSMTKIQKTPLPERKALPIRWITWMTYLEDPRIQFHYDKTLPELKHIPDVYTSSIPPLKHPSQYEGVFCTDGSAIKSPDPTKSNNAGMGIVHAIYNPEYKILNQWSIPLGHHTAQMAEIAAVEFACKKALKVPGPVLVITDSFYVAESANKELPYWKSNGFVNNKKEPLKHISKWKSIAECLSIKPDITIQHEKGHQPINTSIHTEGNALADKLATQGSYVVNAGKRTADGSEFEKRTADGSEFESPKKKAKVE

SEQ ID NO: 708 - protein, 2174 aa, synthetic construct
MPAAKRVKLDGGDKKYSIGLDIGTNSVGWAVITDEYKVPSKKFKVLGNTDRHSIKKNLIGALLFDSGETAEATRLKRTARRRYTRRKNRICYLQEIFSNEMAKVDDSFFHRLEESFLVEEDKKHERHPIFGNIVDEVAYHEKYPTIYHLRKKLVDSTDKADLRLIYLALAHMIKFRGHFLIEGDLNPDNSDVDKLFIQLVQTYNQLFEENPINASGVDAKAILSARLSKSRRLENLIAQLPGEKKNGLFGNLIALSLGLTPNFKSNFDLAEDAKLQLSKDTYDDDLDNLLAQIGDQYADLFLAAKNLSDAILLSDILRVNTEITKAPLSASMIKRYDEHHQDLTLLKALVRQQLPEKYKEIFFDQSKNGYAGYIDGGASQEEFYKFIKPILEKMDGTEELLVKLNREDLLRKQRTFDNGSIPHQIHLGELHAILRRQEDFYPFLKDNREKIEKILTFRIPYYVGPLARGNSRFAWMTRKSEETITPWNFEEVVDKGASAQSFIERMTNFDKNLPNEKVLPKHSLLYEYFTVYNELTKVKYVTEGMRKPAFLSGEQKKAIVDLLFKTNRKVTVKQLKEDYFKKIECFDSVEISGVEDRFNASLGTYHDLLKIIKDKDFLDNEENEDILEDIVLTLTLFEDREMIEERLKTYAHLFDDKVMKQLKRRRYTGWGRLSRKLINGIRDKQSGKTILDFLKSDGFANRNFMQLIHDDSLTFKEDIQKAQVSGQGDSLHEHIANLAGSPAIKKGILQTVKVVDELVKVMGRHKPENIVIEMARENQTTQKGQKNSRERMKRIEEGIKELGSQILKEHPVENTQLQNEKLYLYYLQNGRDMYVDQELDINRLSDYDVDHIVPQSFLKDDSIDNKVLTRSDKARGKSDNVPSEEVVKKMKNYWRQLLNAKLITQRKFDNLTKAERGGLSELDKAGFIKRQLVETRQITKHVAQILDSRMNTKYDENDKLIREVKVITLKSKLVSDFRKDFQFYKVREINNYHHAHDAYLNAVVGTALIKKYPKLESEFVYGDYKVYDVRKMIAKSEQEIGKATAKYFFYSNIMNFFKTEITLANGEIRKRPLIETNGETGEIVWDKGRDFATVRKVLSMPQVNIVKKTEVQTGGFSKESILPKRNSDKLIARKKDWDPKKYGGFDSPTVAYSVLVVAKVEKGKSKKLKSVKELLGITIMERSSFEKNPIDFLEAKGYKEVKKDLIIKLPKYSLFELENGRKRMLASAGELQKGNELALPSKYVNFLYLASHYEKLKGSPEDNEQKQLFVEQHKHYLDEIIEQISEFSKRVILADANLDKVLSAYNKHRDKPIREQAENIIHLFTLTNLGAPAAFKYFDTTIDRKRYTSTKEVLDATLIHQSITGLYETRIDLSQLGGDGGGGGPAPGSSGGMNPLQLLQPLPAEVKGTKLLAHWNSGATITCIPESFLEDEQPIKQTLIKTIHGEKQQNVYYLTFKVKGRKVEAEVIASPYEYILLSPTDVPWLTQQPLQLTILVPLQEYQDRILNKTALPEEQKQQLKALFTKYDNLWQHWENQVGHRKIRPHNIATGDYPPRPQKQYPINPKAKPSIQIVIDDLLKQGVLTPQNSTMNTPVYPVPKPDGRWRMVLDYREVNKTIPLTAAQNQHSAGILATIVRQKYKTTLDLANGFWAHPITPDSYWLTAFTWQGKQYCWTRLPQGFLNSPALFNADAVDLLKEVPNVQVYVDDIYLSHDNPHEHIQQLEKVFQILLQAGYVVSLKKSEIGQRTVEFLGFNITKEGRGLTDTFKTKLLNVTPPKDLKQLQSILGLLNFARNFIPNFAELVQTLYNLIASSPGKYIEWTEDNTKQLNKVIEALNTASNLEERLPDQRLVIKVNTSPSAGYVRYYNESGKKPIMYLNYVFSKAELKFSMLEKLLTTMHKALIKAMDLAMGQEILVYSPIVSMTKIQKTPLPERKALPIRWITWMTYLEDPRIQFHYDKTLPELKHIPDVYTSSIPPLKHPSQYEGVFCTDGSAIKSPDPTKSNNAGMGIVHAIYNPEYKILNQWSIPLGHHTAQMAEIAAVEFACKKALKVPGPVLVITDSFYVAESANKELPYWKSNGFVNNKKEPLKHISKWKSIAECLSIKPDITIQHEKGHQPINTSIHTEGNALADKLATQGSYVVNAGKRTADGSEFEKRTADGSEFESPKKKAKVE

SEQ ID NO: 709 - protein, 2176 aa, synthetic construct
MPAAKRVKLDGGDKKYSIGLDIGTNSVGWAVITDEYKVPSKKFKVLGNTDRHSIKKNLIGALLFDSGETAEATRLKRTARRRYTRRKNRICYLQEIFSNEMAKVDDSFFHRLEESFLVEEDKKHERHPIFGNIVDEVAYHEKYPTIYHLRKKLVDSTDKADLRLIYLALAHMIKFRGHFLIEGDLNPDNSDVDKLFIQLVQTYNQLFEENPINASGVDAKAILSARLSKSRRLENLIAQLPGEKKNGLFGNLIALSLGLTPNFKSNFDLAEDAKLQLSKDTYDDDLDNLLAQIGDQYADLFLAAKNLSDAILLSDILRVNTEITKAPLSASMIKRYDEHHQDLTLLKALVRQQLPEKYKEIFFDQSKNGYAGYIDGGASQEEFYKFIKPILEKMDGTEELLVKLNREDLLRKQRTFDNGSIPHQIHLGELHAILRRQEDFYPFLKDNREKIEKILTFRIPYYVGPLARGNSRFAWMTRKSEETITPWNFEEVVDKGASAQSFIERMTNFDKNLPNEKVLPKHSLLYEYFTVYNELTKVKYVTEGMRKPAFLSGEQKKAIVDLLFKTNRKVTVKQLKEDYFKKIECFDSVEISGVEDRFNASLGTYHDLLKIIKDKDFLDNEENEDILEDIVLTLTLFEDREMIEERLKTYAHLFDDKVMKQLKRRRYTGWGRLSRKLINGIRDKQSGKTILDFLKSDGFANRNFMQLIHDDSLTFKEDIQKAQVSGQGDSLHEHIANLAGSPAIKKGILQTVKVVDELVKVMGRHKPENIVIEMARENQTTQKGQKNSRERMKRIEEGIKELGSQILKEHPVENTQLQNEKLYLYYLQNGRDMYVDQELDINRLSDYDVDHIVPQSFLKDDSIDNKVLTRSDKARGKSDNVPSEEVVKKMKNYWRQLLNAKLITQRKFDNLTKAERGGLSELDKAGFIKRQLVETRQITKHVAQILDSRMNTKYDENDKLIREVKVITLKSKLVSDFRKDFQFYKVREINNYHHAHDAYLNAVVGTALIKKYPKLESEFVYGDYKVYDVRKMIAKSEQEIGKATAKYFFYSNIMNFFKTEITLANGEIRKRPLIETNGETGEIVWDKGRDFATVRKVLSMPQVNIVKKTEVQTGGFSKESILPKRNSDKLIARKKDWDPKKYGGFDSPTVAYSVLVVAKVEKGKSKKLKSVKELLGITIMERSSFEKNPIDFLEAKGYKEVKKDLIIKLPKYSLFELENGRKRMLASAGELQKGNELALPSKYVNFLYLASHYEKLKGSPEDNEQKQLFVEQHKHYLDEIIEQISEFSKRVILADANLDKVLSAYNKHRDKPIREQAENIIHLFTLTNLGAPAAFKYFDTTIDRKRYTSTKEVLDATLIHQSITGLYETRIDLSQLGGDGGPAPEAAAKGSSGGMNPLQLLQPLPAEVKGTKLLAHWNSGATITCIPESFLEDEQPIKQTLIKTIHGEKQQNVYYLTFKVKGRKVEAEVIASPYEYILLSPTDVPWLTQQPLQLTILVPLQEYQDRILNKTALPEEQKQQLKALFTKYDNLWQHWENQVGHRKIRPHNIATGDYPPRPQKQYPINPKAKPSIQIVIDDLLKQGVLTPQNSTMNTPVYPVPKPDGRWRMVLDYREVNKTIPLTAAQNQHSAGILATIVRQKYKTTLDLANGFWAHPITPDSYWLTAFTWQGKQYCWTRLPQGFLNSPALFNADAVDLLKEVPNVQVYVDDIYLSHDNPHEHIQQLEKVFQILLQAGYVVSLKKSEIGQRTVEFLGFNITKEGRGLTDTFKTKLLNVTPPKDLKQLQSILGLLNFARNFIPNFAELVQTLYNLIASSPGKYIEWTEDNTKQLNKVIEALNTASNLEERLPDQRLVIKVNTSPSAGYVRYYNESGKKPIMYLNYVFSKAELKFSMLEKLLTTMHKALIKAMDLAMGQEILVYSPIVSMTKIQKTPLPERKALPIRWITWMTYLEDPRIQFHYDKTLPELKHIPDVYTSSIPPLKHPSQYEGVFCTDGSAIKSPDPTKSNNAGMGIVHAIYNPEYKILNQWSIPLGHHTAQMAEIAAVEFACKKALKVPGPVLVITDSFYVAESANKELPYWKSNGFVNNKKEPLKHISKWKSIAECLSIKPDITIQHEKGHQPINTSIHTEGNALADKLATQGSYVVNAGKRTADGSEFEKRTADGSEFESPKKKAKVE

SEQ ID NO: 710 - protein, 2171 aa, synthetic construct
MPAAKRVKLDGGDKKYSIGLDIGTNSVGWAVITDEYKVPSKKFKVLGNTDRHSIKKNLIGALLFDSGETAEATRLKRTARRRYTRRKNRICYLQEIFSNEMAKVDDSFFHRLEESFLVEEDKKHERHPIFGNIVDEVAYHEKYPTIYHLRKKLVDSTDKADLRLIYLALAHMIKFRGHFLIEGDLNPDNSDVDKLFIQLVQTYNQLFEENPINASGVDAKAILSARLSKSRRLENLIAQLPGEKKNGLFGNLIALSLGLTPNFKSNFDLAEDAKLQLSKDTYDDDLDNLLAQIGDQYADLFLAAKNLSDAILLSDILRVNTEITKAPLSASMIKRYDEHHQDLTLLKALVRQQLPEKYKEIFFDQSKNGYAGYIDGGASQEEFYKFIKPILEKMDGTEELLVKLNREDLLRKQRTFDNGSIPHQIHLGELHAILRRQEDFYPFLKDNREKIEKILTFRIPYYVGPLARGNSRFAWMTRKSEETITPWNFEEVVDKGASAQSFIERMTNFDKNLPNEKVLPKHSLLYEYFTVYNELTKVKYVTEGMRKPAFLSGEQKKAIVDLLFKTNRKVTVKQLKEDYFKKIECFDSVEISGVEDRFNASLGTYHDLLKIIKDKDFLDNEENEDILEDIVLTLTLFEDREMIEERLKTYAHLFDDKVMKQLKRRRYTGWGRLSRKLINGIRDKQSGKTILDFLKSDGFANRNFMQLIHDDSLTFKEDIQKAQVSGQGDSLHEHIANLAGSPAIKKGILQTVKVVDELVKVMGRHKPENIVIEMARENQTTQKGQKNSRERMKRIEEGIKELGSQILKEHPVENTQLQNEKLYLYYLQNGRDMYVDQELDINRLSDYDVDHIVPQSFLKDDSIDNKVLTRSDKARGKSDNVPSEEVVKKMKNYWRQLLNAKLITQRKFDNLTKAERGGLSELDKAGFIKRQLVETRQITKHVAQILDSRMNTKYDENDKLIREVKVITLKSKLVSDFRKDFQFYKVREINNYHHAHDAYLNAVVGTALIKKYPKLESEFVYGDYKVYDVRKMIAKSEQEIGKATAKYFFYSNIMNFFKTEITLANGEIRKRPLIETNGETGEIVWDKGRDFATVRKVLSMPQVNIVKKTEVQTGGFSKESILPKRNSDKLIARKKDWDPKKYGGFDSPTVAYSVLVVAKVEKGKSKKLKSVKELLGITIMERSSFEKNPIDFLEAKGYKEVKKDLIIKLPKYSLFELENGRKRMLASAGELQKGNELALPSKYVNFLYLASHYEKLKGSPEDNEQKQLFVEQHKHYLDEIIEQISEFSKRVILADANLDKVLSAYNKHRDKPIREQAENIIHLFTLTNLGAPAAFKYFDTTIDRKRYTSTKEVLDATLIHQSITGLYETRIDLSQLGGDGGGGGGSSGGMNPLQLLQPLPAEVKGTKLLAHWNSGATITCIPESFLEDEQPIKQTLIKTIHGEKQQNVYYLTFKVKGRKVEAEVIASPYEYILLSPTDVPWLTQQPLQLTILVPLQEYQDRILNKTALPEEQKQQLKALFTKYDNLWQHWENQVGHRKIRPHNIATGDYPPRPQKQYPINPKAKPSIQIVIDDLLKQGVLTPQNSTMNTPVYPVPKPDGRWRMVLDYREVNKTIPLTAAQNQHSAGILATIVRQKYKTTLDLANGFWAHPITPDSYWLTAFTWQGKQYCWTRLPQGFLNSPALFNADAVDLLKEVPNVQVYVDDIYLSHDNPHEHIQQLEKVFQILLQAGYVVSLKKSEIGQRTVEFLGFNITKEGRGLTDTFKTKLLNVTPPKDLKQLQSILGLLNFARNFIPNFAELVQTLYNLIASSPGKYIEWTEDNTKQLNKVIEALNTASNLEERLPDQRLVIKVNTSPSAGYVRYYNESGKKPIMYLNYVFSKAELKFSMLEKLLTTMHKALIKAMDLAMGQEILVYSPIVSMTKIQKTPLPERKALPIRWITWMTYLEDPRIQFHYDKTLPELKHIPDVYTSSIPPLKHPSQYEGVFCTDGSAIKSPDPTKSNNAGMGIVHAIYNPEYKILNQWSIPLGHHTAQMAEIAAVEFACKKALKVPGPVLVITDSFYVAESANKELPYWKSNGFVNNKKEPLKHISKWKSIAECLSIKPDITIQHEKGHQPINTSIHTEGNALADKLATQGSYVVNAGKRTADGSEFEKRTADGSEFESPKKKAKVE

SEQ ID NO: 711 - protein, 2174 aa, synthetic construct
MPAAKRVKLDGGDKKYSIGLDIGTNSVGWAVITDEYKVPSKKFKVLGNTDRHSIKKNLIGALLFDSGETAEATRLKRTARRRYTRRKNRICYLQEIFSNEMAKVDDSFFHRLEESFLVEEDKKHERHPIFGNIVDEVAYHEKYPTIYHLRKKLVDSTDKADLRLIYLALAHMIKFRGHFLIEGDLNPDNSDVDKLFIQLVQTYNQLFEENPINASGVDAKAILSARLSKSRRLENLIAQLPGEKKNGLFGNLIALSLGLTPNFKSNFDLAEDAKLQLSKDTYDDDLDNLLAQIGDQYADLFLAAKNLSDAILLSDILRVNTEITKAPLSASMIKRYDEHHQDLTLLKALVRQQLPEKYKEIFFDQSKNGYAGYIDGGASQEEFYKFIKPILEKMDGTEELLVKLNREDLLRKQRTFDNGSIPHQIHLGELHAILRRQEDFYPFLKDNREKIEKILTFRIPYYVGPLARGNSRFAWMTRKSEETITPWNFEEVVDKGASAQSFIERMTNFDKNLPNEKVLPKHSLLYEYFTVYNELTKVKYVTEGMRKPAFLSGEQKKAIVDLLFKTNRKVTVKQLKEDYFKKIECFDSVEISGVEDRFNASLGTYHDLLKIIKDKDFLDNEENEDILEDIVLTLTLFEDREMIEERLKTYAHLFDDKVMKQLKRRRYTGWGRLSRKLINGIRDKQSGKTILDFLKSDGFANRNFMQLIHDDSLTFKEDIQKAQVSGQGDSLHEHIANLAGSPAIKKGILQTVKVVDELVKVMGRHKPENIVIEMARENQTTQKGQKNSRERMKRIEEGIKELGSQILKEHPVENTQLQNEKLYLYYLQNGRDMYVDQELDINRLSDYDVDHIVPQSFLKDDSIDNKVLTRSDKARGKSDNVPSEEVVKKMKNYWRQLLNAKLITQRKFDNLTKAERGGLSELDKAGFIKRQLVETRQITKHVAQILDSRMNTKYDENDKLIREVKVITLKSKLVSDFRKDFQFYKVREINNYHHAHDAYLNAVVGTALIKKYPKLESEFVYGDYKVYDVRKMIAKSEQEIGKATAKYFFYSNIMNFFKTEITLANGEIRKRPLIETNGETGEIVWDKGRDFATVRKVLSMPQVNIVKKTEVQTGGFSKESILPKRNSDKLIARKKDWDPKKYGGFDSPTVAYSVLVVAKVEKGKSKKLKSVKELLGITIMERSSFEKNPIDFLEAKGYKEVKKDLIIKLPKYSLFELENGRKRMLASAGELQKGNELALPSKYVNFLYLASHYEKLKGSPEDNEQKQLFVEQHKHYLDEIIEQISEFSKRVILADANLDKVLSAYNKHRDKPIREQAENIIHLFTLTNLGAPAAFKYFDTTIDRKRYTSTKEVLDATLIHQSITGLYETRIDLSQLGGDGGGSSGGGGGSGGMNPLQLLQPLPAEVKGTKLLAHWNSGATITCIPESFLEDEQPIKQTLIKTIHGEKQQNVYYLTFKVKGRKVEAEVIASPYEYILLSPTDVPWLTQQPLQLTILVPLQEYQDRILNKTALPEEQKQQLKALFTKYDNLWQHWENQVGHRKIRPHNIATGDYPPRPQKQYPINPKAKPSIQIVIDDLLKQGVLTPQNSTMNTPVYPVPKPDGRWRMVLDYREVNKTIPLTAAQNQHSAGILATIVRQKYKTTLDLANGFWAHPITPDSYWLTAFTWQGKQYCWTRLPQGFLNSPALFNADAVDLLKEVPNVQVYVDDIYLSHDNPHEHIQQLEKVFQILLQAGYVVSLKKSEIGQRTVEFLGFNITKEGRGLTDTFKTKLLNVTPPKDLKQLQSILGLLNFARNFIPNFAELVQTLYNLIASSPGKYIEWTEDNTKQLNKVIEALNTASNLEERLPDQRLVIKVNTSPSAGYVRYYNESGKKPIMYLNYVFSKAELKFSMLEKLLTTMHKALIKAMDLAMGQEILVYSPIVSMTKIQKTPLPERKALPIRWITWMTYLEDPRIQFHYDKTLPELKHIPDVYTSSIPPLKHPSQYEGVFCTDGSAIKSPDPTKSNNAGMGIVHAIYNPEYKILNQWSIPLGHHTAQMAEIAAVEFACKKALKVPGPVLVITDSFYVAESANKELPYWKSNGFVNNKKEPLKHISKWKSIAECLSIKPDITIQHEKGHQPINTSIHTEGNALADKLATQGSYVVNAGKRTADGSEFEKRTADGSEFESPKKKAKVE

SEQ ID NO: 712 - protein, 2176 aa, synthetic construct
MPAAKRVKLDGGDKKYSIGLDIGTNSVGWAVITDEYKVPSKKFKVLGNTDRHSIKKNLIGALLFDSGETAEATRLKRTARRRYTRRKNRICYLQEIFSNEMAKVDDSFFHRLEESFLVEEDKKHERHPIFGNIVDEVAYHEKYPTIYHLRKKLVDSTDKADLRLIYLALAHMIKFRGHFLIEGDLNPDNSDVDKLFIQLVQTYNQLFEENPINASGVDAKAILSARLSKSRRLENLIAQLPGEKKNGLFGNLIALSLGLTPNFKSNFDLAEDAKLQLSKDTYDDDLDNLLAQIGDQYADLFLAAKNLSDAILLSDILRVNTEITKAPLSASMIKRYDEHHQDLTLLKALVRQQLPEKYKEIFFDQSKNGYAGYIDGGASQEEFYKFIKPILEKMDGTEELLVKLNREDLLRKQRTFDNGSIPHQIHLGELHAILRRQEDFYPFLKDNREKIEKILTFRIPYYVGPLARGNSRFAWMTRKSEETITPWNFEEVVDKGASAQSFIERMTNFDKNLPNEKVLPKHSLLYEYFTVYNELTKVKYVTEGMRKPAFLSGEQKKAIVDLLFKTNRKVTVKQLKEDYFKKIECFDSVEISGVEDRFNASLGTYHDLLKIIKDKDFLDNEENEDILEDIVLTLTLFEDREMIEERLKTYAHLFDDKVMKQLKRRRYTGWGRLSRKLINGIRDKQSGKTILDFLKSDGFANRNFMQLIHDDSLTFKEDIQKAQVSGQGDSLHEHIANLAGSPAIKKGILQTVKVVDELVKVMGRHKPENIVIEMARENQTTQKGQKNSRERMKRIEEGIKELGSQILKEHPVENTQLQNEKLYLYYLQNGRDMYVDQELDINRLSDYDVDHIVPQSFLKDDSIDNKVLTRSDKARGKSDNVPSEEVVKKMKNYWRQLLNAKLITQRKFDNLTKAERGGLSELDKAGFIKRQLVETRQITKHVAQILDSRMNTKYDENDKLIREVKVITLKSKLVSDFRKDFQFYKVREINNYHHAHDAYLNAVVGTALIKKYPKLESEFVYGDYKVYDVRKMIAKSEQEIGKATAKYFFYSNIMNFFKTEITLANGEIRKRPLIETNGETGEIVWDKGRDFATVRKVLSMPQVNIVKKTEVQTGGFSKESILPKRNSDKLIARKKDWDPKKYGGFDSPTVAYSVLVVAKVEKGKSKKLKSVKELLGITIMERSSFEKNPIDFLEAKGYKEVKKDLIIKLPKYSLFELENGRKRMLASAGELQKGNELALPSKYVNFLYLASHYEKLKGSPEDNEQKQLFVEQHKHYLDEIIEQISEFSKRVILADANLDKVLSAYNKHRDKPIREQAENIIHLFTLTNLGAPAAFKYFDTTIDRKRYTSTKEVLDATLIHQSITGLYETRIDLSQLGGDGGGSSGGSEAAAKGGMNPLQLLQPLPAEVKGTKLLAHWNSGATITCIPESFLEDEQPIKQTLIKTIHGEKQQNVYYLTFKVKGRKVEAEVIASPYEYILLSPTDVPWLTQQPLQLTILVPLQEYQDRILNKTALPEEQKQQLKALFTKYDNLWQHWENQVGHRKIRPHNIATGDYPPRPQKQYPINPKAKPSIQIVIDDLLKQGVLTPQNSTMNTPVYPVPKPDGRWRMVLDYREVNKTIPLTAAQNQHSAGILATIVRQKYKTTLDLANGFWAHPITPDSYWLTAFTWQGKQYCWTRLPQGFLNSPALFNADAVDLLKEVPNVQVYVDDIYLSHDNPHEHIQQLEKVFQILLQAGYVVSLKKSEIGQRTVEFLGFNITKEGRGLTDTFKTKLLNVTPPKDLKQLQSILGLLNFARNFIPNFAELVQTLYNLIASSPGKYIEWTEDNTKQLNKVIEALNTASNLEERLPDQRLVIKVNTSPSAGYVRYYNESGKKPIMYLNYVFSKAELKFSMLEKLLTTMHKALIKAMDLAMGQEILVYSPIVSMTKIQKTPLPERKALPIRWITWMTYLEDPRIQFHYDKTLPELKHIPDVYTSSIPPLKHPSQYEGVFCTDGSAIKSPDPTKSNNAGMGIVHAIYNPEYKILNQWSIPLGHHTAQMAEIAAVEFACKKALKVPGPVLVITDSFYVAESANKELPYWKSNGFVNNKKEPLKHISKWKSIAECLSIKPDITIQHEKGHQPINTSIHTEGNALADKLATQGSYVVNAGKRTADGSEFEKRTADGSEFESPKKKAKVE

SEQ ID NO: 713 - protein, 2181 aa, synthetic construct
MPAAKRVKLDGGDKKYSIGLDIGTNSVGWAVITDEYKVPSKKFKVLGNTDRHSIKKNLIGALLFDSGETAEATRLKRTARRRYTRRKNRICYLQEIFSNEMAKVDDSFFHRLEESFLVEEDKKHERHPIFGNIVDEVAYHEKYPTIYHLRKKLVDSTDKADLRLIYLALAHMIKFRGHFLIEGDLNPDNSDVDKLFIQLVQTYNQLFEENPINASGVDAKAILSARLSKSRRLENLIAQLPGEKKNGLFGNLIALSLGLTPNFKSNFDLAEDAKLQLSKDTYDDDLDNLLAQIGDQYADLFLAAKNLSDAILLSDILRVNTEITKAPLSASMIKRYDEHHQDLTLLKALVRQQLPEKYKEIFFDQSKNGYAGYIDGGASQEEFYKFIKPILEKMDGTEELLVKLNREDLLRKQRTFDNGSIPHQIHLGELHAILRRQEDFYPFLKDNREKIEKILTFRIPYYVGPLARGNSRFAWMTRKSEETITPWNFEEVVDKGASAQSFIERMTNFDKNLPNEKVLPKHSLLYEYFTVYNELTKVKYVTEGMRKPAFLSGEQKKAIVDLLFKTNRKVTVKQLKEDYFKKIECFDSVEISGVEDRFNASLGTYHDLLKIIKDKDFLDNEENEDILEDIVLTLTLFEDREMIEERLKTYAHLFDDKVMKQLKRRRYTGWGRLSRKLINGIRDKQSGKTILDFLKSDGFANRNFMQLIHDDSLTFKEDIQKAQVSGQGDSLHEHIANLAGSPAIKKGILQTVKVVDELVKVMGRHKPENIVIEMARENQTTQKGQKNSRERMKRIEEGIKELGSQILKEHPVENTQLQNEKLYLYYLQNGRDMYVDQELDINRLSDYDVDHIVPQSFLKDDSIDNKVLTRSDKARGKSDNVPSEEVVKKMKNYWRQLLNAKLITQRKFDNLTKAERGGLSELDKAGFIKRQLVETRQITKHVAQILDSRMNTKYDENDKLIREVKVITLKSKLVSDFRKDFQFYKVREINNYHHAHDAYLNAVVGTALIKKYPKLESEFVYGDYKVYDVRKMIAKSEQEIGKATAKYFFYSNIMNFFKTEITLANGEIRKRPLIETNGETGEIVWDKGRDFATVRKVLSMPQVNIVKKTEVQTGGFSKESILPKRNSDKLIARKKDWDPKKYGGFDSPTVAYSVLVVAKVEKGKSKKLKSVKELLGITIMERSSFEKNPIDFLEAKGYKEVKKDLIIKLPKYSLFELENGRKRMLASAGELQKGNELALPSKYVNFLYLASHYEKLKGSPEDNEQKQLFVEQHKHYLDEIIEQISEFSKRVILADANLDKVLSAYNKHRDKPIREQAENIIHLFTLTNLGAPAAFKYFDTTIDRKRYTSTKEVLDATLIHQSITGLYETRIDLSQLGGDGGSGSETPGTSESATPESGGMNPLQLLQPLPAEVKGTKLLAHWNSGATITCIPESFLEDEQPIKQTLIKTIHGEKQQNVYYLTFKVKGRKVEAEVIASPYEYILLSPTDVPWLTQQPLQLTILVPLQEYQDRILNKTALPEEQKQQLKALFTKYDNLWQHWENQVGHRKIRPHNIATGDYPPRPQKQYPINPKAKPSIQIVIDDLLKQGVLTPQNSTMNTPVYPVPKPDGRWRMVLDYREVNKTIPLTAAQNQHSAGILATIVRQKYKTTLDLANGFWAHPITPDSYWLTAFTWQGKQYCWTRLPQGFLNSPALFNADAVDLLKEVPNVQVYVDDIYLSHDNPHEHIQQLEKVFQILLQAGYVVSLKKSEIGQRTVEFLGFNITKEGRGLTDTFKTKLLNVTPPKDLKQLQSILGLLNFARNFIPNFAELVQTLYNLIASSPGKYIEWTEDNTKQLNKVIEALNTASNLEERLPDQRLVIKVNTSPSAGYVRYYNESGKKPIMYLNYVFSKAELKFSMLEKLLTTMHKALIKAMDLAMGQEILVYSPIVSMTKIQKTPLPERKALPIRWITWMTYLEDPRIQFHYDKTLPELKHIPDVYTSSIPPLKHPSQYEGVFCTDGSAIKSPDPTKSNNAGMGIVHAIYNPEYKILNQWSIPLGHHTAQMAEIAAVEFACKKALKVPGPVLVITDSFYVAESANKELPYWKSNGFVNNKKEPLKHISKWKSIAECLSIKPDITIQHEKGHQPINTSIHTEGNALADKLATQGSYVVNAGKRTADGSEFEKRTADGSEFESPKKKAKVE

SEQ ID NO: 714 - protein, 2176 aa, synthetic construct
MPAAKRVKLDGGDKKYSIGLDIGTNSVGWAVITDEYKVPSKKFKVLGNTDRHSIKKNLIGALLFDSGETAEATRLKRTARRRYTRRKNRICYLQEIFSNEMAKVDDSFFHRLEESFLVEEDKKHERHPIFGNIVDEVAYHEKYPTIYHLRKKLVDSTDKADLRLIYLALAHMIKFRGHFLIEGDLNPDNSDVDKLFIQLVQTYNQLFEENPINASGVDAKAILSARLSKSRRLENLIAQLPGEKKNGLFGNLIALSLGLTPNFKSNFDLAEDAKLQLSKDTYDDDLDNLLAQIGDQYADLFLAAKNLSDAILLSDILRVNTEITKAPLSASMIKRYDEHHQDLTLLKALVRQQLPEKYKEIFFDQSKNGYAGYIDGGASQEEFYKFIKPILEKMDGTEELLVKLNREDLLRKQRTFDNGSIPHQIHLGELHAILRRQEDFYPFLKDNREKIEKILTFRIPYYVGPLARGNSRFAWMTRKSEETITPWNFEEVVDKGASAQSFIERMTNFDKNLPNEKVLPKHSLLYEYFTVYNELTKVKYVTEGMRKPAFLSGEQKKAIVDLLFKTNRKVTVKQLKEDYFKKIECFDSVEISGVEDRFNASLGTYHDLLKIIKDKDFLDNEENEDILEDIVLTLTLFEDREMIEERLKTYAHLFDDKVMKQLKRRRYTGWGRLSRKLINGIRDKQSGKTILDFLKSDGFANRNFMQLIHDDSLTFKEDIQKAQVSGQGDSLHEHIANLAGSPAIKKGILQTVKVVDELVKVMGRHKPENIVIEMARENQTTQKGQKNSRERMKRIEEGIKELGSQILKEHPVENTQLQNEKLYLYYLQNGRDMYVDQELDINRLSDYDVDHIVPQSFLKDDSIDNKVLTRSDKARGKSDNVPSEEVVKKMKNYWRQLLNAKLITQRKFDNLTKAERGGLSELDKAGFIKRQLVETRQITKHVAQILDSRMNTKYDENDKLIREVKVITLKSKLVSDFRKDFQFYKVREINNYHHAHDAYLNAVVGTALIKKYPKLESEFVYGDYKVYDVRKMIAKSEQEIGKATAKYFFYSNIMNFFKTEITLANGEIRKRPLIETNGETGEIVWDKGRDFATVRKVLSMPQVNIVKKTEVQTGGFSKESILPKRNSDKLIARKKDWDPKKYGGFDSPTVAYSVLVVAKVEKGKSKKLKSVKELLGITIMERSSFEKNPIDFLEAKGYKEVKKDLIIKLPKYSLFELENGRKRMLASAGELQKGNELALPSKYVNFLYLASHYEKLKGSPEDNEQKQLFVEQHKHYLDEIIEQISEFSKRVILADANLDKVLSAYNKHRDKPIREQAENIIHLFTLTNLGAPAAFKYFDTTIDRKRYTSTKEVLDATLIHQSITGLYETRIDLSQLGGDGGGGSEAAAKPAPGGMNPLQLLQPLPAEVKGTKLLAHWNSGATITCIPESFLEDEQPIKQTLIKTIHGEKQQNVYYLTFKVKGRKVEAEVIASPYEYILLSPTDVPWLTQQPLQLTILVPLQEYQDRILNKTALPEEQKQQLKALFTKYDNLWQHWENQVGHRKIRPHNIATGDYPPRPQKQYPINPKAKPSIQIVIDDLLKQGVLTPQNSTMNTPVYPVPKPDGRWRMVLDYREVNKTIPLTAAQNQHSAGILATIVRQKYKTTLDLANGFWAHPITPDSYWLTAFTWQGKQYCWTRLPQGFLNSPALFNADAVDLLKEVPNVQVYVDDIYLSHDNPHEHIQQLEKVFQILLQAGYVVSLKKSEIGQRTVEFLGFNITKEGRGLTDTFKTKLLNVTPPKDLKQLQSILGLLNFARNFIPNFAELVQTLYNLIASSPGKYIEWTEDNTKQLNKVIEALNTASNLEERLPDQRLVIKVNTSPSAGYVRYYNESGKKPIMYLNYVFSKAELKFSMLEKLLTTMHKALIKAMDLAMGQEILVYSPIVSMTKIQKTPLPERKALPIRWITWMTYLEDPRIQFHYDKTLPELKHIPDVYTSSIPPLKHPSQYEGVFCTDGSAIKSPDPTKSNNAGMGIVHAIYNPEYKILNQWSIPLGHHTAQMAEIAAVEFACKKALKVPGPVLVITDSFYVAESANKELPYWKSNGFVNNKKEPLKHISKWKSIAECLSIKPDITIQHEKGHQPINTSIHTEGNALADKLATQGSYVVNAGKRTADGSEFEKRTADGSEFESPKKKAKVE

SEQ ID NO: 715 - protein, 2208 aa, synthetic construct
MPAAKRVKLDGGDKKYSIGLDIGTNSVGWAVITDEYKVPSKKFKVLGNTDRHSIKKNLIGALLFDSGETAEATRLKRTARRRYTRRKNRICYLQEIFSNEMAKVDDSFFHRLEESFLVEEDKKHERHPIFGNIVDEVAYHEKYPTIYHLRKKLVDSTDKADLRLIYLALAHMIKFRGHFLIEGDLNPDNSDVDKLFIQLVQTYNQLFEENPINASGVDAKAILSARLSKSRRLENLIAQLPGEKKNGLFGNLIALSLGLTPNFKSNFDLAEDAKLQLSKDTYDDDLDNLLAQIGDQYADLFLAAKNLSDAILLSDILRVNTEITKAPLSASMIKRYDEHHQDLTLLKALVRQQLPEKYKEIFFDQSKNGYAGYIDGGASQEEFYKFIKPILEKMDGTEELLVKLNREDLLRKQRTFDNGSIPHQIHLGELHAILRRQEDFYPFLKDNREKIEKILTFRIPYYVGPLARGNSRFAWMTRKSEETITPWNFEEVVDKGASAQSFIERMTNFDKNLPNEKVLPKHSLLYEYFTVYNELTKVKYVTEGMRKPAFLSGEQKKAIVDLLFKTNRKVTVKQLKEDYFKKIECFDSVEISGVEDRFNASLGTYHDLLKIIKDKDFLDNEENEDILEDIVLTLTLFEDREMIEERLKTYAHLFDDKVMKQLKRRRYTGWGRLSRKLINGIRDKQSGKTILDFLKSDGFANRNFMQLIHDDSLTFKEDIQKAQVSGQGDSLHEHIANLAGSPAIKKGILQTVKVVDELVKVMGRHKPENIVIEMARENQTTQKGQKNSRERMKRIEEGIKELGSQILKEHPVENTQLQNEKLYLYYLQNGRDMYVDQELDINRLSDYDVDHIVPQSFLKDDSIDNKVLTRSDKARGKSDNVPSEEVVKKMKNYWRQLLNAKLITQRKFDNLTKAERGGLSELDKAGFIKRQLVETRQITKHVAQILDSRMNTKYDENDKLIREVKVITLKSKLVSDFRKDFQFYKVREINNYHHAHDAYLNAVVGTALIKKYPKLESEFVYGDYKVYDVRKMIAKSEQEIGKATAKYFFYSNIMNFFKTEITLANGEIRKRPLIETNGETGEIVWDKGRDFATVRKVLSMPQVNIVKKTEVQTGGFSKESILPKRNSDKLIARKKDWDPKKYGGFDSPTVAYSVLVVAKVEKGKSKKLKSVKELLGITIMERSSFEKNPIDFLEAKGYKEVKKDLIIKLPKYSLFELENGRKRMLASAGELQKGNELALPSKYVNFLYLASHYEKLKGSPEDNEQKQLFVEQHKHYLDEIIEQISEFSKRVILADANLDKVLSAYNKHRDKPIREQAENIIHLFTLTNLGAPAAFKYFDTTIDRKRYTSTKEVLDATLIHQSITGLYETRIDLSQLGGDGGAEAAAKEAAAKEAAAKEAAAKALEAEAAAKEAAAKEAAAKEAAAKAGGMDLLKPLTVERKGVKIKGYWNSQADITCVPKDLLQGEEPVRQQNVTTIHGTQEGDVYYVNLKIDGRRINTEVIGTTLDYAIITPGDVPWILKKPLELTIKLDLEEQQGTLLNNSILSKKGKEELKQLFEKYSALWQSWENQVGHRRIRPHKIATGTVKPTPQKQYHINPKAKPDIQIVINDLLKQGVLIQKESTMNTPVYPVPKPNGRWRMVLDYRAVNKVTPLIAVQNQHSYGILGSLFKGRYKTTIDLSNGFWAHPIVPEDYWITAFTWQGKQYCWTVLPQGFLNSPGLFTGDVVDLLQGIPNVEVYVDDVYISHDSEKEHLEYLDILFNRLKEAGYIISLKKSNIANSIVDFLGFQITNEGRGLTDTFKEKLENITAPTTLKQLQSILGLLNFARNFIPDFTELIAPLYALIPKSTKNYVPWQIEHSTTLETLITKLNGAEYLQGRKGDKTLIMKVNASYTTGYIRYYNEGEKKPISYVSIVFSKTELKFTELEKLLTTVHKGLLKALDLSMGQNIHVYSPIVSMQNIQKTPQTAKKALASRWLSWLSYLEDPRIRFFYDPQMPALKDLPAVDTGKDNKKHPSNFQHIFYTDGSAITSPTKEGHLNAGMGIVYFINKDGNLQKQQEWSISLGNHTAQFAEIAAFEFALKKCLPLGGNILVVTDSNYVAKAYNEELDVWASNGFVNNRKKPLKHISKWKSVADLKRLRPDVVVTHEPGHQKLDSSPHAYGNNLADQLATQASFKVHAGKRTADGSEFEKRTADGSEFESPKKKAKVE

SEQ ID NO: 716 - protein, 2192 aa, synthetic construct
MPAAKRVKLDGGDKKYSIGLDIGTNSVGWAVITDEYKVPSKKFKVLGNTDRHSIKKNLIGALLFDSGETAEATRLKRTARRRYTRRKNRICYLQEIFSNEMAKVDDSFFHRLEESFLVEEDKKHERHPIFGNIVDEVAYHEKYPTIYHLRKKLVDSTDKADLRLIYLALAHMIKFRGHFLIEGDLNPDNSDVDKLFIQLVQTYNQLFEENPINASGVDAKAILSARLSKSRRLENLIAQLPGEKKNGLFGNLIALSLGLTPNFKSNFDLAEDAKLQLSKDTYDDDLDNLLAQIGDQYADLFLAAKNLSDAILLSDILRVNTEITKAPLSASMIKRYDEHHQDLTLLKALVRQQLPEKYKEIFFDQSKNGYAGYIDGGASQEEFYKFIKPILEKMDGTEELLVKLNREDLLRKQRTFDNGSIPHQIHLGELHAILRRQEDFYPFLKDNREKIEKILTFRIPYYVGPLARGNSRFAWMTRKSEETITPWNFEEVVDKGASAQSFIERMTNFDKNLPNEKVLPKHSLLYEYFTVYNELTKVKYVTEGMRKPAFLSGEQKKAIVDLLFKTNRKVTVKQLKEDYFKKIECFDSVEISGVEDRFNASLGTYHDLLKIIKDKDFLDNEENEDILEDIVLTLTLFEDREMIEERLKTYAHLFDDKVMKQLKRRRYTGWGRLSRKLINGIRDKQSGKTILDFLKSDGFANRNFMQLIHDDSLTFKEDIQKAQVSGQGDSLHEHIANLAGSPAIKKGILQTVKVVDELVKVMGRHKPENIVIEMARENQTTQKGQKNSRERMKRIEEGIKELGSQILKEHPVENTQLQNEKLYLYYLQNGRDMYVDQELDINRLSDYDVDHIVPQSFLKDDSIDNKVLTRSDKARGKSDNVPSEEVVKKMKNYWRQLLNAKLITQRKFDNLTKAERGGLSELDKAGFIKRQLVETRQITKHVAQILDSRMNTKYDENDKLIREVKVITLKSKLVSDFRKDFQFYKVREINNYHHAHDAYLNAVVGTALIKKYPKLESEFVYGDYKVYDVRKMIAKSEQEIGKATAKYFFYSNIMNFFKTEITLANGEIRKRPLIETNGETGEIVWDKGRDFATVRKVLSMPQVNIVKKTEVQTGGFSKESILPKRNSDKLIARKKDWDPKKYGGFDSPTVAYSVLVVAKVEKGKSKKLKSVKELLGITIMERSSFEKNPIDFLEAKGYKEVKKDLIIKLPKYSLFELENGRKRMLASAGELQKGNELALPSKYVNFLYLASHYEKLKGSPEDNEQKQLFVEQHKHYLDEIIEQISEFSKRVILADANLDKVLSAYNKHRDKPIREQAENIIHLFTLTNLGAPAAFKYFDTTIDRKRYTSTKEVLDATLIHQSITGLYETRIDLSQLGGDGGGGGGSGGGGSGGGGSGGGGSGGGGSGGGGSGGMDLLKPLTVERKGVKIKGYWNSQADITCVPKDLLQGEEPVRQQNVTTIHGTQEGDVYYVNLKIDGRRINTEVIGTTLDYAIITPGDVPWILKKPLELTIKLDLEEQQGTLLNNSILSKKGKEELKQLFEKYSALWQSWENQVGHRRIRPHKIATGTVKPTPQKQYHINPKAKPDIQIVINDLLKQGVLIQKESTMNTPVYPVPKPNGRWRMVLDYRAVNKVTPLIAVQNQHSYGILGSLFKGRYKTTIDLSNGFWAHPIVPEDYWITAFTWQGKQYCWTVLPQGFLNSPGLFTGDVVDLLQGIPNVEVYVDDVYISHDSEKEHLEYLDILFNRLKEAGYIISLKKSNIANSIVDFLGFQITNEGRGLTDTFKEKLENITAPTTLKQLQSILGLLNFARNFIPDFTELIAPLYALIPKSTKNYVPWQIEHSTTLETLITKLNGAEYLQGRKGDKTLIMKVNASYTTGYIRYYNEGEKKPISYVSIVFSKTELKFTELEKLLTTVHKGLLKALDLSMGQNIHVYSPIVSMQNIQKTPQTAKKALASRWLSWLSYLEDPRIRFFYDPQMPALKDLPAVDTGKDNKKHPSNFQHIFYTDGSAITSPTKEGHLNAGMGIVYFINKDGNLQKQQEWSISLGNHTAQFAEIAAFEFALKKCLPLGGNILVVTDSNYVAKAYNEELDVWASNGFVNNRKKPLKHISKWKSVADLKRLRPDVVVTHEPGHQKLDSSPHAYGNNLADQLATQASFKVHAGKRTADGSEFEKRTADGSEFESPKKKAKVE

SEQ ID NO: 717 - protein, 2171 aa, synthetic construct
MPAAKRVKLDGGDKKYSIGLDIGTNSVGWAVITDEYKVPSKKFKVLGNTDRHSIKKNLIGALLFDSGETAEATRLKRTARRRYTRRKNRICYLQEIFSNEMAKVDDSFFHRLEESFLVEEDKKHERHPIFGNIVDEVAYHEKYPTIYHLRKKLVDSTDKADLRLIYLALAHMIKFRGHFLIEGDLNPDNSDVDKLFIQLVQTYNQLFEENPINASGVDAKAILSARLSKSRRLENLIAQLPGEKKNGLFGNLIALSLGLTPNFKSNFDLAEDAKLQLSKDTYDDDLDNLLAQIGDQYADLFLAAKNLSDAILLSDILRVNTEITKAPLSASMIKRYDEHHQDLTLLKALVRQQLPEKYKEIFFDQSKNGYAGYIDGGASQEEFYKFIKPILEKMDGTEELLVKLNREDLLRKQRTFDNGSIPHQIHLGELHAILRRQEDFYPFLKDNREKIEKILTFRIPYYVGPLARGNSRFAWMTRKSEETITPWNFEEVVDKGASAQSFIERMTNFDKNLPNEKVLPKHSLLYEYFTVYNELTKVKYVTEGMRKPAFLSGEQKKAIVDLLFKTNRKVTVKQLKEDYFKKIECFDSVEISGVEDRFNASLGTYHDLLKIIKDKDFLDNEENEDILEDIVLTLTLFEDREMIEERLKTYAHLFDDKVMKQLKRRRYTGWGRLSRKLINGIRDKQSGKTILDFLKSDGFANRNFMQLIHDDSLTFKEDIQKAQVSGQGDSLHEHIANLAGSPAIKKGILQTVKVVDELVKVMGRHKPENIVIEMARENQTTQKGQKNSRERMKRIEEGIKELGSQILKEHPVENTQLQNEKLYLYYLQNGRDMYVDQELDINRLSDYDVDHIVPQSFLKDDSIDNKVLTRSDKARGKSDNVPSEEVVKKMKNYWRQLLNAKLITQRKFDNLTKAERGGLSELDKAGFIKRQLVETRQITKHVAQILDSRMNTKYDENDKLIREVKVITLKSKLVSDFRKDFQFYKVREINNYHHAHDAYLNAVVGTALIKKYPKLESEFVYGDYKVYDVRKMIAKSEQEIGKATAKYFFYSNIMNFFKTEITLANGEIRKRPLIETNGETGEIVWDKGRDFATVRKVLSMPQVNIVKKTEVQTGGFSKESILPKRNSDKLIARKKDWDPKKYGGFDSPTVAYSVLVVAKVEKGKSKKLKSVKELLGITIMERSSFEKNPIDFLEAKGYKEVKKDLIIKLPKYSLFELENGRKRMLASAGELQKGNELALPSKYVNFLYLASHYEKLKGSPEDNEQKQLFVEQHKHYLDEIIEQISEFSKRVILADANLDKVLSAYNKHRDKPIREQAENIIHLFTLTNLGAPAAFKYFDTTIDRKRYTSTKEVLDATLIHQSITGLYETRIDLSQLGGDGGGSSGGSPAPGGMDLLKPLTVERKGVKIKGYWNSQADITCVPKDLLQGEEPVRQQNVTTIHGTQEGDVYYVNLKIDGRRINTEVIGTTLDYAIITPGDVPWILKKPLELTIKLDLEEQQGTLLNNSILSKKGKEELKQLFEKYSALWQSWENQVGHRRIRPHKIATGTVKPTPQKQYHINPKAKPDIQIVINDLLKQGVLIQKESTMNTPVYPVPKPNGRWRMVLDYRAVNKVTPLIAVQNQHSYGILGSLFKGRYKTTIDLSNGFWAHPIVPEDYWITAFTWQGKQYCWTVLPQGFLNSPGLFTGDVVDLLQGIPNVEVYVDDVYISHDSEKEHLEYLDILFNRLKEAGYIISLKKSNIANSIVDFLGFQITNEGRGLTDTFKEKLENITAPTTLKQLQSILGLLNFARNFIPDFTELIAPLYALIPKSTKNYVPWQIEHSTTLETLITKLNGAEYLQGRKGDKTLIMKVNASYTTGYIRYYNEGEKKPISYVSIVFSKTELKFTELEKLLTTVHKGLLKALDLSMGQNIHVYSPIVSMQNIQKTPQTAKKALASRWLSWLSYLEDPRIRFFYDPQMPALKDLPAVDTGKDNKKHPSNFQHIFYTDGSAITSPTKEGHLNAGMGIVYFINKDGNLQKQQEWSISLGNHTAQFAEIAAFEFALKKCLPLGGNILVVTDSNYVAKAYNEELDVWASNGFVNNRKKPLKHISKWKSVADLKRLRPDVVVTHEPGHQKLDSSPHAYGNNLADQLATQASFKVHAGKRTADGSEFEKRTADGSEFESPKKKAKVE

SEQ ID NO: 718 - protein, 2177 aa, synthetic construct
MPAAKRVKLDGGDKKYSIGLDIGTNSVGWAVITDEYKVPSKKFKVLGNTDRHSIKKNLIGALLFDSGETAEATRLKRTARRRYTRRKNRICYLQEIFSNEMAKVDDSFFHRLEESFLVEEDKKHERHPIFGNIVDEVAYHEKYPTIYHLRKKLVDSTDKADLRLIYLALAHMIKFRGHFLIEGDLNPDNSDVDKLFIQLVQTYNQLFEENPINASGVDAKAILSARLSKSRRLENLIAQLPGEKKNGLFGNLIALSLGLTPNFKSNFDLAEDAKLQLSKDTYDDDLDNLLAQIGDQYADLFLAAKNLSDAILLSDILRVNTEITKAPLSASMIKRYDEHHQDLTLLKALVRQQLPEKYKEIFFDQSKNGYAGYIDGGASQEEFYKFIKPILEKMDGTEELLVKLNREDLLRKQRTFDNGSIPHQIHLGELHAILRRQEDFYPFLKDNREKIEKILTFRIPYYVGPLARGNSRFAWMTRKSEETITPWNFEEVVDKGASAQSFIERMTNFDKNLPNEKVLPKHSLLYEYFTVYNELTKVKYVTEGMRKPAFLSGEQKKAIVDLLFKTNRKVTVKQLKEDYFKKIECFDSVEISGVEDRFNASLGTYHDLLKIIKDKDFLDNEENEDILEDIVLTLTLFEDREMIEERLKTYAHLFDDKVMKQLKRRRYTGWGRLSRKLINGIRDKQSGKTILDFLKSDGFANRNFMQLIHDDSLTFKEDIQKAQVSGQGDSLHEHIANLAGSPAIKKGILQTVKVVDELVKVMGRHKPENIVIEMARENQTTQKGQKNSRERMKRIEEGIKELGSQILKEHPVENTQLQNEKLYLYYLQNGRDMYVDQELDINRLSDYDVDHIVPQSFLKDDSIDNKVLTRSDKARGKSDNVPSEEVVKKMKNYWRQLLNAKLITQRKFDNLTKAERGGLSELDKAGFIKRQLVETRQITKHVAQILDSRMNTKYDENDKLIREVKVITLKSKLVSDFRKDFQFYKVREINNYHHAHDAYLNAVVGTALIKKYPKLESEFVYGDYKVYDVRKMIAKSEQEIGKATAKYFFYSNIMNFFKTEITLANGEIRKRPLIETNGETGEIVWDKGRDFATVRKVLSMPQVNIVKKTEVQTGGFSKESILPKRNSDKLIARKKDWDPKKYGGFDSPTVAYSVLVVAKVEKGKSKKLKSVKELLGITIMERSSFEKNPIDFLEAKGYKEVKKDLIIKLPKYSLFELENGRKRMLASAGELQKGNELALPSKYVNFLYLASHYEKLKGSPEDNEQKQLFVEQHKHYLDEIIEQISEFSKRVILADANLDKVLSAYNKHRDKPIREQAENIIHLFTLTNLGAPAAFKYFDTTIDRKRYTSTKEVLDATLIHQSITGLYETRIDLSQLGGDGGEAAAKEAAAKEAAAKGGMDLLKPLTVERKGVKIKGYWNSQADITCVPKDLLQGEEPVRQQNVTTIHGTQEGDVYYVNLKIDGRRINTEVIGTTLDYAIITPGDVPWILKKPLELTIKLDLEEQQGTLLNNSILSKKGKEELKQLFEKYSALWQSWENQVGHRRIRPHKIATGTVKPTPQKQYHINPKAKPDIQIVINDLLKQGVLIQKESTMNTPVYPVPKPNGRWRMVLDYRAVNKVTPLIAVQNQHSYGILGSLFKGRYKTTIDLSNGFWAHPIVPEDYWITAFTWQGKQYCWTVLPQGFLNSPGLFTGDVVDLLQGIPNVEVYVDDVYISHDSEKEHLEYLDILFNRLKEAGYIISLKKSNIANSIVDFLGFQITNEGRGLTDTFKEKLENITAPTTLKQLQSILGLLNFARNFIPDFTELIAPLYALIPKSTKNYVPWQIEHSTTLETLITKLNGAEYLQGRKGDKTLIMKVNASYTTGYIRYYNEGEKKPISYVSIVFSKTELKFTELEKLLTTVHKGLLKALDLSMGQNIHVYSPIVSMQNIQKTPQTAKKALASRWLSWLSYLEDPRIRFFYDPQMPALKDLPAVDTGKDNKKHPSNFQHIFYTDGSAITSPTKEGHLNAGMGIVYFINKDGNLQKQQEWSISLGNHTAQFAEIAAFEFALKKCLPLGGNILVVTDSNYVAKAYNEELDVWASNGFVNNRKKPLKHISKWKSVADLKRLRPDVVVTHEPGHQKLDSSPHAYGNNLADQLATQASFKVHAGKRTADGSEFEKRTADGSEFESPKKKAKVE

SEQ ID NO: 719 - protein, 2177 aa, synthetic construct
MPAAKRVKLDGGDKKYSIGLDIGTNSVGWAVITDEYKVPSKKFKVLGNTDRHSIKKNLIGALLFDSGETAEATRLKRTARRRYTRRKNRICYLQEIFSNEMAKVDDSFFHRLEESFLVEEDKKHERHPIFGNIVDEVAYHEKYPTIYHLRKKLVDSTDKADLRLIYLALAHMIKFRGHFLIEGDLNPDNSDVDKLFIQLVQTYNQLFEENPINASGVDAKAILSARLSKSRRLENLIAQLPGEKKNGLFGNLIALSLGLTPNFKSNFDLAEDAKLQLSKDTYDDDLDNLLAQIGDQYADLFLAAKNLSDAILLSDILRVNTEITKAPLSASMIKRYDEHHQDLTLLKALVRQQLPEKYKEIFFDQSKNGYAGYIDGGASQEEFYKFIKPILEKMDGTEELLVKLNREDLLRKQRTFDNGSIPHQIHLGELHAILRRQEDFYPFLKDNREKIEKILTFRIPYYVGPLARGNSRFAWMTRKSEETITPWNFEEVVDKGASAQSFIERMTNFDKNLPNEKVLPKHSLLYEYFTVYNELTKVKYVTEGMRKPAFLSGEQKKAIVDLLFKTNRKVTVKQLKEDYFKKIECFDSVEISGVEDRFNASLGTYHDLLKIIKDKDFLDNEENEDILEDIVLTLTLFEDREMIEERLKTYAHLFDDKVMKQLKRRRYTGWGRLSRKLINGIRDKQSGKTILDFLKSDGFANRNFMQLIHDDSLTFKEDIQKAQVSGQGDSLHEHIANLAGSPAIKKGILQTVKVVDELVKVMGRHKPENIVIEMARENQTTQKGQKNSRERMKRIEEGIKELGSQILKEHPVENTQLQNEKLYLYYLQNGRDMYVDQELDINRLSDYDVDHIVPQSFLKDDSIDNKVLTRSDKARGKSDNVPSEEVVKKMKNYWRQLLNAKLITQRKFDNLTKAERGGLSELDKAGFIKRQLVETRQITKHVAQILDSRMNTKYDENDKLIREVKVITLKSKLVSDFRKDFQFYKVREINNYHHAHDAYLNAVVGTALIKKYPKLESEFVYGDYKVYDVRKMIAKSEQEIGKATAKYFFYSNIMNFFKTEITLANGEIRKRPLIETNGETGEIVWDKGRDFATVRKVLSMPQVNIVKKTEVQTGGFSKESILPKRNSDKLIARKKDWDPKKYGGFDSPTVAYSVLVVAKVEKGKSKKLKSVKELLGITIMERSSFEKNPIDFLEAKGYKEVKKDLIIKLPKYSLFELENGRKRMLASAGELQKGNELALPSKYVNFLYLASHYEKLKGSPEDNEQKQLFVEQHKHYLDEIIEQISEFSKRVILADANLDKVLSAYNKHRDKPIREQAENIIHLFTLTNLGAPAAFKYFDTTIDRKRYTSTKEVLDATLIHQSITGLYETRIDLSQLGGDGGGSSGSSGSSGSSGSSGGMDLLKPLTVERKGVKIKGYWNSQADITCVPKDLLQGEEPVRQQNVTTIHGTQEGDVYYVNLKIDGRRINTEVIGTTLDYAIITPGDVPWILKKPLELTIKLDLEEQQGTLLNNSILSKKGKEELKQLFEKYSALWQSWENQVGHRRIRPHKIATGTVKPTPQKQYHINPKAKPDIQIVINDLLKQGVLIQKESTMNTPVYPVPKPNGRWRMVLDYRAVNKVTPLIAVQNQHSYGILGSLFKGRYKTTIDLSNGFWAHPIVPEDYWITAFTWQGKQYCWTVLPQGFLNSPGLFTGDVVDLLQGIPNVEVYVDDVYISHDSEKEHLEYLDILFNRLKEAGYIISLKKSNIANSIVDFLGFQITNEGRGLTDTFKEKLENITAPTTLKQLQSILGLLNFARNFIPDFTELIAPLYALIPKSTKNYVPWQIEHSTTLETLITKLNGAEYLQGRKGDKTLIMKVNASYTTGYIRYYNEGEKKPISYVSIVFSKTELKFTELEKLLTTVHKGLLKALDLSMGQNIHVYSPIVSMQNIQKTPQTAKKALASRWLSWLSYLEDPRIRFFYDPQMPALKDLPAVDTGKDNKKHPSNFQHIFYTDGSAITSPTKEGHLNAGMGIVYFINKDGNLQKQQEWSISLGNHTAQFAEIAAFEFALKKCLPLGGNILVVTDSNYVAKAYNEELDVWASNGFVNNRKKPLKHISKWKSVADLKRLRPDVVVTHEPGHQKLDSSPHAYGNNLADQLATQASFKVHAGKRTADGSEFEKRTADGSEFESPKKKAKVE

SEQ ID NO: 720 - protein, 2171 aa, synthetic construct
MPAAKRVKLDGGDKKYSIGLDIGTNSVGWAVITDEYKVPSKKFKVLGNTDRHSIKKNLIGALLFDSGETAEATRLKRTARRRYTRRKNRICYLQEIFSNEMAKVDDSFFHRLEESFLVEEDKKHERHPIFGNIVDEVAYHEKYPTIYHLRKKLVDSTDKADLRLIYLALAHMIKFRGHFLIEGDLNPDNSDVDKLFIQLVQTYNQLFEENPINASGVDAKAILSARLSKSRRLENLIAQLPGEKKNGLFGNLIALSLGLTPNFKSNFDLAEDAKLQLSKDTYDDDLDNLLAQIGDQYADLFLAAKNLSDAILLSDILRVNTEITKAPLSASMIKRYDEHHQDLTLLKALVRQQLPEKYKEIFFDQSKNGYAGYIDGGASQEEFYKFIKPILEKMDGTEELLVKLNREDLLRKQRTFDNGSIPHQIHLGELHAILRRQEDFYPFLKDNREKIEKILTFRIPYYVGPLARGNSRFAWMTRKSEETITPWNFEEVVDKGASAQSFIERMTNFDKNLPNEKVLPKHSLLYEYFTVYNELTKVKYVTEGMRKPAFLSGEQKKAIVDLLFKTNRKVTVKQLKEDYFKKIECFDSVEISGVEDRFNASLGTYHDLLKIIKDKDFLDNEENEDILEDIVLTLTLFEDREMIEERLKTYAHLFDDKVMKQLKRRRYTGWGRLSRKLINGIRDKQSGKTILDFLKSDGFANRNFMQLIHDDSLTFKEDIQKAQVSGQGDSLHEHIANLAGSPAIKKGILQTVKVVDELVKVMGRHKPENIVIEMARENQTTQKGQKNSRERMKRIEEGIKELGSQILKEHPVENTQLQNEKLYLYYLQNGRDMYVDQELDINRLSDYDVDHIVPQSFLKDDSIDNKVLTRSDKARGKSDNVPSEEVVKKMKNYWRQLLNAKLITQRKFDNLTKAERGGLSELDKAGFIKRQLVETRQITKHVAQILDSRMNTKYDENDKLIREVKVITLKSKLVSDFRKDFQFYKVREINNYHHAHDAYLNAVVGTALIKKYPKLESEFVYGDYKVYDVRKMIAKSEQEIGKATAKYFFYSNIMNFFKTEITLANGEIRKRPLIETNGETGEIVWDKGRDFATVRKVLSMPQVNIVKKTEVQTGGFSKESILPKRNSDKLIARKKDWDPKKYGGFDSPTVAYSVLVVAKVEKGKSKKLKSVKELLGITIMERSSFEKNPIDFLEAKGYKEVKKDLIIKLPKYSLFELENGRKRMLASAGELQKGNELALPSKYVNFLYLASHYEKLKGSPEDNEQKQLFVEQHKHYLDEIIEQISEFSKRVILADANLDKVLSAYNKHRDKPIREQAENIIHLFTLTNLGAPAAFKYFDTTIDRKRYTSTKEVLDATLIHQSITGLYETRIDLSQLGGDGGGGGGSSPAPGGMDLLKPLTVERKGVKIKGYWNSQADITCVPKDLLQGEEPVRQQNVTTIHGTQEGDVYYVNLKIDGRRINTEVIGTTLDYAIITPGDVPWILKKPLELTIKLDLEEQQGTLLNNSILSKKGKEELKQLFEKYSALWQSWENQVGHRRIRPHKIATGTVKPTPQKQYHINPKAKPDIQIVINDLLKQGVLIQKESTMNTPVYPVPKPNGRWRMVLDYRAVNKVTPLIAVQNQHSYGILGSLFKGRYKTTIDLSNGFWAHPIVPEDYWITAFTWQGKQYCWTVLPQGFLNSPGLFTGDVVDLLQGIPNVEVYVDDVYISHDSEKEHLEYLDILFNRLKEAGYIISLKKSNIANSIVDFLGFQITNEGRGLTDTFKEKLENITAPTTLKQLQSILGLLNFARNFIPDFTELIAPLYALIPKSTKNYVPWQIEHSTTLETLITKLNGAEYLQGRKGDKTLIMKVNASYTTGYIRYYNEGEKKPISYVSIVFSKTELKFTELEKLLTTVHKGLLKALDLSMGQNIHVYSPIVSMQNIQKTPQTAKKALASRWLSWLSYLEDPRIRFFYDPQMPALKDLPAVDTGKDNKKHPSNFQHIFYTDGSAITSPTKEGHLNAGMGIVYFINKDGNLQKQQEWSISLGNHTAQFAEIAAFEFALKKCLPLGGNILVVTDSNYVAKAYNEELDVWASNGFVNNRKKPLKHISKWKSVADLKRLRPDVVVTHEPGHQKLDSSPHAYGNNLADQLATQASFKVHAGKRTADGSEFEKRTADGSEFESPKKKAKVE

SEQ ID NO: 721 - protein, 2173 aa, synthetic construct
MPAAKRVKLDGGDKKYSIGLDIGTNSVGWAVITDEYKVPSKKFKVLGNTDRHSIKKNLIGALLFDSGETAEATRLKRTARRRYTRRKNRICYLQEIFSNEMAKVDDSFFHRLEESFLVEEDKKHERHPIFGNIVDEVAYHEKYPTIYHLRKKLVDSTDKADLRLIYLALAHMIKFRGHFLIEGDLNPDNSDVDKLFIQLVQTYNQLFEENPINASGVDAKAILSARLSKSRRLENLIAQLPGEKKNGLFGNLIALSLGLTPNFKSNFDLAEDAKLQLSKDTYDDDLDNLLAQIGDQYADLFLAAKNLSDAILLSDILRVNTEITKAPLSASMIKRYDEHHQDLTLLKALVRQQLPEKYKEIFFDQSKNGYAGYIDGGASQEEFYKFIKPILEKMDGTEELLVKLNREDLLRKQRTFDNGSIPHQIHLGELHAILRRQEDFYPFLKDNREKIEKILTFRIPYYVGPLARGNSRFAWMTRKSEETITPWNFEEVVDKGASAQSFIERMTNFDKNLPNEKVLPKHSLLYEYFTVYNELTKVKYVTEGMRKPAFLSGEQKKAIVDLLFKTNRKVTVKQLKEDYFKKIECFDSVEISGVEDRFNASLGTYHDLLKIIKDKDFLDNEENEDILEDIVLTLTLFEDREMIEERLKTYAHLFDDKVMKQLKRRRYTGWGRLSRKLINGIRDKQSGKTILDFLKSDGFANRNFMQLIHDDSLTFKEDIQKAQVSGQGDSLHEHIANLAGSPAIKKGILQTVKVVDELVKVMGRHKPENIVIEMARENQTTQKGQKNSRERMKRIEEGIKELGSQILKEHPVENTQLQNEKLYLYYLQNGRDMYVDQELDINRLSDYDVDHIVPQSFLKDDSIDNKVLTRSDKARGKSDNVPSEEVVKKMKNYWRQLLNAKLITQRKFDNLTKAERGGLSELDKAGFIKRQLVETRQITKHVAQILDSRMNTKYDENDKLIREVKVITLKSKLVSDFRKDFQFYKVREINNYHHAHDAYLNAVVGTALIKKYPKLESEFVYGDYKVYDVRKMIAKSEQEIGKATAKYFFYSNIMNFFKTEITLANGEIRKRPLIETNGETGEIVWDKGRDFATVRKVLSMPQVNIVKKTEVQTGGFSKESILPKRNSDKLIARKKDWDPKKYGGFDSPTVAYSVLVVAKVEKGKSKKLKSVKELLGITIMERSSFEKNPIDFLEAKGYKEVKKDLIIKLPKYSLFELENGRKRMLASAGELQKGNELALPSKYVNFLYLASHYEKLKGSPEDNEQKQLFVEQHKHYLDEIIEQISEFSKRVILADANLDKVLSAYNKHRDKPIREQAENIIHLFTLTNLGAPAAFKYFDTTIDRKRYTSTKEVLDATLIHQSITGLYETRIDLSQLGGDGGEAAAKGSSPAPGGMDLLKPLTVERKGVKIKGYWNSQADITCVPKDLLQGEEPVRQQNVTTIHGTQEGDVYYVNLKIDGRRINTEVIGTTLDYAIITPGDVPWILKKPLELTIKLDLEEQQGTLLNNSILSKKGKEELKQLFEKYSALWQSWENQVGHRRIRPHKIATGTVKPTPQKQYHINPKAKPDIQIVINDLLKQGVLIQKESTMNTPVYPVPKPNGRWRMVLDYRAVNKVTPLIAVQNQHSYGILGSLFKGRYKTTIDLSNGFWAHPIVPEDYWITAFTWQGKQYCWTVLPQGFLNSPGLFTGDVVDLLQGIPNVEVYVDDVYISHDSEKEHLEYLDILFNRLKEAGYIISLKKSNIANSIVDFLGFQITNEGRGLTDTFKEKLENITAPTTLKQLQSILGLLNFARNFIPDFTELIAPLYALIPKSTKNYVPWQIEHSTTLETLITKLNGAEYLQGRKGDKTLIMKVNASYTTGYIRYYNEGEKKPISYVSIVFSKTELKFTELEKLLTTVHKGLLKALDLSMGQNIHVYSPIVSMQNIQKTPQTAKKALASRWLSWLSYLEDPRIRFFYDPQMPALKDLPAVDTGKDNKKHPSNFQHIFYTDGSAITSPTKEGHLNAGMGIVYFINKDGNLQKQQEWSISLGNHTAQFAEIAAFEFALKKCLPLGGNILVVTDSNYVAKAYNEELDVWASNGFVNNRKKPLKHISKWKSVADLKRLRPDVVVTHEPGHQKLDSSPHAYGNNLADQLATQASFKVHAGKRTADGSEFEKRTADGSEFESPKKKAKVE

SEQ ID NO: 722 - protein, 2180 aa, synthetic construct
MPAAKRVKLDGGDKKYSIGLDIGTNSVGWAVITDEYKVPSKKFKVLGNTDRHSIKKNLIGALLFDSGETAEATRLKRTARRRYTRRKNRICYLQEIFSNEMAKVDDSFFHRLEESFLVEEDKKHERHPIFGNIVDEVAYHEKYPTIYHLRKKLVDSTDKADLRLIYLALAHMIKFRGHFLIEGDLNPDNSDVDKLFIQLVQTYNQLFEENPINASGVDAKAILSARLSKSRRLENLIAQLPGEKKNGLFGNLIALSLGLTPNFKSNFDLAEDAKLQLSKDTYDDDLDNLLAQIGDQYADLFLAAKNLSDAILLSDILRVNTEITKAPLSASMIKRYDEHHQDLTLLKALVRQQLPEKYKEIFFDQSKNGYAGYIDGGASQEEFYKFIKPILEKMDGTEELLVKLNREDLLRKQRTFDNGSIPHQIHLGELHAILRRQEDFYPFLKDNREKIEKILTFRIPYYVGPLARGNSRFAWMTRKSEETITPWNFEEVVDKGASAQSFIERMTNFDKNLPNEKVLPKHSLLYEYFTVYNELTKVKYVTEGMRKPAFLSGEQKKAIVDLLFKTNRKVTVKQLKEDYFKKIECFDSVEISGVEDRFNASLGTYHDLLKIIKDKDFLDNEENEDILEDIVLTLTLFEDREMIEERLKTYAHLFDDKVMKQLKRRRYTGWGRLSRKLINGIRDKQSGKTILDFLKSDGFANRNFMQLIHDDSLTFKEDIQKAQVSGQGDSLHEHIANLAGSPAIKKGILQTVKVVDELVKVMGRHKPENIVIEMARENQTTQKGQKNSRERMKRIEEGIKELGSQILKEHPVENTQLQNEKLYLYYLQNGRDMYVDQELDINRLSDYDVDHIVPQSFLKDDSIDNKVLTRSDKARGKSDNVPSEEVVKKMKNYWRQLLNAKLITQRKFDNLTKAERGGLSELDKAGFIKRQLVETRQITKHVAQILDSRMNTKYDENDKLIREVKVITLKSKLVSDFRKDFQFYKVREINNYHHAHDAYLNAVVGTALIKKYPKLESEFVYGDYKVYDVRKMIAKSEQEIGKATAKYFFYSNIMNFFKTEITLANGEIRKRPLIETNGETGEIVWDKGRDFATVRKVLSMPQVNIVKKTEVQTGGFSKESILPKRNSDKLIARKKDWDPKKYGGFDSPTVAYSVLVVAKVEKGKSKKLKSVKELLGITIMERSSFEKNPIDFLEAKGYKEVKKDLIIKLPKYSLFELENGRKRMLASAGELQKGNELALPSKYVNFLYLASHYEKLKGSPEDNEQKQLFVEQHKHYLDEIIEQISEFSKRVILADANLDKVLSAYNKHRDKPIREQAENIIHLFTLTNLGAPAAFKYFDTTIDRKRYTSTKEVLDATLIHQSITGLYETRIDLSQLGGDGGGSSGSSGSSGSSGSSGSSGGMDLLKPLTVERKGVKIKGYWNSQADITCVPKDLLQGEEPVRQQNVTTIHGTQEGDVYYVNLKIDGRRINTEVIGTTLDYAIITPGDVPWILKKPLELTIKLDLEEQQGTLLNNSILSKKGKEELKQLFEKYSALWQSWENQVGHRRIRPHKIATGTVKPTPQKQYHINPKAKPDIQIVINDLLKQGVLIQKESTMNTPVYPVPKPNGRWRMVLDYRAVNKVTPLIAVQNQHSYGILGSLFKGRYKTTIDLSNGFWAHPIVPEDYWITAFTWQGKQYCWTVLPQGFLNSPGLFTGDVVDLLQGIPNVEVYVDDVYISHDSEKEHLEYLDILFNRLKEAGYIISLKKSNIANSIVDFLGFQITNEGRGLTDTFKEKLENITAPTTLKQLQSILGLLNFARNFIPDFTELIAPLYALIPKSTKNYVPWQIEHSTTLETLITKLNGAEYLQGRKGDKTLIMKVNASYTTGYIRYYNEGEKKPISYVSIVFSKTELKFTELEKLLTTVHKGLLKALDLSMGQNIHVYSPIVSMQNIQKTPQTAKKALASRWLSWLSYLEDPRIRFFYDPQMPALKDLPAVDTGKDNKKHPSNFQHIFYTDGSAITSPTKEGHLNAGMGIVYFINKDGNLQKQQEWSISLGNHTAQFAEIAAFEFALKKCLPLGGNILVVTDSNYVAKAYNEELDVWASNGFVNNRKKPLKHISKWKSVADLKRLRPDVVVTHEPGHQKLDSSPHAYGNNLADQLATQASFKVHAGKRTADGSEFEKRTADGSEFESPKKKAKVE

SEQ ID NO: 723 - protein, 2171 aa, synthetic construct
MPAAKRVKLDGGDKKYSIGLDIGTNSVGWAVITDEYKVPSKKFKVLGNTDRHSIKKNLIGALLFDSGETAEATRLKRTARRRYTRRKNRICYLQEIFSNEMAKVDDSFFHRLEESFLVEEDKKHERHPIFGNIVDEVAYHEKYPTIYHLRKKLVDSTDKADLRLIYLALAHMIKFRGHFLIEGDLNPDNSDVDKLFIQLVQTYNQLFEENPINASGVDAKAILSARLSKSRRLENLIAQLPGEKKNGLFGNLIALSLGLTPNFKSNFDLAEDAKLQLSKDTYDDDLDNLLAQIGDQYADLFLAAKNLSDAILLSDILRVNTEITKAPLSASMIKRYDEHHQDLTLLKALVRQQLPEKYKEIFFDQSKNGYAGYIDGGASQEEFYKFIKPILEKMDGTEELLVKLNREDLLRKQRTFDNGSIPHQIHLGELHAILRRQEDFYPFLKDNREKIEKILTFRIPYYVGPLARGNSRFAWMTRKSEETITPWNFEEVVDKGASAQSFIERMTNFDKNLPNEKVLPKHSLLYEYFTVYNELTKVKYVTEGMRKPAFLSGEQKKAIVDLLFKTNRKVTVKQLKEDYFKKIECFDSVEISGVEDRFNASLGTYHDLLKIIKDKDFLDNEENEDILEDIVLTLTLFEDREMIEERLKTYAHLFDDKVMKQLKRRRYTGWGRLSRKLINGIRDKQSGKTILDFLKSDGFANRNFMQLIHDDSLTFKEDIQKAQVSGQGDSLHEHIANLAGSPAIKKGILQTVKVVDELVKVMGRHKPENIVIEMARENQTTQKGQKNSRERMKRIEEGIKELGSQILKEHPVENTQLQNEKLYLYYLQNGRDMYVDQELDINRLSDYDVDHIVPQSFLKDDSIDNKVLTRSDKARGKSDNVPSEEVVKKMKNYWRQLLNAKLITQRKFDNLTKAERGGLSELDKAGFIKRQLVETRQITKHVAQILDSRMNTKYDENDKLIREVKVITLKSKLVSDFRKDFQFYKVREINNYHHAHDAYLNAVVGTALIKKYPKLESEFVYGDYKVYDVRKMIAKSEQEIGKATAKYFFYSNIMNFFKTEITLANGEIRKRPLIETNGETGEIVWDKGRDFATVRKVLSMPQVNIVKKTEVQTGGFSKESILPKRNSDKLIARKKDWDPKKYGGFDSPTVAYSVLVVAKVEKGKSKKLKSVKELLGITIMERSSFEKNPIDFLEAKGYKEVKKDLIIKLPKYSLFELENGRKRMLASAGELQKGNELALPSKYVNFLYLASHYEKLKGSPEDNEQKQLFVEQHKHYLDEIIEQISEFSKRVILADANLDKVLSAYNKHRDKPIREQAENIIHLFTLTNLGAPAAFKYFDTTIDRKRYTSTKEVLDATLIHQSITGLYETRIDLSQLGGDGGPAPAPAPAPGGMDLLKPLTVERKGVKIKGYWNSQADITCVPKDLLQGEEPVRQQNVTTIHGTQEGDVYYVNLKIDGRRINTEVIGTTLDYAIITPGDVPWILKKPLELTIKLDLEEQQGTLLNNSILSKKGKEELKQLFEKYSALWQSWENQVGHRRIRPHKIATGTVKPTPQKQYHINPKAKPDIQIVINDLLKQGVLIQKESTMNTPVYPVPKPNGRWRMVLDYRAVNKVTPLIAVQNQHSYGILGSLFKGRYKTTIDLSNGFWAHPIVPEDYWITAFTWQGKQYCWTVLPQGFLNSPGLFTGDVVDLLQGIPNVEVYVDDVYISHDSEKEHLEYLDILFNRLKEAGYIISLKKSNIANSIVDFLGFQITNEGRGLTDTFKEKLENITAPTTLKQLQSILGLLNFARNFIPDFTELIAPLYALIPKSTKNYVPWQIEHSTTLETLITKLNGAEYLQGRKGDKTLIMKVNASYTTGYIRYYNEGEKKPISYVSIVFSKTELKFTELEKLLTTVHKGLLKALDLSMGQNIHVYSPIVSMQNIQKTPQTAKKALASRWLSWLSYLEDPRIRFFYDPQMPALKDLPAVDTGKDNKKHPSNFQHIFYTDGSAITSPTKEGHLNAGMGIVYFINKDGNLQKQQEWSISLGNHTAQFAEIAAFEFALKKCLPLGGNILVVTDSNYVAKAYNEELDVWASNGFVNNRKKPLKHISKWKSVADLKRLRPDVVVTHEPGHQKLDSSPHAYGNNLADQLATQASFKVHAGKRTADGSEFEKRTADGSEFESPKKKAKVE

SEQ ID NO: 724 - protein, 2170 aa, synthetic construct
MPAAKRVKLDGGDKKYSIGLDIGTNSVGWAVITDEYKVPSKKFKVLGNTDRHSIKKNLIGALLFDSGETAEATRLKRTARRRYTRRKNRICYLQEIFSNEMAKVDDSFFHRLEESFLVEEDKKHERHPIFGNIVDEVAYHEKYPTIYHLRKKLVDSTDKADLRLIYLALAHMIKFRGHFLIEGDLNPDNSDVDKLFIQLVQTYNQLFEENPINASGVDAKAILSARLSKSRRLENLIAQLPGEKKNGLFGNLIALSLGLTPNFKSNFDLAEDAKLQLSKDTYDDDLDNLLAQIGDQYADLFLAAKNLSDAILLSDILRVNTEITKAPLSASMIKRYDEHHQDLTLLKALVRQQLPEKYKEIFFDQSKNGYAGYIDGGASQEEFYKFIKPILEKMDGTEELLVKLNREDLLRKQRTFDNGSIPHQIHLGELHAILRRQEDFYPFLKDNREKIEKILTFRIPYYVGPLARGNSRFAWMTRKSEETITPWNFEEVVDKGASAQSFIERMTNFDKNLPNEKVLPKHSLLYEYFTVYNELTKVKYVTEGMRKPAFLSGEQKKAIVDLLFKTNRKVTVKQLKEDYFKKIECFDSVEISGVEDRFNASLGTYHDLLKIIKDKDFLDNEENEDILEDIVLTLTLFEDREMIEERLKTYAHLFDDKVMKQLKRRRYTGWGRLSRKLINGIRDKQSGKTILDFLKSDGFANRNFMQLIHDDSLTFKEDIQKAQVSGQGDSLHEHIANLAGSPAIKKGILQTVKVVDELVKVMGRHKPENIVIEMARENQTTQKGQKNSRERMKRIEEGIKELGSQILKEHPVENTQLQNEKLYLYYLQNGRDMYVDQELDINRLSDYDVDHIVPQSFLKDDSIDNKVLTRSDKARGKSDNVPSEEVVKKMKNYWRQLLNAKLITQRKFDNLTKAERGGLSELDKAGFIKRQLVETRQITKHVAQILDSRMNTKYDENDKLIREVKVITLKSKLVSDFRKDFQFYKVREINNYHHAHDAYLNAVVGTALIKKYPKLESEFVYGDYKVYDVRKMIAKSEQEIGKATAKYFFYSNIMNFFKTEITLANGEIRKRPLIETNGETGEIVWDKGRDFATVRKVLSMPQVNIVKKTEVQTGGFSKESILPKRNSDKLIARKKDWDPKKYGGFDSPTVAYSVLVVAKVEKGKSKKLKSVKELLGITIMERSSFEKNPIDFLEAKGYKEVKKDLIIKLPKYSLFELENGRKRMLASAGELQKGNELALPSKYVNFLYLASHYEKLKGSPEDNEQKQLFVEQHKHYLDEIIEQISEFSKRVILADANLDKVLSAYNKHRDKPIREQAENIIHLFTLTNLGAPAAFKYFDTTIDRKRYTSTKEVLDATLIHQSITGLYETRIDLSQLGGDGGGSSEAAAKGGMDLLKPLTVERKGVKIKGYWNSQADITCVPKDLLQGEEPVRQQNVTTIHGTQEGDVYYVNLKIDGRRINTEVIGTTLDYAIITPGDVPWILKKPLELTIKLDLEEQQGTLLNNSILSKKGKEELKQLFEKYSALWQSWENQVGHRRIRPHKIATGTVKPTPQKQYHINPKAKPDIQIVINDLLKQGVLIQKESTMNTPVYPVPKPNGRWRMVLDYRAVNKVTPLIAVQNQHSYGILGSLFKGRYKTTIDLSNGFWAHPIVPEDYWITAFTWQGKQYCWTVLPQGFLNSPGLFTGDVVDLLQGIPNVEVYVDDVYISHDSEKEHLEYLDILFNRLKEAGYIISLKKSNIANSIVDFLGFQITNEGRGLTDTFKEKLENITAPTTLKQLQSILGLLNFARNFIPDFTELIAPLYALIPKSTKNYVPWQIEHSTTLETLITKLNGAEYLQGRKGDKTLIMKVNASYTTGYIRYYNEGEKKPISYVSIVFSKTELKFTELEKLLTTVHKGLLKALDLSMGQNIHVYSPIVSMQNIQKTPQTAKKALASRWLSWLSYLEDPRIRFFYDPQMPALKDLPAVDTGKDNKKHPSNFQHIFYTDGSAITSPTKEGHLNAGMGIVYFINKDGNLQKQQEWSISLGNHTAQFAEIAAFEFALKKCLPLGGNILVVTDSNYVAKAYNEELDVWASNGFVNNRKKPLKHISKWKSVADLKRLRPDVVVTHEPGHQKLDSSPHAYGNNLADQLATQASFKVHAGKRTADGSEFEKRTADGSEFESPKKKAKVE

SEQ ID NO: 725 - protein, 2165 aa, synthetic construct
MPAAKRVKLDGGDKKYSIGLDIGTNSVGWAVITDEYKVPSKKFKVLGNTDRHSIKKNLIGALLFDSGETAEATRLKRTARRRYTRRKNRICYLQEIFSNEMAKVDDSFFHRLEESFLVEEDKKHERHPIFGNIVDEVAYHEKYPTIYHLRKKLVDSTDKADLRLIYLALAHMIKFRGHFLIEGDLNPDNSDVDKLFIQLVQTYNQLFEENPINASGVDAKAILSARLSKSRRLENLIAQLPGEKKNGLFGNLIALSLGLTPNFKSNFDLAEDAKLQLSKDTYDDDLDNLLAQIGDQYADLFLAAKNLSDAILLSDILRVNTEITKAPLSASMIKRYDEHHQDLTLLKALVRQQLPEKYKEIFFDQSKNGYAGYIDGGASQEEFYKFIKPILEKMDGTEELLVKLNREDLLRKQRTFDNGSIPHQIHLGELHAILRRQEDFYPFLKDNREKIEKILTFRIPYYVGPLARGNSRFAWMTRKSEETITPWNFEEVVDKGASAQSFIERMTNFDKNLPNEKVLPKHSLLYEYFTVYNELTKVKYVTEGMRKPAFLSGEQKKAIVDLLFKTNRKVTVKQLKEDYFKKIECFDSVEISGVEDRFNASLGTYHDLLKIIKDKDFLDNEENEDILEDIVLTLTLFEDREMIEERLKTYAHLFDDKVMKQLKRRRYTGWGRLSRKLINGIRDKQSGKTILDFLKSDGFANRNFMQLIHDDSLTFKEDIQKAQVSGQGDSLHEHIANLAGSPAIKKGILQTVKVVDELVKVMGRHKPENIVIEMARENQTTQKGQKNSRERMKRIEEGIKELGSQILKEHPVENTQLQNEKLYLYYLQNGRDMYVDQELDINRLSDYDVDHIVPQSFLKDDSIDNKVLTRSDKARGKSDNVPSEEVVKKMKNYWRQLLNAKLITQRKFDNLTKAERGGLSELDKAGFIKRQLVETRQITKHVAQILDSRMNTKYDENDKLIREVKVITLKSKLVSDFRKDFQFYKVREINNYHHAHDAYLNAVVGTALIKKYPKLESEFVYGDYKVYDVRKMIAKSEQEIGKATAKYFFYSNIMNFFKTEITLANGEIRKRPLIETNGETGEIVWDKGRDFATVRKVLSMPQVNIVKKTEVQTGGFSKESILPKRNSDKLIARKKDWDPKKYGGFDSPTVAYSVLVVAKVEKGKSKKLKSVKELLGITIMERSSFEKNPIDFLEAKGYKEVKKDLIIKLPKYSLFELENGRKRMLASAGELQKGNELALPSKYVNFLYLASHYEKLKGSPEDNEQKQLFVEQHKHYLDEIIEQISEFSKRVILADANLDKVLSAYNKHRDKPIREQAENIIHLFTLTNLGAPAAFKYFDTTIDRKRYTSTKEVLDATLIHQSITGLYETRIDLSQLGGDGGGSSGGMDLLKPLTVERKGVKIKGYWNSQADITCVPKDLLQGEEPVRQQNVTTIHGTQEGDVYYVNLKIDGRRINTEVIGTTLDYAIITPGDVPWILKKPLELTIKLDLEEQQGTLLNNSILSKKGKEELKQLFEKYSALWQSWENQVGHRRIRPHKIATGTVKPTPQKQYHINPKAKPDIQIVINDLLKQGVLIQKESTMNTPVYPVPKPNGRWRMVLDYRAVNKVTPLIAVQNQHSYGILGSLFKGRYKTTIDLSNGFWAHPIVPEDYWITAFTWQGKQYCWTVLPQGFLNSPGLFTGDVVDLLQGIPNVEVYVDDVYISHDSEKEHLEYLDILFNRLKEAGYIISLKKSNIANSIVDFLGFQITNEGRGLTDTFKEKLENITAPTTLKQLQSILGLLNFARNFIPDFTELIAPLYALIPKSTKNYVPWQIEHSTTLETLITKLNGAEYLQGRKGDKTLIMKVNASYTTGYIRYYNEGEKKPISYVSIVFSKTELKFTELEKLLTTVHKGLLKALDLSMGQNIHVYSPIVSMQNIQKTPQTAKKALASRWLSWLSYLEDPRIRFFYDPQMPALKDLPAVDTGKDNKKHPSNFQHIFYTDGSAITSPTKEGHLNAGMGIVYFINKDGNLQKQQEWSISLGNHTAQFAEIAAFEFALKKCLPLGGNILVVTDSNYVAKAYNEELDVWASNGFVNNRKKPLKHISKWKSVADLKRLRPDVVVTHEPGHQKLDSSPHAYGNNLADQLATQASFKVHAGKRTADGSEFEKRTADGSEFESPKKKAKVE

SEQ ID NO: 726 - protein, 2173 aa, synthetic construct
MPAAKRVKLDGGDKKYSIGLDIGTNSVGWAVITDEYKVPSKKFKVLGNTDRHSIKKNLIGALLFDSGETAEATRLKRTARRRYTRRKNRICYLQEIFSNEMAKVDDSFFHRLEESFLVEEDKKHERHPIFGNIVDEVAYHEKYPTIYHLRKKLVDSTDKADLRLIYLALAHMIKFRGHFLIEGDLNPDNSDVDKLFIQLVQTYNQLFEENPINASGVDAKAILSARLSKSRRLENLIAQLPGEKKNGLFGNLIALSLGLTPNFKSNFDLAEDAKLQLSKDTYDDDLDNLLAQIGDQYADLFLAAKNLSDAILLSDILRVNTEITKAPLSASMIKRYDEHHQDLTLLKALVRQQLPEKYKEIFFDQSKNGYAGYIDGGASQEEFYKFIKPILEKMDGTEELLVKLNREDLLRKQRTFDNGSIPHQIHLGELHAILRRQEDFYPFLKDNREKIEKILTFRIPYYVGPLARGNSRFAWMTRKSEETITPWNFEEVVDKGASAQSFIERMTNFDKNLPNEKVLPKHSLLYEYFTVYNELTKVKYVTEGMRKPAFLSGEQKKAIVDLLFKTNRKVTVKQLKEDYFKKIECFDSVEISGVEDRFNASLGTYHDLLKIIKDKDFLDNEENEDILEDIVLTLTLFEDREMIEERLKTYAHLFDDKVMKQLKRRRYTGWGRLSRKLINGIRDKQSGKTILDFLKSDGFANRNFMQLIHDDSLTFKEDIQKAQVSGQGDSLHEHIANLAGSPAIKKGILQTVKVVDELVKVMGRHKPENIVIEMARENQTTQKGQKNSRERMKRIEEGIKELGSQILKEHPVENTQLQNEKLYLYYLQNGRDMYVDQELDINRLSDYDVDHIVPQSFLKDDSIDNKVLTRSDKARGKSDNVPSEEVVKKMKNYWRQLLNAKLITQRKFDNLTKAERGGLSELDKAGFIKRQLVETRQITKHVAQILDSRMNTKYDENDKLIREVKVITLKSKLVSDFRKDFQFYKVREINNYHHAHDAYLNAVVGTALIKKYPKLESEFVYGDYKVYDVRKMIAKSEQEIGKATAKYFFYSNIMNFFKTEITLANGEIRKRPLIETNGETGEIVWDKGRDFATVRKVLSMPQVNIVKKTEVQTGGFSKESILPKRNSDKLIARKKDWDPKKYGGFDSPTVAYSVLVVAKVEKGKSKKLKSVKELLGITIMERSSFEKNPIDFLEAKGYKEVKKDLIIKLPKYSLFELENGRKRMLASAGELQKGNELALPSKYVNFLYLASHYEKLKGSPEDNEQKQLFVEQHKHYLDEIIEQISEFSKRVILADANLDKVLSAYNKHRDKPIREQAENIIHLFTLTNLGAPAAFKYFDTTIDRKRYTSTKEVLDATLIHQSITGLYETRIDLSQLGGDGGEAAAKGGSGGGGGMDLLKPLTVERKGVKIKGYWNSQADITCVPKDLLQGEEPVRQQNVTTIHGTQEGDVYYVNLKIDGRRINTEVIGTTLDYAIITPGDVPWILKKPLELTIKLDLEEQQGTLLNNSILSKKGKEELKQLFEKYSALWQSWENQVGHRRIRPHKIATGTVKPTPQKQYHINPKAKPDIQIVINDLLKQGVLIQKESTMNTPVYPVPKPNGRWRMVLDYRAVNKVTPLIAVQNQHSYGILGSLFKGRYKTTIDLSNGFWAHPIVPEDYWITAFTWQGKQYCWTVLPQGFLNSPGLFTGDVVDLLQGIPNVEVYVDDVYISHDSEKEHLEYLDILFNRLKEAGYIISLKKSNIANSIVDFLGFQITNEGRGLTDTFKEKLENITAPTTLKQLQSILGLLNFARNFIPDFTELIAPLYALIPKSTKNYVPWQIEHSTTLETLITKLNGAEYLQGRKGDKTLIMKVNASYTTGYIRYYNEGEKKPISYVSIVFSKTELKFTELEKLLTTVHKGLLKALDLSMGQNIHVYSPIVSMQNIQKTPQTAKKALASRWLSWLSYLEDPRIRFFYDPQMPALKDLPAVDTGKDNKKHPSNFQHIFYTDGSAITSPTKEGHLNAGMGIVYFINKDGNLQKQQEWSISLGNHTAQFAEIAAFEFALKKCLPLGGNILVVTDSNYVAKAYNEELDVWASNGFVNNRKKPLKHISKWKSVADLKRLRPDVVVTHEPGHQKLDSSPHAYGNNLADQLATQASFKVHAGKRTADGSEFEKRTADGSEFESPKKKAKVE

SEQ ID NO: 727 - protein, 2173 aa, synthetic construct
MPAAKRVKLDGGDKKYSIGLDIGTNSVGWAVITDEYKVPSKKFKVLGNTDRHSIKKNLIGALLFDSGETAEATRLKRTARRRYTRRKNRICYLQEIFSNEMAKVDDSFFHRLEESFLVEEDKKHERHPIFGNIVDEVAYHEKYPTIYHLRKKLVDSTDKADLRLIYLALAHMIKFRGHFLIEGDLNPDNSDVDKLFIQLVQTYNQLFEENPINASGVDAKAILSARLSKSRRLENLIAQLPGEKKNGLFGNLIALSLGLTPNFKSNFDLAEDAKLQLSKDTYDDDLDNLLAQIGDQYADLFLAAKNLSDAILLSDILRVNTEITKAPLSASMIKRYDEHHQDLTLLKALVRQQLPEKYKEIFFDQSKNGYAGYIDGGASQEEFYKFIKPILEKMDGTEELLVKLNREDLLRKQRTFDNGSIPHQIHLGELHAILRRQEDFYPFLKDNREKIEKILTFRIPYYVGPLARGNSRFAWMTRKSEETITPWNFEEVVDKGASAQSFIERMTNFDKNLPNEKVLPKHSLLYEYFTVYNELTKVKYVTEGMRKPAFLSGEQKKAIVDLLFKTNRKVTVKQLKEDYFKKIECFDSVEISGVEDRFNASLGTYHDLLKIIKDKDFLDNEENEDILEDIVLTLTLFEDREMIEERLKTYAHLFDDKVMKQLKRRRYTGWGRLSRKLINGIRDKQSGKTILDFLKSDGFANRNFMQLIHDDSLTFKEDIQKAQVSGQGDSLHEHIANLAGSPAIKKGILQTVKVVDELVKVMGRHKPENIVIEMARENQTTQKGQKNSRERMKRIEEGIKELGSQILKEHPVENTQLQNEKLYLYYLQNGRDMYVDQELDINRLSDYDVDHIVPQSFLKDDSIDNKVLTRSDKARGKSDNVPSEEVVKKMKNYWRQLLNAKLITQRKFDNLTKAERGGLSELDKAGFIKRQLVETRQITKHVAQILDSRMNTKYDENDKLIREVKVITLKSKLVSDFRKDFQFYKVREINNYHHAHDAYLNAVVGTALIKKYPKLESEFVYGDYKVYDVRKMIAKSEQEIGKATAKYFFYSNIMNFFKTEITLANGEIRKRPLIETNGETGEIVWDKGRDFATVRKVLSMPQVNIVKKTEVQTGGFSKESILPKRNSDKLIARKKDWDPKKYGGFDSPTVAYSVLVVAKVEKGKSKKLKSVKELLGITIMERSSFEKNPIDFLEAKGYKEVKKDLIIKLPKYSLFELENGRKRMLASAGELQKGNELALPSKYVNFLYLASHYEKLKGSPEDNEQKQLFVEQHKHYLDEIIEQISEFSKRVILADANLDKVLSAYNKHRDKPIREQAENIIHLFTLTNLGAPAAFKYFDTTIDRKRYTSTKEVLDATLIHQSITGLYETRIDLSQLGGDGGGSSEAAAKPAPGGMDLLKPLTVERKGVKIKGYWNSQADITCVPKDLLQGEEPVRQQNVTTIHGTQEGDVYYVNLKIDGRRINTEVIGTTLDYAIITPGDVPWILKKPLELTIKLDLEEQQGTLLNNSILSKKGKEELKQLFEKYSALWQSWENQVGHRRIRPHKIATGTVKPTPQKQYHINPKAKPDIQIVINDLLKQGVLIQKESTMNTPVYPVPKPNGRWRMVLDYRAVNKVTPLIAVQNQHSYGILGSLFKGRYKTTIDLSNGFWAHPIVPEDYWITAFTWQGKQYCWTVLPQGFLNSPGLFTGDVVDLLQGIPNVEVYVDDVYISHDSEKEHLEYLDILFNRLKEAGYIISLKKSNIANSIVDFLGFQITNEGRGLTDTFKEKLENITAPTTLKQLQSILGLLNFARNFIPDFTELIAPLYALIPKSTKNYVPWQIEHSTTLETLITKLNGAEYLQGRKGDKTLIMKVNASYTTGYIRYYNEGEKKPISYVSIVFSKTELKFTELEKLLTTVHKGLLKALDLSMGQNIHVYSPIVSMQNIQKTPQTAKKALASRWLSWLSYLEDPRIRFFYDPQMPALKDLPAVDTGKDNKKHPSNFQHIFYTDGSAITSPTKEGHLNAGMGIVYFINKDGNLQKQQEWSISLGNHTAQFAEIAAFEFALKKCLPLGGNILVVTDSNYVAKAYNEELDVWASNGFVNNRKKPLKHISKWKSVADLKRLRPDVVVTHEPGHQKLDSSPHAYGNNLADQLATQASFKVHAGKRTADGSEFEKRTADGSEFESPKKKAKVE

SEQ ID NO: 728 - protein, 2173 aa, synthetic construct
MPAAKRVKLDGGDKKYSIGLDIGTNSVGWAVITDEYKVPSKKFKVLGNTDRHSIKKNLIGALLFDSGETAEATRLKRTARRRYTRRKNRICYLQEIFSNEMAKVDDSFFHRLEESFLVEEDKKHERHPIFGNIVDEVAYHEKYPTIYHLRKKLVDSTDKADLRLIYLALAHMIKFRGHFLIEGDLNPDNSDVDKLFIQLVQTYNQLFEENPINASGVDAKAILSARLSKSRRLENLIAQLPGEKKNGLFGNLIALSLGLTPNFKSNFDLAEDAKLQLSKDTYDDDLDNLLAQIGDQYADLFLAAKNLSDAILLSDILRVNTEITKAPLSASMIKRYDEHHQDLTLLKALVRQQLPEKYKEIFFDQSKNGYAGYIDGGASQEEFYKFIKPILEKMDGTEELLVKLNREDLLRKQRTFDNGSIPHQIHLGELHAILRRQEDFYPFLKDNREKIEKILTFRIPYYVGPLARGNSRFAWMTRKSEETITPWNFEEVVDKGASAQSFIERMTNFDKNLPNEKVLPKHSLLYEYFTVYNELTKVKYVTEGMRKPAFLSGEQKKAIVDLLFKTNRKVTVKQLKEDYFKKIECFDSVEISGVEDRFNASLGTYHDLLKIIKDKDFLDNEENEDILEDIVLTLTLFEDREMIEERLKTYAHLFDDKVMKQLKRRRYTGWGRLSRKLINGIRDKQSGKTILDFLKSDGFANRNFMQLIHDDSLTFKEDIQKAQVSGQGDSLHEHIANLAGSPAIKKGILQTVKVVDELVKVMGRHKPENIVIEMARENQTTQKGQKNSRERMKRIEEGIKELGSQILKEHPVENTQLQNEKLYLYYLQNGRDMYVDQELDINRLSDYDVDHIVPQSFLKDDSIDNKVLTRSDKARGKSDNVPSEEVVKKMKNYWRQLLNAKLITQRKFDNLTKAERGGLSELDKAGFIKRQLVETRQITKHVAQILDSRMNTKYDENDKLIREVKVITLKSKLVSDFRKDFQFYKVREINNYHHAHDAYLNAVVGTALIKKYPKLESEFVYGDYKVYDVRKMIAKSEQEIGKATAKYFFYSNIMNFFKTEITLANGEIRKRPLIETNGETGEIVWDKGRDFATVRKVLSMPQVNIVKKTEVQTGGFSKESILPKRNSDKLIARKKDWDPKKYGGFDSPTVAYSVLVVAKVEKGKSKKLKSVKELLGITIMERSSFEKNPIDFLEAKGYKEVKKDLIIKLPKYSLFELENGRKRMLASAGELQKGNELALPSKYVNFLYLASHYEKLKGSPEDNEQKQLFVEQHKHYLDEIIEQISEFSKRVILADANLDKVLSAYNKHRDKPIREQAENIIHLFTLTNLGAPAAFKYFDTTIDRKRYTSTKEVLDATLIHQSITGLYETRIDLSQLGGDGGGSSGGGEAAAKGGMDLLKPLTVERKGVKIKGYWNSQADITCVPKDLLQGEEPVRQQNVTTIHGTQEGDVYYVNLKIDGRRINTEVIGTTLDYAIITPGDVPWILKKPLELTIKLDLEEQQGTLLNNSILSKKGKEELKQLFEKYSALWQSWENQVGHRRIRPHKIATGTVKPTPQKQYHINPKAKPDIQIVINDLLKQGVLIQKESTMNTPVYPVPKPNGRWRMVLDYRAVNKVTPLIAVQNQHSYGILGSLFKGRYKTTIDLSNGFWAHPIVPEDYWITAFTWQGKQYCWTVLPQGFLNSPGLFTGDVVDLLQGIPNVEVYVDDVYISHDSEKEHLEYLDILFNRLKEAGYIISLKKSNIANSIVDFLGFQITNEGRGLTDTFKEKLENITAPTTLKQLQSILGLLNFARNFIPDFTELIAPLYALIPKSTKNYVPWQIEHSTTLETLITKLNGAEYLQGRKGDKTLIMKVNASYTTGYIRYYNEGEKKPISYVSIVFSKTELKFTELEKLLTTVHKGLLKALDLSMGQNIHVYSPIVSMQNIQKTPQTAKKALASRWLSWLSYLEDPRIRFFYDPQMPALKDLPAVDTGKDNKKHPSNFQHIFYTDGSAITSPTKEGHLNAGMGIVYFINKDGNLQKQQEWSISLGNHTAQFAEIAAFEFALKKCLPLGGNILVVTDSNYVAKAYNEELDVWASNGFVNNRKKPLKHISKWKSVADLKRLRPDVVVTHEPGHQKLDSSPHAYGNNLADQLATQASFKVHAGKRTADGSEFEKRTADGSEFESPKKKAKVE

SEQ ID NO: 729 - protein, 2171 aa, synthetic construct
MPAAKRVKLDGGDKKYSIGLDIGTNSVGWAVITDEYKVPSKKFKVLGNTDRHSIKKNLIGALLFDSGETAEATRLKRTARRRYTRRKNRICYLQEIFSNEMAKVDDSFFHRLEESFLVEEDKKHERHPIFGNIVDEVAYHEKYPTIYHLRKKLVDSTDKADLRLIYLALAHMIKFRGHFLIEGDLNPDNSDVDKLFIQLVQTYNQLFEENPINASGVDAKAILSARLSKSRRLENLIAQLPGEKKNGLFGNLIALSLGLTPNFKSNFDLAEDAKLQLSKDTYDDDLDNLLAQIGDQYADLFLAAKNLSDAILLSDILRVNTEITKAPLSASMIKRYDEHHQDLTLLKALVRQQLPEKYKEIFFDQSKNGYAGYIDGGASQEEFYKFIKPILEKMDGTEELLVKLNREDLLRKQRTFDNGSIPHQIHLGELHAILRRQEDFYPFLKDNREKIEKILTFRIPYYVGPLARGNSRFAWMTRKSEETITPWNFEEVVDKGASAQSFIERMTNFDKNLPNEKVLPKHSLLYEYFTVYNELTKVKYVTEGMRKPAFLSGEQKKAIVDLLFKTNRKVTVKQLKEDYFKKIECFDSVEISGVEDRFNASLGTYHDLLKIIKDKDFLDNEENEDILEDIVLTLTLFEDREMIEERLKTYAHLFDDKVMKQLKRRRYTGWGRLSRKLINGIRDKQSGKTILDFLKSDGFANRNFMQLIHDDSLTFKEDIQKAQVSGQGDSLHEHIANLAGSPAIKKGILQTVKVVDELVKVMGRHKPENIVIEMARENQTTQKGQKNSRERMKRIEEGIKELGSQILKEHPVENTQLQNEKLYLYYLQNGRDMYVDQELDINRLSDYDVDHIVPQSFLKDDSIDNKVLTRSDKARGKSDNVPSEEVVKKMKNYWRQLLNAKLITQRKFDNLTKAERGGLSELDKAGFIKRQLVETRQITKHVAQILDSRMNTKYDENDKLIREVKVITLKSKLVSDFRKDFQFYKVREINNYHHAHDAYLNAVVGTALIKKYPKLESEFVYGDYKVYDVRKMIAKSEQEIGKATAKYFFYSNIMNFFKTEITLANGEIRKRPLIETNGETGEIVWDKGRDFATVRKVLSMPQVNIVKKTEVQTGGFSKESILPKRNSDKLIARKKDWDPKKYGGFDSPTVAYSVLVVAKVEKGKSKKLKSVKELLGITIMERSSFEKNPIDFLEAKGYKEVKKDLIIKLPKYSLFELENGRKRMLASAGELQKGNELALPSKYVNFLYLASHYEKLKGSPEDNEQKQLFVEQHKHYLDEIIEQISEFSKRVILADANLDKVLSAYNKHRDKPIREQAENIIHLFTLTNLGAPAAFKYFDTTIDRKRYTSTKEVLDATLIHQSITGLYETRIDLSQLGGDGGGGSGSSGGGGGMDLLKPLTVERKGVKIKGYWNSQADITCVPKDLLQGEEPVRQQNVTTIHGTQEGDVYYVNLKIDGRRINTEVIGTTLDYAIITPGDVPWILKKPLELTIKLDLEEQQGTLLNNSILSKKGKEELKQLFEKYSALWQSWENQVGHRRIRPHKIATGTVKPTPQKQYHINPKAKPDIQIVINDLLKQGVLIQKESTMNTPVYPVPKPNGRWRMVLDYRAVNKVTPLIAVQNQHSYGILGSLFKGRYKTTIDLSNGFWAHPIVPEDYWITAFTWQGKQYCWTVLPQGFLNSPGLFTGDVVDLLQGIPNVEVYVDDVYISHDSEKEHLEYLDILFNRLKEAGYIISLKKSNIANSIVDFLGFQITNEGRGLTDTFKEKLENITAPTTLKQLQSILGLLNFARNFIPDFTELIAPLYALIPKSTKNYVPWQIEHSTTLETLITKLNGAEYLQGRKGDKTLIMKVNASYTTGYIRYYNEGEKKPISYVSIVFSKTELKFTELEKLLTTVHKGLLKALDLSMGQNIHVYSPIVSMQNIQKTPQTAKKALASRWLSWLSYLEDPRIRFFYDPQMPALKDLPAVDTGKDNKKHPSNFQHIFYTDGSAITSPTKEGHLNAGMGIVYFINKDGNLQKQQEWSISLGNHTAQFAEIAAFEFALKKCLPLGGNILVVTDSNYVAKAYNEELDVWASNGFVNNRKKPLKHISKWKSVADLKRLRPDVVVTHEPGHQKLDSSPHAYGNNLADQLATQASFKVHAGKRTADGSEFEKRTADGSEFESPKKKAKVE

SEQ ID NO: 730 - protein, 2173 aa, synthetic construct
MPAAKRVKLDGGDKKYSIGLDIGTNSVGWAVITDEYKVPSKKFKVLGNTDRHSIKKNLIGALLFDSGETAEATRLKRTARRRYTRRKNRICYLQEIFSNEMAKVDDSFFHRLEESFLVEEDKKHERHPIFGNIVDEVAYHEKYPTIYHLRKKLVDSTDKADLRLIYLALAHMIKFRGHFLIEGDLNPDNSDVDKLFIQLVQTYNQLFEENPINASGVDAKAILSARLSKSRRLENLIAQLPGEKKNGLFGNLIALSLGLTPNFKSNFDLAEDAKLQLSKDTYDDDLDNLLAQIGDQYADLFLAAKNLSDAILLSDILRVNTEITKAPLSASMIKRYDEHHQDLTLLKALVRQQLPEKYKEIFFDQSKNGYAGYIDGGASQEEFYKFIKPILEKMDGTEELLVKLNREDLLRKQRTFDNGSIPHQIHLGELHAILRRQEDFYPFLKDNREKIEKILTFRIPYYVGPLARGNSRFAWMTRKSEETITPWNFEEVVDKGASAQSFIERMTNFDKNLPNEKVLPKHSLLYEYFTVYNELTKVKYVTEGMRKPAFLSGEQKKAIVDLLFKTNRKVTVKQLKEDYFKKIECFDSVEISGVEDRFNASLGTYHDLLKIIKDKDFLDNEENEDILEDIVLTLTLFEDREMIEERLKTYAHLFDDKVMKQLKRRRYTGWGRLSRKLINGIRDKQSGKTILDFLKSDGFANRNFMQLIHDDSLTFKEDIQKAQVSGQGDSLHEHIANLAGSPAIKKGILQTVKVVDELVKVMGRHKPENIVIEMARENQTTQKGQKNSRERMKRIEEGIKELGSQILKEHPVENTQLQNEKLYLYYLQNGRDMYVDQELDINRLSDYDVDHIVPQSFLKDDSIDNKVLTRSDKARGKSDNVPSEEVVKKMKNYWRQLLNAKLITQRKFDNLTKAERGGLSELDKAGFIKRQLVETRQITKHVAQILDSRMNTKYDENDKLIREVKVITLKSKLVSDFRKDFQFYKVREINNYHHAHDAYLNAVVGTALIKKYPKLESEFVYGDYKVYDVRKMIAKSEQEIGKATAKYFFYSNIMNFFKTEITLANGEIRKRPLIETNGETGEIVWDKGRDFATVRKVLSMPQVNIVKKTEVQTGGFSKESILPKRNSDKLIARKKDWDPKKYGGFDSPTVAYSVLVVAKVEKGKSKKLKSVKELLGITIMERSSFEKNPIDFLEAKGYKEVKKDLIIKLPKYSLFELENGRKRMLASAGELQKGNELALPSKYVNFLYLASHYEKLKGSPEDNEQKQLFVEQHKHYLDEIIEQISEFSKRVILADANLDKVLSAYNKHRDKPIREQAENIIHLFTLTNLGAPAAFKYFDTTIDRKRYTSTKEVLDATLIHQSITGLYETRIDLSQLGGDGGGSSGGSEAAAKGGMDLLKPLTVERKGVKIKGYWNSQADITCVPKDLLQGEEPVRQQNVTTIHGTQEGDVYYVNLKIDGRRINTEVIGTTLDYAIITPGDVPWILKKPLELTIKLDLEEQQGTLLNNSILSKKGKEELKQLFEKYSALWQSWENQVGHRRIRPHKIATGTVKPTPQKQYHINPKAKPDIQIVINDLLKQGVLIQKESTMNTPVYPVPKPNGRWRMVLDYRAVNKVTPLIAVQNQHSYGILGSLFKGRYKTTIDLSNGFWAHPIVPEDYWITAFTWQGKQYCWTVLPQGFLNSPGLFTGDVVDLLQGIPNVEVYVDDVYISHDSEKEHLEYLDILFNRLKEAGYIISLKKSNIANSIVDFLGFQITNEGRGLTDTFKEKLENITAPTTLKQLQSILGLLNFARNFIPDFTELIAPLYALIPKSTKNYVPWQIEHSTTLETLITKLNGAEYLQGRKGDKTLIMKVNASYTTGYIRYYNEGEKKPISYVSIVFSKTELKFTELEKLLTTVHKGLLKALDLSMGQNIHVYSPIVSMQNIQKTPQTAKKALASRWLSWLSYLEDPRIRFFYDPQMPALKDLPAVDTGKDNKKHPSNFQHIFYTDGSAITSPTKEGHLNAGMGIVYFINKDGNLQKQQEWSISLGNHTAQFAEIAAFEFALKKCLPLGGNILVVTDSNYVAKAYNEELDVWASNGFVNNRKKPLKHISKWKSVADLKRLRPDVVVTHEPGHQKLDSSPHAYGNNLADQLATQASFKVHAGKRTADGSEFEKRTADGSEFESPKKKAKVE

SEQ ID NO: 731 - protein, 2171 aa, synthetic construct
MPAAKRVKLDGGDKKYSIGLDIGTNSVGWAVITDEYKVPSKKFKVLGNTDRHSIKKNLIGALLFDSGETAEATRLKRTARRRYTRRKNRICYLQEIFSNEMAKVDDSFFHRLEESFLVEEDKKHERHPIFGNIVDEVAYHEKYPTIYHLRKKLVDSTDKADLRLIYLALAHMIKFRGHFLIEGDLNPDNSDVDKLFIQLVQTYNQLFEENPINASGVDAKAILSARLSKSRRLENLIAQLPGEKKNGLFGNLIALSLGLTPNFKSNFDLAEDAKLQLSKDTYDDDLDNLLAQIGDQYADLFLAAKNLSDAILLSDILRVNTEITKAPLSASMIKRYDEHHQDLTLLKALVRQQLPEKYKEIFFDQSKNGYAGYIDGGASQEEFYKFIKPILEKMDGTEELLVKLNREDLLRKQRTFDNGSIPHQIHLGELHAILRRQEDFYPFLKDNREKIEKILTFRIPYYVGPLARGNSRFAWMTRKSEETITPWNFEEVVDKGASAQSFIERMTNFDKNLPNEKVLPKHSLLYEYFTVYNELTKVKYVTEGMRKPAFLSGEQKKAIVDLLFKTNRKVTVKQLKEDYFKKIECFDSVEISGVEDRFNASLGTYHDLLKIIKDKDFLDNEENEDILEDIVLTLTLFEDREMIEERLKTYAHLFDDKVMKQLKRRRYTGWGRLSRKLINGIRDKQSGKTILDFLKSDGFANRNFMQLIHDDSLTFKEDIQKAQVSGQGDSLHEHIANLAGSPAIKKGILQTVKVVDELVKVMGRHKPENIVIEMARENQTTQKGQKNSRERMKRIEEGIKELGSQILKEHPVENTQLQNEKLYLYYLQNGRDMYVDQELDINRLSDYDVDHIVPQSFLKDDSIDNKVLTRSDKARGKSDNVPSEEVVKKMKNYWRQLLNAKLITQRKFDNLTKAERGGLSELDKAGFIKRQLVETRQITKHVAQILDSRMNTKYDENDKLIREVKVITLKSKLVSDFRKDFQFYKVREINNYHHAHDAYLNAVVGTALIKKYPKLESEFVYGDYKVYDVRKMIAKSEQEIGKATAKYFFYSNIMNFFKTEITLANGEIRKRPLIETNGETGEIVWDKGRDFATVRKVLSMPQVNIVKKTEVQTGGFSKESILPKRNSDKLIARKKDWDPKKYGGFDSPTVAYSVLVVAKVEKGKSKKLKSVKELLGITIMERSSFEKNPIDFLEAKGYKEVKKDLIIKLPKYSLFELENGRKRMLASAGELQKGNELALPSKYVNFLYLASHYEKLKGSPEDNEQKQLFVEQHKHYLDEIIEQISEFSKRVILADANLDKVLSAYNKHRDKPIREQAENIIHLFTLTNLGAPAAFKYFDTTIDRKRYTSTKEVLDATLIHQSITGLYETRIDLSQLGGDGGGGSGGGPAPGGMDLLKPLTVERKGVKIKGYWNSQADITCVPKDLLQGEEPVRQQNVTTIHGTQEGDVYYVNLKIDGRRINTEVIGTTLDYAIITPGDVPWILKKPLELTIKLDLEEQQGTLLNNSILSKKGKEELKQLFEKYSALWQSWENQVGHRRIRPHKIATGTVKPTPQKQYHINPKAKPDIQIVINDLLKQGVLIQKESTMNTPVYPVPKPNGRWRMVLDYRAVNKVTPLIAVQNQHSYGILGSLFKGRYKTTIDLSNGFWAHPIVPEDYWITAFTWQGKQYCWTVLPQGFLNSPGLFTGDVVDLLQGIPNVEVYVDDVYISHDSEKEHLEYLDILFNRLKEAGYIISLKKSNIANSIVDFLGFQITNEGRGLTDTFKEKLENITAPTTLKQLQSILGLLNFARNFIPDFTELIAPLYALIPKSTKNYVPWQIEHSTTLETLITKLNGAEYLQGRKGDKTLIMKVNASYTTGYIRYYNEGEKKPISYVSIVFSKTELKFTELEKLLTTVHKGLLKALDLSMGQNIHVYSPIVSMQNIQKTPQTAKKALASRWLSWLSYLEDPRIRFFYDPQMPALKDLPAVDTGKDNKKHPSNFQHIFYTDGSAITSPTKEGHLNAGMGIVYFINKDGNLQKQQEWSISLGNHTAQFAEIAAFEFALKKCLPLGGNILVVTDSNYVAKAYNEELDVWASNGFVNNRKKPLKHISKWKSVADLKRLRPDVVVTHEPGHQKLDSSPHAYGNNLADQLATQASFKVHAGKRTADGSEFEKRTADGSEFESPKKKAKVE

SEQ ID NO: 732 - protein, 2173 aa, synthetic construct
MPAAKRVKLDGGDKKYSIGLDIGTNSVGWAVITDEYKVPSKKFKVLGNTDRHSIKKNLIGALLFDSGETAEATRLKRTARRRYTRRKNRICYLQEIFSNEMAKVDDSFFHRLEESFLVEEDKKHERHPIFGNIVDEVAYHEKYPTIYHLRKKLVDSTDKADLRLIYLALAHMIKFRGHFLIEGDLNPDNSDVDKLFIQLVQTYNQLFEENPINASGVDAKAILSARLSKSRRLENLIAQLPGEKKNGLFGNLIALSLGLTPNFKSNFDLAEDAKLQLSKDTYDDDLDNLLAQIGDQYADLFLAAKNLSDAILLSDILRVNTEITKAPLSASMIKRYDEHHQDLTLLKALVRQQLPEKYKEIFFDQSKNGYAGYIDGGASQEEFYKFIKPILEKMDGTEELLVKLNREDLLRKQRTFDNGSIPHQIHLGELHAILRRQEDFYPFLKDNREKIEKILTFRIPYYVGPLARGNSRFAWMTRKSEETITPWNFEEVVDKGASAQSFIERMTNFDKNLPNEKVLPKHSLLYEYFTVYNELTKVKYVTEGMRKPAFLSGEQKKAIVDLLFKTNRKVTVKQLKEDYFKKIECFDSVEISGVEDRFNASLGTYHDLLKIIKDKDFLDNEENEDILEDIVLTLTLFEDREMIEERLKTYAHLFDDKVMKQLKRRRYTGWGRLSRKLINGIRDKQSGKTILDFLKSDGFANRNFMQLIHDDSLTFKEDIQKAQVSGQGDSLHEHIANLAGSPAIKKGILQTVKVVDELVKVMGRHKPENIVIEMARENQTTQKGQKNSRERMKRIEEGIKELGSQILKEHPVENTQLQNEKLYLYYLQNGRDMYVDQELDINRLSDYDVDHIVPQSFLKDDSIDNKVLTRSDKARGKSDNVPSEEVVKKMKNYWRQLLNAKLITQRKFDNLTKAERGGLSELDKAGFIKRQLVETRQITKHVAQILDSRMNTKYDENDKLIREVKVITLKSKLVSDFRKDFQFYKVREINNYHHAHDAYLNAVVGTALIKKYPKLESEFVYGDYKVYDVRKMIAKSEQEIGKATAKYFFYSNIMNFFKTEITLANGEIRKRPLIETNGETGEIVWDKGRDFATVRKVLSMPQVNIVKKTEVQTGGFSKESILPKRNSDKLIARKKDWDPKKYGGFDSPTVAYSVLVVAKVEKGKSKKLKSVKELLGITIMERSSFEKNPIDFLEAKGYKEVKKDLIIKLPKYSLFELENGRKRMLASAGELQKGNELALPSKYVNFLYLASHYEKLKGSPEDNEQKQLFVEQHKHYLDEIIEQISEFSKRVILADANLDKVLSAYNKHRDKPIREQAENIIHLFTLTNLGAPAAFKYFDTTIDRKRYTSTKEVLDATLIHQSITGLYETRIDLSQLGGDGGGGGEAAAKPAPGGMDLLKPLTVERKGVKIKGYWNSQADITCVPKDLLQGEEPVRQQNVTTIHGTQEGDVYYVNLKIDGRRINTEVIGTTLDYAIITPGDVPWILKKPLELTIKLDLEEQQGTLLNNSILSKKGKEELKQLFEKYSALWQSWENQVGHRRIRPHKIATGTVKPTPQKQYHINPKAKPDIQIVINDLLKQGVLIQKESTMNTPVYPVPKPNGRWRMVLDYRAVNKVTPLIAVQNQHSYGILGSLFKGRYKTTIDLSNGFWAHPIVPEDYWITAFTWQGKQYCWTVLPQGFLNSPGLFTGDVVDLLQGIPNVEVYVDDVYISHDSEKEHLEYLDILFNRLKEAGYIISLKKSNIANSIVDFLGFQITNEGRGLTDTFKEKLENITAPTTLKQLQSILGLLNFARNFIPDFTELIAPLYALIPKSTKNYVPWQIEHSTTLETLITKLNGAEYLQGRKGDKTLIMKVNASYTTGYIRYYNEGEKKPISYVSIVFSKTELKFTELEKLLTTVHKGLLKALDLSMGQNIHVYSPIVSMQNIQKTPQTAKKALASRWLSWLSYLEDPRIRFFYDPQMPALKDLPAVDTGKDNKKHPSNFQHIFYTDGSAITSPTKEGHLNAGMGIVYFINKDGNLQKQQEWSISLGNHTAQFAEIAAFEFALKKCLPLGGNILVVTDSNYVAKAYNEELDVWASNGFVNNRKKPLKHISKWKSVADLKRLRPDVVVTHEPGHQKLDSSPHAYGNNLADQLATQASFKVHAGKRTADGSEFEKRTADGSEFESPKKKAKVE

SEQ ID NO: 733 - protein, 2167 aa, synthetic construct
MPAAKRVKLDGGDKKYSIGLDIGTNSVGWAVITDEYKVPSKKFKVLGNTDRHSIKKNLIGALLFDSGETAEATRLKRTARRRYTRRKNRICYLQEIFSNEMAKVDDSFFHRLEESFLVEEDKKHERHPIFGNIVDEVAYHEKYPTIYHLRKKLVDSTDKADLRLIYLALAHMIKFRGHFLIEGDLNPDNSDVDKLFIQLVQTYNQLFEENPINASGVDAKAILSARLSKSRRLENLIAQLPGEKKNGLFGNLIALSLGLTPNFKSNFDLAEDAKLQLSKDTYDDDLDNLLAQIGDQYADLFLAAKNLSDAILLSDILRVNTEITKAPLSASMIKRYDEHHQDLTLLKALVRQQLPEKYKEIFFDQSKNGYAGYIDGGASQEEFYKFIKPILEKMDGTEELLVKLNREDLLRKQRTFDNGSIPHQIHLGELHAILRRQEDFYPFLKDNREKIEKILTFRIPYYVGPLARGNSRFAWMTRKSEETITPWNFEEVVDKGASAQSFIERMTNFDKNLPNEKVLPKHSLLYEYFTVYNELTKVKYVTEGMRKPAFLSGEQKKAIVDLLFKTNRKVTVKQLKEDYFKKIECFDSVEISGVEDRFNASLGTYHDLLKIIKDKDFLDNEENEDILEDIVLTLTLFEDREMIEERLKTYAHLFDDKVMKQLKRRRYTGWGRLSRKLINGIRDKQSGKTILDFLKSDGFANRNFMQLIHDDSLTFKEDIQKAQVSGQGDSLHEHIANLAGSPAIKKGILQTVKVVDELVKVMGRHKPENIVIEMARENQTTQKGQKNSRERMKRIEEGIKELGSQILKEHPVENTQLQNEKLYLYYLQNGRDMYVDQELDINRLSDYDVDHIVPQSFLKDDSIDNKVLTRSDKARGKSDNVPSEEVVKKMKNYWRQLLNAKLITQRKFDNLTKAERGGLSELDKAGFIKRQLVETRQITKHVAQILDSRMNTKYDENDKLIREVKVITLKSKLVSDFRKDFQFYKVREINNYHHAHDAYLNAVVGTALIKKYPKLESEFVYGDYKVYDVRKMIAKSEQEIGKATAKYFFYSNIMNFFKTEITLANGEIRKRPLIETNGETGEIVWDKGRDFATVRKVLSMPQVNIVKKTEVQTGGFSKESILPKRNSDKLIARKKDWDPKKYGGFDSPTVAYSVLVVAKVEKGKSKKLKSVKELLGITIMERSSFEKNPIDFLEAKGYKEVKKDLIIKLPKYSLFELENGRKRMLASAGELQKGNELALPSKYVNFLYLASHYEKLKGSPEDNEQKQLFVEQHKHYLDEIIEQISEFSKRVILADANLDKVLSAYNKHRDKPIREQAENIIHLFTLTNLGAPAAFKYFDTTIDRKRYTSTKEVLDATLIHQSITGLYETRIDLSQLGGDGGGGGGGGGMDLLKPLTVERKGVKIKGYWNSQADITCVPKDLLQGEEPVRQQNVTTIHGTQEGDVYYVNLKIDGRRINTEVIGTTLDYAIITPGDVPWILKKPLELTIKLDLEEQQGTLLNNSILSKKGKEELKQLFEKYSALWQSWENQVGHRRIRPHKIATGTVKPTPQKQYHINPKAKPDIQIVINDLLKQGVLIQKESTMNTPVYPVPKPNGRWRMVLDYRAVNKVTPLIAVQNQHSYGILGSLFKGRYKTTIDLSNGFWAHPIVPEDYWITAFTWQGKQYCWTVLPQGFLNSPGLFTGDVVDLLQGIPNVEVYVDDVYISHDSEKEHLEYLDILFNRLKEAGYIISLKKSNIANSIVDFLGFQITNEGRGLTDTFKEKLENITAPTTLKQLQSILGLLNFARNFIPDFTELIAPLYALIPKSTKNYVPWQIEHSTTLETLITKLNGAEYLQGRKGDKTLIMKVNASYTTGYIRYYNEGEKKPISYVSIVFSKTELKFTELEKLLTTVHKGLLKALDLSMGQNIHVYSPIVSMQNIQKTPQTAKKALASRWLSWLSYLEDPRIRFFYDPQMPALKDLPAVDTGKDNKKHPSNFQHIFYTDGSAITSPTKEGHLNAGMGIVYFINKDGNLQKQQEWSISLGNHTAQFAEIAAFEFALKKCLPLGGNILVVTDSNYVAKAYNEELDVWASNGFVNNRKKPLKHISKWKSVADLKRLRPDVVVTHEPGHQKLDSSPHAYGNNLADQLATQASFKVHAGKRTADGSEFEKRTADGSEFESPKKKAKVE

SEQ ID NO: 734 - protein, 2165 aa, synthetic construct
MPAAKRVKLDGGDKKYSIGLDIGTNSVGWAVITDEYKVPSKKFKVLGNTDRHSIKKNLIGALLFDSGETAEATRLKRTARRRYTRRKNRICYLQEIFSNEMAKVDDSFFHRLEESFLVEEDKKHERHPIFGNIVDEVAYHEKYPTIYHLRKKLVDSTDKADLRLIYLALAHMIKFRGHFLIEGDLNPDNSDVDKLFIQLVQTYNQLFEENPINASGVDAKAILSARLSKSRRLENLIAQLPGEKKNGLFGNLIALSLGLTPNFKSNFDLAEDAKLQLSKDTYDDDLDNLLAQIGDQYADLFLAAKNLSDAILLSDILRVNTEITKAPLSASMIKRYDEHHQDLTLLKALVRQQLPEKYKEIFFDQSKNGYAGYIDGGASQEEFYKFIKPILEKMDGTEELLVKLNREDLLRKQRTFDNGSIPHQIHLGELHAILRRQEDFYPFLKDNREKIEKILTFRIPYYVGPLARGNSRFAWMTRKSEETITPWNFEEVVDKGASAQSFIERMTNFDKNLPNEKVLPKHSLLYEYFTVYNELTKVKYVTEGMRKPAFLSGEQKKAIVDLLFKTNRKVTVKQLKEDYFKKIECFDSVEISGVEDRFNASLGTYHDLLKIIKDKDFLDNEENEDILEDIVLTLTLFEDREMIEERLKTYAHLFDDKVMKQLKRRRYTGWGRLSRKLINGIRDKQSGKTILDFLKSDGFANRNFMQLIHDDSLTFKEDIQKAQVSGQGDSLHEHIANLAGSPAIKKGILQTVKVVDELVKVMGRHKPENIVIEMARENQTTQKGQKNSRERMKRIEEGIKELGSQILKEHPVENTQLQNEKLYLYYLQNGRDMYVDQELDINRLSDYDVDHIVPQSFLKDDSIDNKVLTRSDKARGKSDNVPSEEVVKKMKNYWRQLLNAKLITQRKFDNLTKAERGGLSELDKAGFIKRQLVETRQITKHVAQILDSRMNTKYDENDKLIREVKVITLKSKLVSDFRKDFQFYKVREINNYHHAHDAYLNAVVGTALIKKYPKLESEFVYGDYKVYDVRKMIAKSEQEIGKATAKYFFYSNIMNFFKTEITLANGEIRKRPLIETNGETGEIVWDKGRDFATVRKVLSMPQVNIVKKTEVQTGGFSKESILPKRNSDKLIARKKDWDPKKYGGFDSPTVAYSVLVVAKVEKGKSKKLKSVKELLGITIMERSSFEKNPIDFLEAKGYKEVKKDLIIKLPKYSLFELENGRKRMLASAGELQKGNELALPSKYVNFLYLASHYEKLKGSPEDNEQKQLFVEQHKHYLDEIIEQISEFSKRVILADANLDKVLSAYNKHRDKPIREQAENIIHLFTLTNLGAPAAFKYFDTTIDRKRYTSTKEVLDATLIHQSITGLYETRIDLSQLGGDGGGGGGGMDLLKPLTVERKGVKIKGYWNSQADITCVPKDLLQGEEPVRQQNVTTIHGTQEGDVYYVNLKIDGRRINTEVIGTTLDYAIITPGDVPWILKKPLELTIKLDLEEQQGTLLNNSILSKKGKEELKQLFEKYSALWQSWENQVGHRRIRPHKIATGTVKPTPQKQYHINPKAKPDIQIVINDLLKQGVLIQKESTMNTPVYPVPKPNGRWRMVLDYRAVNKVTPLIAVQNQHSYGILGSLFKGRYKTTIDLSNGFWAHPIVPEDYWITAFTWQGKQYCWTVLPQGFLNSPGLFTGDVVDLLQGIPNVEVYVDDVYISHDSEKEHLEYLDILFNRLKEAGYIISLKKSNIANSIVDFLGFQITNEGRGLTDTFKEKLENITAPTTLKQLQSILGLLNFARNFIPDFTELIAPLYALIPKSTKNYVPWQIEHSTTLETLITKLNGAEYLQGRKGDKTLIMKVNASYTTGYIRYYNEGEKKPISYVSIVFSKTELKFTELEKLLTTVHKGLLKALDLSMGQNIHVYSPIVSMQNIQKTPQTAKKALASRWLSWLSYLEDPRIRFFYDPQMPALKDLPAVDTGKDNKKHPSNFQHIFYTDGSAITSPTKEGHLNAGMGIVYFINKDGNLQKQQEWSISLGNHTAQFAEIAAFEFALKKCLPLGGNILVVTDSNYVAKAYNEELDVWASNGFVNNRKKPLKHISKWKSVADLKRLRPDVVVTHEPGHQKLDSSPHAYGNNLADQLATQASFKVHAGKRTADGSEFEKRTADGSEFESPKKKAKVE

SEQ ID NO: 735 - protein, 2167 aa, synthetic construct
MPAAKRVKLDGGDKKYSIGLDIGTNSVGWAVITDEYKVPSKKFKVLGNTDRHSIKKNLIGALLFDSGETAEATRLKRTARRRYTRRKNRICYLQEIFSNEMAKVDDSFFHRLEESFLVEEDKKHERHPIFGNIVDEVAYHEKYPTIYHLRKKLVDSTDKADLRLIYLALAHMIKFRGHFLIEGDLNPDNSDVDKLFIQLVQTYNQLFEENPINASGVDAKAILSARLSKSRRLENLIAQLPGEKKNGLFGNLIALSLGLTPNFKSNFDLAEDAKLQLSKDTYDDDLDNLLAQIGDQYADLFLAAKNLSDAILLSDILRVNTEITKAPLSASMIKRYDEHHQDLTLLKALVRQQLPEKYKEIFFDQSKNGYAGYIDGGASQEEFYKFIKPILEKMDGTEELLVKLNREDLLRKQRTFDNGSIPHQIHLGELHAILRRQEDFYPFLKDNREKIEKILTFRIPYYVGPLARGNSRFAWMTRKSEETITPWNFEEVVDKGASAQSFIERMTNFDKNLPNEKVLPKHSLLYEYFTVYNELTKVKYVTEGMRKPAFLSGEQKKAIVDLLFKTNRKVTVKQLKEDYFKKIECFDSVEISGVEDRFNASLGTYHDLLKIIKDKDFLDNEENEDILEDIVLTLTLFEDREMIEERLKTYAHLFDDKVMKQLKRRRYTGWGRLSRKLINGIRDKQSGKTILDFLKSDGFANRNFMQLIHDDSLTFKEDIQKAQVSGQGDSLHEHIANLAGSPAIKKGILQTVKVVDELVKVMGRHKPENIVIEMARENQTTQKGQKNSRERMKRIEEGIKELGSQILKEHPVENTQLQNEKLYLYYLQNGRDMYVDQELDINRLSDYDVDHIVPQSFLKDDSIDNKVLTRSDKARGKSDNVPSEEVVKKMKNYWRQLLNAKLITQRKFDNLTKAERGGLSELDKAGFIKRQLVETRQITKHVAQILDSRMNTKYDENDKLIREVKVITLKSKLVSDFRKDFQFYKVREINNYHHAHDAYLNAVVGTALIKKYPKLESEFVYGDYKVYDVRKMIAKSEQEIGKATAKYFFYSNIMNFFKTEITLANGEIRKRPLIETNGETGEIVWDKGRDFATVRKVLSMPQVNIVKKTEVQTGGFSKESILPKRNSDKLIARKKDWDPKKYGGFDSPTVAYSVLVVAKVEKGKSKKLKSVKELLGITIMERSSFEKNPIDFLEAKGYKEVKKDLIIKLPKYSLFELENGRKRMLASAGELQKGNELALPSKYVNFLYLASHYEKLKGSPEDNEQKQLFVEQHKHYLDEIIEQISEFSKRVILADANLDKVLSAYNKHRDKPIREQAENIIHLFTLTNLGAPAAFKYFDTTIDRKRYTSTKEVLDATLIHQSITGLYETRIDLSQLGGDGGPAPAPGGMDLLKPLTVERKGVKIKGYWNSQADITCVPKDLLQGEEPVRQQNVTTIHGTQEGDVYYVNLKIDGRRINTEVIGTTLDYAIITPGDVPWILKKPLELTIKLDLEEQQGTLLNNSILSKKGKEELKQLFEKYSALWQSWENQVGHRRIRPHKIATGTVKPTPQKQYHINPKAKPDIQIVINDLLKQGVLIQKESTMNTPVYPVPKPNGRWRMVLDYRAVNKVTPLIAVQNQHSYGILGSLFKGRYKTTIDLSNGFWAHPIVPEDYWITAFTWQGKQYCWTVLPQGFLNSPGLFTGDVVDLLQGIPNVEVYVDDVYISHDSEKEHLEYLDILFNRLKEAGYIISLKKSNIANSIVDFLGFQITNEGRGLTDTFKEKLENITAPTTLKQLQSILGLLNFARNFIPDFTELIAPLYALIPKSTKNYVPWQIEHSTTLETLITKLNGAEYLQGRKGDKTLIMKVNASYTTGYIRYYNEGEKKPISYVSIVFSKTELKFTELEKLLTTVHKGLLKALDLSMGQNIHVYSPIVSMQNIQKTPQTAKKALASRWLSWLSYLEDPRIRFFYDPQMPALKDLPAVDTGKDNKKHPSNFQHIFYTDGSAITSPTKEGHLNAGMGIVYFINKDGNLQKQQEWSISLGNHTAQFAEIAAFEFALKKCLPLGGNILVVTDSNYVAKAYNEELDVWASNGFVNNRKKPLKHISKWKSVADLKRLRPDVVVTHEPGHQKLDSSPHAYGNNLADQLATQASFKVHAGKRTADGSEFEKRTADGSEFESPKKKAKVE

SEQ ID NO: 736 - protein, 2171 aa, synthetic construct
MPAAKRVKLDGGDKKYSIGLDIGTNSVGWAVITDEYKVPSKKFKVLGNTDRHSIKKNLIGALLFDSGETAEATRLKRTARRRYTRRKNRICYLQEIFSNEMAKVDDSFFHRLEESFLVEEDKKHERHPIFGNIVDEVAYHEKYPTIYHLRKKLVDSTDKADLRLIYLALAHMIKFRGHFLIEGDLNPDNSDVDKLFIQLVQTYNQLFEENPINASGVDAKAILSARLSKSRRLENLIAQLPGEKKNGLFGNLIALSLGLTPNFKSNFDLAEDAKLQLSKDTYDDDLDNLLAQIGDQYADLFLAAKNLSDAILLSDILRVNTEITKAPLSASMIKRYDEHHQDLTLLKALVRQQLPEKYKEIFFDQSKNGYAGYIDGGASQEEFYKFIKPILEKMDGTEELLVKLNREDLLRKQRTFDNGSIPHQIHLGELHAILRRQEDFYPFLKDNREKIEKILTFRIPYYVGPLARGNSRFAWMTRKSEETITPWNFEEVVDKGASAQSFIERMTNFDKNLPNEKVLPKHSLLYEYFTVYNELTKVKYVTEGMRKPAFLSGEQKKAIVDLLFKTNRKVTVKQLKEDYFKKIECFDSVEISGVEDRFNASLGTYHDLLKIIKDKDFLDNEENEDILEDIVLTLTLFEDREMIEERLKTYAHLFDDKVMKQLKRRRYTGWGRLSRKLINGIRDKQSGKTILDFLKSDGFANRNFMQLIHDDSLTFKEDIQKAQVSGQGDSLHEHIANLAGSPAIKKGILQTVKVVDELVKVMGRHKPENIVIEMARENQTTQKGQKNSRERMKRIEEGIKELGSQILKEHPVENTQLQNEKLYLYYLQNGRDMYVDQELDINRLSDYDVDHIVPQSFLKDDSIDNKVLTRSDKARGKSDNVPSEEVVKKMKNYWRQLLNAKLITQRKFDNLTKAERGGLSELDKAGFIKRQLVETRQITKHVAQILDSRMNTKYDENDKLIREVKVITLKSKLVSDFRKDFQFYKVREINNYHHAHDAYLNAVVGTALIKKYPKLESEFVYGDYKVYDVRKMIAKSEQEIGKATAKYFFYSNIMNFFKTEITLANGEIRKRPLIETNGETGEIVWDKGRDFATVRKVLSMPQVNIVKKTEVQTGGFSKESILPKRNSDKLIARKKDWDPKKYGGFDSPTVAYSVLVVAKVEKGKSKKLKSVKELLGITIMERSSFEKNPIDFLEAKGYKEVKKDLIIKLPKYSLFELENGRKRMLASAGELQKGNELALPSKYVNFLYLASHYEKLKGSPEDNEQKQLFVEQHKHYLDEIIEQISEFSKRVILADANLDKVLSAYNKHRDKPIREQAENIIHLFTLTNLGAPAAFKYFDTTIDRKRYTSTKEVLDATLIHQSITGLYETRIDLSQLGGDGGGSSGGGGGSGGMDLLKPLTVERKGVKIKGYWNSQADITCVPKDLLQGEEPVRQQNVTTIHGTQEGDVYYVNLKIDGRRINTEVIGTTLDYAIITPGDVPWILKKPLELTIKLDLEEQQGTLLNNSILSKKGKEELKQLFEKYSALWQSWENQVGHRRIRPHKIATGTVKPTPQKQYHINPKAKPDIQIVINDLLKQGVLIQKESTMNTPVYPVPKPNGRWRMVLDYRAVNKVTPLIAVQNQHSYGILGSLFKGRYKTTIDLSNGFWAHPIVPEDYWITAFTWQGKQYCWTVLPQGFLNSPGLFTGDVVDLLQGIPNVEVYVDDVYISHDSEKEHLEYLDILFNRLKEAGYIISLKKSNIANSIVDFLGFQITNEGRGLTDTFKEKLENITAPTTLKQLQSILGLLNFARNFIPDFTELIAPLYALIPKSTKNYVPWQIEHSTTLETLITKLNGAEYLQGRKGDKTLIMKVNASYTTGYIRYYNEGEKKPISYVSIVFSKTELKFTELEKLLTTVHKGLLKALDLSMGQNIHVYSPIVSMQNIQKTPQTAKKALASRWLSWLSYLEDPRIRFFYDPQMPALKDLPAVDTGKDNKKHPSNFQHIFYTDGSAITSPTKEGHLNAGMGIVYFINKDGNLQKQQEWSISLGNHTAQFAEIAAFEFALKKCLPLGGNILVVTDSNYVAKAYNEELDVWASNGFVNNRKKPLKHISKWKSVADLKRLRPDVVVTHEPGHQKLDSSPHAYGNNLADQLATQASFKVHAGKRTADGSEFEKRTADGSEFESPKKKAKVE

SEQ ID NO: 737 - protein, 2171 aa, synthetic construct
MPAAKRVKLDGGDKKYSIGLDIGTNSVGWAVITDEYKVPSKKFKVLGNTDRHSIKKNLIGALLFDSGETAEATRLKRTARRRYTRRKNRICYLQEIFSNEMAKVDDSFFHRLEESFLVEEDKKHERHPIFGNIVDEVAYHEKYPTIYHLRKKLVDSTDKADLRLIYLALAHMIKFRGHFLIEGDLNPDNSDVDKLFIQLVQTYNQLFEENPINASGVDAKAILSARLSKSRRLENLIAQLPGEKKNGLFGNLIALSLGLTPNFKSNFDLAEDAKLQLSKDTYDDDLDNLLAQIGDQYADLFLAAKNLSDAILLSDILRVNTEITKAPLSASMIKRYDEHHQDLTLLKALVRQQLPEKYKEIFFDQSKNGYAGYIDGGASQEEFYKFIKPILEKMDGTEELLVKLNREDLLRKQRTFDNGSIPHQIHLGELHAILRRQEDFYPFLKDNREKIEKILTFRIPYYVGPLARGNSRFAWMTRKSEETITPWNFEEVVDKGASAQSFIERMTNFDKNLPNEKVLPKHSLLYEYFTVYNELTKVKYVTEGMRKPAFLSGEQKKAIVDLLFKTNRKVTVKQLKEDYFKKIECFDSVEISGVEDRFNASLGTYHDLLKIIKDKDFLDNEENEDILEDIVLTLTLFEDREMIEERLKTYAHLFDDKVMKQLKRRRYTGWGRLSRKLINGIRDKQSGKTILDFLKSDGFANRNFMQLIHDDSLTFKEDIQKAQVSGQGDSLHEHIANLAGSPAIKKGILQTVKVVDELVKVMGRHKPENIVIEMARENQTTQKGQKNSRERMKRIEEGIKELGSQILKEHPVENTQLQNEKLYLYYLQNGRDMYVDQELDINRLSDYDVDHIVPQSFLKDDSIDNKVLTRSDKARGKSDNVPSEEVVKKMKNYWRQLLNAKLITQRKFDNLTKAERGGLSELDKAGFIKRQLVETRQITKHVAQILDSRMNTKYDENDKLIREVKVITLKSKLVSDFRKDFQFYKVREINNYHHAHDAYLNAVVGTALIKKYPKLESEFVYGDYKVYDVRKMIAKSEQEIGKATAKYFFYSNIMNFFKTEITLANGEIRKRPLIETNGETGEIVWDKGRDFATVRKVLSMPQVNIVKKTEVQTGGFSKESILPKRNSDKLIARKKDWDPKKYGGFDSPTVAYSVLVVAKVEKGKSKKLKSVKELLGITIMERSSFEKNPIDFLEAKGYKEVKKDLIIKLPKYSLFELENGRKRMLASAGELQKGNELALPSKYVNFLYLASHYEKLKGSPEDNEQKQLFVEQHKHYLDEIIEQISEFSKRVILADANLDKVLSAYNKHRDKPIREQAENIIHLFTLTNLGAPAAFKYFDTTIDRKRYTSTKEVLDATLIHQSITGLYETRIDLSQLGGDGGPAPGGSGSSGGMDLLKPLTVERKGVKIKGYWNSQADITCVPKDLLQGEEPVRQQNVTTIHGTQEGDVYYVNLKIDGRRINTEVIGTTLDYAIITPGDVPWILKKPLELTIKLDLEEQQGTLLNNSILSKKGKEELKQLFEKYSALWQSWENQVGHRRIRPHKIATGTVKPTPQKQYHINPKAKPDIQIVINDLLKQGVLIQKESTMNTPVYPVPKPNGRWRMVLDYRAVNKVTPLIAVQNQHSYGILGSLFKGRYKTTIDLSNGFWAHPIVPEDYWITAFTWQGKQYCWTVLPQGFLNSPGLFTGDVVDLLQGIPNVEVYVDDVYISHDSEKEHLEYLDILFNRLKEAGYIISLKKSNIANSIVDFLGFQITNEGRGLTDTFKEKLENITAPTTLKQLQSILGLLNFARNFIPDFTELIAPLYALIPKSTKNYVPWQIEHSTTLETLITKLNGAEYLQGRKGDKTLIMKVNASYTTGYIRYYNEGEKKPISYVSIVFSKTELKFTELEKLLTTVHKGLLKALDLSMGQNIHVYSPIVSMQNIQKTPQTAKKALASRWLSWLSYLEDPRIRFFYDPQMPALKDLPAVDTGKDNKKHPSNFQHIFYTDGSAITSPTKEGHLNAGMGIVYFINKDGNLQKQQEWSISLGNHTAQFAEIAAFEFALKKCLPLGGNILVVTDSNYVAKAYNEELDVWASNGFVNNRKKPLKHISKWKSVADLKRLRPDVVVTHEPGHQKLDSSPHAYGNNLADQLATQASFKVHAGKRTADGSEFEKRTADGSEFESPKKKAKVE

SEQ ID NO: 738 - protein, 2185 aa, synthetic construct
MPAAKRVKLDGGDKKYSIGLDIGTNSVGWAVITDEYKVPSKKFKVLGNTDRHSIKKNLIGALLFDSGETAEATRLKRTARRRYTRRKNRICYLQEIFSNEMAKVDDSFFHRLEESFLVEEDKKHERHPIFGNIVDEVAYHEKYPTIYHLRKKLVDSTDKADLRLIYLALAHMIKFRGHFLIEGDLNPDNSDVDKLFIQLVQTYNQLFEENPINASGVDAKAILSARLSKSRRLENLIAQLPGEKKNGLFGNLIALSLGLTPNFKSNFDLAEDAKLQLSKDTYDDDLDNLLAQIGDQYADLFLAAKNLSDAILLSDILRVNTEITKAPLSASMIKRYDEHHQDLTLLKALVRQQLPEKYKEIFFDQSKNGYAGYIDGGASQEEFYKFIKPILEKMDGTEELLVKLNREDLLRKQRTFDNGSIPHQIHLGELHAILRRQEDFYPFLKDNREKIEKILTFRIPYYVGPLARGNSRFAWMTRKSEETITPWNFEEVVDKGASAQSFIERMTNFDKNLPNEKVLPKHSLLYEYFTVYNELTKVKYVTEGMRKPAFLSGEQKKAIVDLLFKTNRKVTVKQLKEDYFKKIECFDSVEISGVEDRFNASLGTYHDLLKIIKDKDFLDNEENEDILEDIVLTLTLFEDREMIEERLKTYAHLFDDKVMKQLKRRRYTGWGRLSRKLINGIRDKQSGKTILDFLKSDGFANRNFMQLIHDDSLTFKEDIQKAQVSGQGDSLHEHIANLAGSPAIKKGILQTVKVVDELVKVMGRHKPENIVIEMARENQTTQKGQKNSRERMKRIEEGIKELGSQILKEHPVENTQLQNEKLYLYYLQNGRDMYVDQELDINRLSDYDVDHIVPQSFLKDDSIDNKVLTRSDKARGKSDNVPSEEVVKKMKNYWRQLLNAKLITQRKFDNLTKAERGGLSELDKAGFIKRQLVETRQITKHVAQILDSRMNTKYDENDKLIREVKVITLKSKLVSDFRKDFQFYKVREINNYHHAHDAYLNAVVGTALIKKYPKLESEFVYGDYKVYDVRKMIAKSEQEIGKATAKYFFYSNIMNFFKTEITLANGEIRKRPLIETNGETGEIVWDKGRDFATVRKVLSMPQVNIVKKTEVQTGGFSKESILPKRNSDKLIARKKDWDPKKYGGFDSPTVAYSVLVVAKVEKGKSKKLKSVKELLGITIMERSSFEKNPIDFLEAKGYKEVKKDLIIKLPKYSLFELENGRKRMLASAGELQKGNELALPSKYVNFLYLASHYEKLKGSPEDNEQKQLFVEQHKHYLDEIIEQISEFSKRVILADANLDKVLSAYNKHRDKPIREQAENIIHLFTLTNLGAPAAFKYFDTTIDRKRYTSTKEVLDATLIHQSITGLYETRIDLSQLGGDGGGGGGSGGGGSGGGGSGGGGSGGMNPLQLLQPLPAEVKGTKLLAHWNSGATITCIPESFLEDEQPIKQTLIKTIHGEKQQNVYYLTFKVKGRKVEAEVIASPYEYILLSPTDVPWLTQQPLQLTILVPLQEYQDRILNKTALPEEQKQQLKALFTKYDNLWQHWENQVGHRKIRPHNIATGDYPPRPQKQYPINPKAKPSIQIVIDDLLKQGVLTPQNSTMNTPVYPVPKPDGRWRMVLDYREVNKTIPLTAAQNQHSAGILATIVRQKYKTTLDLANGFWAHPITPDSYWLTAFTWQGKQYCWTRLPQGFLNSPALFNADAVDLLKEVPNVQVYVDDIYLSHDNPHEHIQQLEKVFQILLQAGYVVSLKKSEIGQRTVEFLGFNITKEGRGLTDTFKTKLLNVTPPKDLKQLQSILGKLNFARNFIPNFAELVQTLYNLIASSPGKYIEWTEDNTKQLNKVIEALNTASNLEERLPDQRLVIKVNTSPSAGYVRYYNESGKKPIMYLNYVFSKAELKFSMLEKLLTTMHKALIKAMDLAMGQEILVYSPIVSMTKIQKTPLPERKALPIRWITWMTYLEDPRIQFHYDKTLPELKHIPDVYTSSIPPLKHPSQYEGVFCTDGSAIKSPDPTKSNNAGMGIVHAIYNPEYKILNQWSIPLGHHTAQMAEIAAVEFACKKALKVPGPVLVITDSFYVAESANKELPYWKSNGFVNNKKEPLKHISKWKSIAECLSIKPDITIQHEKGHQPINTSIHTEGNALADKLATQGSYVVNAGKRTADGSEFEKRTADGSEFESPKKKAKVE

SEQ ID NO: 739 - protein, 2175 aa, synthetic construct
MPAAKRVKLDGGDKKYSIGLDIGTNSVGWAVITDEYKVPSKKFKVLGNTDRHSIKKNLIGALLFDSGETAEATRLKRTARRRYTRRKNRICYLQEIFSNEMAKVDDSFFHRLEESFLVEEDKKHERHPIFGNIVDEVAYHEKYPTIYHLRKKLVDSTDKADLRLIYLALAHMIKFRGHFLIEGDLNPDNSDVDKLFIQLVQTYNQLFEENPINASGVDAKAILSARLSKSRRLENLIAQLPGEKKNGLFGNLIALSLGLTPNFKSNFDLAEDAKLQLSKDTYDDDLDNLLAQIGDQYADLFLAAKNLSDAILLSDILRVNTEITKAPLSASMIKRYDEHHQDLTLLKALVRQQLPEKYKEIFFDQSKNGYAGYIDGGASQEEFYKFIKPILEKMDGTEELLVKLNREDLLRKQRTFDNGSIPHQIHLGELHAILRRQEDFYPFLKDNREKIEKILTFRIPYYVGPLARGNSRFAWMTRKSEETITPWNFEEVVDKGASAQSFIERMTNFDKNLPNEKVLPKHSLLYEYFTVYNELTKVKYVTEGMRKPAFLSGEQKKAIVDLLFKTNRKVTVKQLKEDYFKKIECFDSVEISGVEDRFNASLGTYHDLLKIIKDKDFLDNEENEDILEDIVLTLTLFEDREMIEERLKTYAHLFDDKVMKQLKRRRYTGWGRLSRKLINGIRDKQSGKTILDFLKSDGFANRNFMQLIHDDSLTFKEDIQKAQVSGQGDSLHEHIANLAGSPAIKKGILQTVKVVDELVKVMGRHKPENIVIEMARENQTTQKGQKNSRERMKRIEEGIKELGSQILKEHPVENTQLQNEKLYLYYLQNGRDMYVDQELDINRLSDYDVDHIVPQSFLKDDSIDNKVLTRSDKARGKSDNVPSEEVVKKMKNYWRQLLNAKLITQRKFDNLTKAERGGLSELDKAGFIKRQLVETRQITKHVAQILDSRMNTKYDENDKLIREVKVITLKSKLVSDFRKDFQFYKVREINNYHHAHDAYLNAVVGTALIKKYPKLESEFVYGDYKVYDVRKMIAKSEQEIGKATAKYFFYSNIMNFFKTEITLANGEIRKRPLIETNGETGEIVWDKGRDFATVRKVLSMPQVNIVKKTEVQTGGFSKESILPKRNSDKLIARKKDWDPKKYGGFDSPTVAYSVLVVAKVEKGKSKKLKSVKELLGITIMERSSFEKNPIDFLEAKGYKEVKKDLIIKLPKYSLFELENGRKRMLASAGELQKGNELALPSKYVNFLYLASHYEKLKGSPEDNEQKQLFVEQHKHYLDEIIEQISEFSKRVILADANLDKVLSAYNKHRDKPIREQAENIIHLFTLTNLGAPAAFKYFDTTIDRKRYTSTKEVLDATLIHQSITGLYETRIDLSQLGGDGGGGGGSGGGGSGGMNPLQLLQPLPAEVKGTKLLAHWNSGATITCIPESFLEDEQPIKQTLIKTIHGEKQQNVYYLTFKVKGRKVEAEVIASPYEYILLSPTDVPWLTQQPLQLTILVPLQEYQDRILNKTALPEEQKQQLKALFTKYDNLWQHWENQVGHRKIRPHNIATGDYPPRPQKQYPINPKAKPSIQIVIDDLLKQGVLTPQNSTMNTPVYPVPKPDGRWRMVLDYREVNKTIPLTAAQNQHSAGILATIVRQKYKTTLDLANGFWAHPITPDSYWLTAFTWQGKQYCWTRLPQGFLNSPALFNADAVDLLKEVPNVQVYVDDIYLSHDNPHEHIQQLEKVFQILLQAGYVVSLKKSEIGQRTVEFLGFNITKEGRGLTDTFKTKLLNVTPPKDLKQLQSILGKLNFARNFIPNFAELVQTLYNLIASSPGKYIEWTEDNTKQLNKVIEALNTASNLEERLPDQRLVIKVNTSPSAGYVRYYNESGKKPIMYLNYVFSKAELKFSMLEKLLTTMHKALIKAMDLAMGQEILVYSPIVSMTKIQKTPLPERKALPIRWITWMTYLEDPRIQFHYDKTLPELKHIPDVYTSSIPPLKHPSQYEGVFCTDGSAIKSPDPTKSNNAGMGIVHAIYNPEYKILNQWSIPLGHHTAQMAEIAAVEFACKKALKVPGPVLVITDSFYVAESANKELPYWKSNGFVNNKKEPLKHISKWKSIAECLSIKPDITIQHEKGHQPINTSIHTEGNALADKLATQGSYVVNAGKRTADGSEFEKRTADGSEFESPKKKAKVE

SEQ ID NO: 740 - protein, 2176 aa, synthetic construct
MPAAKRVKLDGGDKKYSIGLDIGTNSVGWAVITDEYKVPSKKFKVLGNTDRHSIKKNLIGALLFDSGETAEATRLKRTARRRYTRRKNRICYLQEIFSNEMAKVDDSFFHRLEESFLVEEDKKHERHPIFGNIVDEVAYHEKYPTIYHLRKKLVDSTDKADLRLIYLALAHMIKFRGHFLIEGDLNPDNSDVDKLFIQLVQTYNQLFEENPINASGVDAKAILSARLSKSRRLENLIAQLPGEKKNGLFGNLIALSLGLTPNFKSNFDLAEDAKLQLSKDTYDDDLDNLLAQIGDQYADLFLAAKNLSDAILLSDILRVNTEITKAPLSASMIKRYDEHHQDLTLLKALVRQQLPEKYKEIFFDQSKNGYAGYIDGGASQEEFYKFIKPILEKMDGTEELLVKLNREDLLRKQRTFDNGSIPHQIHLGELHAILRRQEDFYPFLKDNREKIEKILTFRIPYYVGPLARGNSRFAWMTRKSEETITPWNFEEVVDKGASAQSFIERMTNFDKNLPNEKVLPKHSLLYEYFTVYNELTKVKYVTEGMRKPAFLSGEQKKAIVDLLFKTNRKVTVKQLKEDYFKKIECFDSVEISGVEDRFNASLGTYHDLLKIIKDKDFLDNEENEDILEDIVLTLTLFEDREMIEERLKTYAHLFDDKVMKQLKRRRYTGWGRLSRKLINGIRDKQSGKTILDFLKSDGFANRNFMQLIHDDSLTFKEDIQKAQVSGQGDSLHEHIANLAGSPAIKKGILQTVKVVDELVKVMGRHKPENIVIEMARENQTTQKGQKNSRERMKRIEEGIKELGSQILKEHPVENTQLQNEKLYLYYLQNGRDMYVDQELDINRLSDYDVDHIVPQSFLKDDSIDNKVLTRSDKARGKSDNVPSEEVVKKMKNYWRQLLNAKLITQRKFDNLTKAERGGLSELDKAGFIKRQLVETRQITKHVAQILDSRMNTKYDENDKLIREVKVITLKSKLVSDFRKDFQFYKVREINNYHHAHDAYLNAVVGTALIKKYPKLESEFVYGDYKVYDVRKMIAKSEQEIGKATAKYFFYSNIMNFFKTEITLANGEIRKRPLIETNGETGEIVWDKGRDFATVRKVLSMPQVNIVKKTEVQTGGFSKESILPKRNSDKLIARKKDWDPKKYGGFDSPTVAYSVLVVAKVEKGKSKKLKSVKELLGITIMERSSFEKNPIDFLEAKGYKEVKKDLIIKLPKYSLFELENGRKRMLASAGELQKGNELALPSKYVNFLYLASHYEKLKGSPEDNEQKQLFVEQHKHYLDEIIEQISEFSKRVILADANLDKVLSAYNKHRDKPIREQAENIIHLFTLTNLGAPAAFKYFDTTIDRKRYTSTKEVLDATLIHQSITGLYETRIDLSQLGGDGGGGGEAAAKGGSGGMNPLQLLQPLPAEVKGTKLLAHWNSGATITCIPESFLEDEQPIKQTLIKTIHGEKQQNVYYLTFKVKGRKVEAEVIASPYEYILLSPTDVPWLTQQPLQLTILVPLQEYQDRILNKTALPEEQKQQLKALFTKYDNLWQHWENQVGHRKIRPHNIATGDYPPRPQKQYPINPKAKPSIQIVIDDLLKQGVLTPQNSTMNTPVYPVPKPDGRWRMVLDYREVNKTIPLTAAQNQHSAGILATIVRQKYKTTLDLANGFWAHPITPDSYWLTAFTWQGKQYCWTRLPQGFLNSPALFNADAVDLLKEVPNVQVYVDDIYLSHDNPHEHIQQLEKVFQILLQAGYVVSLKKSEIGQRTVEFLGFNITKEGRGLTDTFKTKLLNVTPPKDLKQLQSILGKLNFARNFIPNFAELVQTLYNLIASSPGKYIEWTEDNTKQLNKVIEALNTASNLEERLPDQRLVIKVNTSPSAGYVRYYNESGKKPIMYLNYVFSKAELKFSMLEKLLTTMHKALIKAMDLAMGQEILVYSPIVSMTKIQKTPLPERKALPIRWITWMTYLEDPRIQFHYDKTLPELKHIPDVYTSSIPPLKHPSQYEGVFCTDGSAIKSPDPTKSNNAGMGIVHAIYNPEYKILNQWSIPLGHHTAQMAEIAAVEFACKKALKVPGPVLVITDSFYVAESANKELPYWKSNGFVNNKKEPLKHISKWKSIAECLSIKPDITIQHEKGHQPINTSIHTEGNALADKLATQGSYVVNAGKRTADGSEFEKRTADGSEFESPKKKAKVE

SEQ ID NO: 741 - protein, 2012 aa, synthetic construct
MPAAKRVKLDGGDKKYSIGLDIGTNSVGWAVITDEYKVPSKKFKVLGNTDRHSIKKNLIGALLFDSGETAEATRLKRTARRRYTRRKNRICYLQEIFSNEMAKVDDSFFHRLEESFLVEEDKKHERHPIFGNIVDEVAYHEKYPTIYHLRKKLVDSTDKADLRLIYLALAHMIKFRGHFLIEGDLNPDNSDVDKLFIQLVQTYNQLFEENPINASGVDAKAILSARLSKSRRLENLIAQLPGEKKNGLFGNLIALSLGLTPNFKSNFDLAEDAKLQLSKDTYDDDLDNLLAQIGDQYADLFLAAKNLSDAILLSDILRVNTEITKAPLSASMIKRYDEHHQDLTLLKALVRQQLPEKYKEIFFDQSKNGYAGYIDGGASQEEFYKFIKPILEKMDGTEELLVKLNREDLLRKQRTFDNGSIPHQIHLGELHAILRRQEDFYPFLKDNREKIEKILTFRIPYYVGPLARGNSRFAWMTRKSEETITPWNFEEVVDKGASAQSFIERMTNFDKNLPNEKVLPKHSLLYEYFTVYNELTKVKYVTEGMRKPAFLSGEQKKAIVDLLFKTNRKVTVKQLKEDYFKKIECFDSVEISGVEDRFNASLGTYHDLLKIIKDKDFLDNEENEDILEDIVLTLTLFEDREMIEERLKTYAHLFDDKVMKQLKRRRYTGWGRLSRKLINGIRDKQSGKTILDFLKSDGFANRNFMQLIHDDSLTFKEDIQKAQVSGQGDSLHEHIANLAGSPAIKKGILQTVKVVDELVKVMGRHKPENIVIEMARENQTTQKGQKNSRERMKRIEEGIKELGSQILKEHPVENTQLQNEKLYLYYLQNGRDMYVDQELDINRLSDYDVDHIVPQSFLKDDSIDNKVLTRSDKARGKSDNVPSEEVVKKMKNYWRQLLNAKLITQRKFDNLTKAERGGLSELDKAGFIKRQLVETRQITKHVAQILDSRMNTKYDENDKLIREVKVITLKSKLVSDFRKDFQFYKVREINNYHHAHDAYLNAVVGTALIKKYPKLESEFVYGDYKVYDVRKMIAKSEQEIGKATAKYFFYSNIMNFFKTEITLANGEIRKRPLIETNGETGEIVWDKGRDFATVRKVLSMPQVNIVKKTEVQTGGFSKESILPKRNSDKLIARKKDWDPKKYGGFDSPTVAYSVLVVAKVEKGKSKKLKSVKELLGITIMERSSFEKNPIDFLEAKGYKEVKKDLIIKLPKYSLFELENGRKRMLASAGELQKGNELALPSKYVNFLYLASHYEKLKGSPEDNEQKQLFVEQHKHYLDEIIEQISEFSKRVILADANLDKVLSAYNKHRDKPIREQAENIIHLFTLTNLGAPAAFKYFDTTIDRKRYTSTKEVLDATLIHQSITGLYETRIDLSQLGGDGGPAPGGGGGPRSRAIDIPVPHADKISWKITDPVWVDQWPLTYEKTLAAIALVQEQLAAGHIEPTNSPWNTPIFIIKKKSGSWRLLQDLRAVNKVMVPMGALQPGLPSPVAIPLNYHKIVIDLKDCFFTIPLHPEDRPYFAFSVPQINFQSPMPRYQWKVLPQGMANSPTLCQKFVAAAIAPVRSQWPEAYILHYMDDILLACDSAEAAKACYAHIISCLTSYGLKIAPDKVQVSEPFSYLGFELHHQQVFTPRVCLKTDHLKTLNDFQKLLGDIQWLRPYLKLPTSALVPLNNILKGDPNPLSVRALTPEAKQSLALINKAIQNQSVQQISYNLPLVLLLLPTPHTPTAVFWQPNGTDPTKNGSPLLWLHLPASPSKVLLTYPSLLAMLIIKGRYTGRQLFGRDPHSIIIPYTQDQLTWLLQTSDEWAIALSSFTGDIDNHYPSDPVIQFAKLHQFIFPKITKCAPIPQATLVFTDGSSNGIAAYVIDNQPISIKSPYLSAQLVELYAILQVFTVLAHQPFNLYTDSAYIAQSVPLLETVPFIKSSTNATPLFSKLQQLILNRQHPFFIGHLRAHLNLPGPLAEGNALADAATQIFPIISDAGKRTADGSEFEKRTADGSEFESPKKKAKVE

SEQ ID NO: 742 - protein, 2012 aa, synthetic construct
MPAAKRVKLDGGDKKYSIGLDIGTNSVGWAVITDEYKVPSKKFKVLGNTDRHSIKKNLIGALLFDSGETAEATRLKRTARRRYTRRKNRICYLQEIFSNEMAKVDDSFFHRLEESFLVEEDKKHERHPIFGNIVDEVAYHEKYPTIYHLRKKLVDSTDKADLRLIYLALAHMIKFRGHFLIEGDLNPDNSDVDKLFIQLVQTYNQLFEENPINASGVDAKAILSARLSKSRRLENLIAQLPGEKKNGLFGNLIALSLGLTPNFKSNFDLAEDAKLQLSKDTYDDDLDNLLAQIGDQYADLFLAAKNLSDAILLSDILRVNTEITKAPLSASMIKRYDEHHQDLTLLKALVRQQLPEKYKEIFFDQSKNGYAGYIDGGASQEEFYKFIKPILEKMDGTEELLVKLNREDLLRKQRTFDNGSIPHQIHLGELHAILRRQEDFYPFLKDNREKIEKILTFRIPYYVGPLARGNSRFAWMTRKSEETITPWNFEEVVDKGASAQSFIERMTNFDKNLPNEKVLPKHSLLYEYFTVYNELTKVKYVTEGMRKPAFLSGEQKKAIVDLLFKTNRKVTVKQLKEDYFKKIECFDSVEISGVEDRFNASLGTYHDLLKIIKDKDFLDNEENEDILEDIVLTLTLFEDREMIEERLKTYAHLFDDKVMKQLKRRRYTGWGRLSRKLINGIRDKQSGKTILDFLKSDGFANRNFMQLIHDDSLTFKEDIQKAQVSGQGDSLHEHIANLAGSPAIKKGILQTVKVVDELVKVMGRHKPENIVIEMARENQTTQKGQKNSRERMKRIEEGIKELGSQILKEHPVENTQLQNEKLYLYYLQNGRDMYVDQELDINRLSDYDVDHIVPQSFLKDDSIDNKVLTRSDKARGKSDNVPSEEVVKKMKNYWRQLLNAKLITQRKFDNLTKAERGGLSELDKAGFIKRQLVETRQITKHVAQILDSRMNTKYDENDKLIREVKVITLKSKLVSDFRKDFQFYKVREINNYHHAHDAYLNAVVGTALIKKYPKLESEFVYGDYKVYDVRKMIAKSEQEIGKATAKYFFYSNIMNFFKTEITLANGEIRKRPLIETNGETGEIVWDKGRDFATVRKVLSMPQVNIVKKTEVQTGGFSKESILPKRNSDKLIARKKDWDPKKYGGFDSPTVAYSVLVVAKVEKGKSKKLKSVKELLGITIMERSSFEKNPIDFLEAKGYKEVKKDLIIKLPKYSLFELENGRKRMLASAGELQKGNELALPSKYVNFLYLASHYEKLKGSPEDNEQKQLFVEQHKHYLDEIIEQISEFSKRVILADANLDKVLSAYNKHRDKPIREQAENIIHLFTLTNLGAPAAFKYFDTTIDRKRYTSTKEVLDATLIHQSITGLYETRIDLSQLGGDGGGGGGGGGGPRSRAIDIPVPHADKISWKITDPVWVDQWPLTYEKTLAAIALVQEQLAAGHIEPTNSPWNTPIFIIKKKSGSWRLLQDLRAVNKVMVPMGALQPGLPSPVAIPLNYHKIVIDLKDCFFTIPLHPEDRPYFAFSVPQINFQSPMPRYQWKVLPQGMANSPTLCQKFVAAAIAPVRSQWPEAYILHYMDDILLACDSAEAAKACYAHIISCLTSYGLKIAPDKVQVSEPFSYLGFELHHQQVFTPRVCLKTDHLKTLNDFQKLLGDIQWLRPYLKLPTSALVPLNNILKPDPNPLSVRALTPEAKQSLALINKAIQNQSVQQISYNLPLVLLLLPTPHTPTAVFWQPNGTDPTKNGSPLLWLHLPASPSKVLLTYPSLLAMLIIKGRYTGRQLFGRDPHSIIIPYTQDQLTWLLQTSDEWAIALSSFTGDIDNHYPSDPVIQFAKLHQFIFPKITKCAPIPQATLVFTDGSSNGIAAYVIDNQPISIKSPYLSAQLVELYAILQVFTVLAHQPFNLYTDSAYIAQSVPLLETVPFIKSSTNATPLFSKLQQLILNRQHPFFIGHLRAHLNLPGPLAEGNALADAATQIFPIISDAGKRTADGSEFEKRTADGSEFESPKKKAKVE

SEQ ID NO: 743 - protein, 2021 aa, synthetic construct
MPAAKRVKLDGGDKKYSIGLDIGTNSVGWAVITDEYKVPSKKFKVLGNTDRHSIKKNLIGALLFDSGETAEATRLKRTARRRYTRRKNRICYLQEIFSNEMAKVDDSFFHRLEESFLVEEDKKHERHPIFGNIVDEVAYHEKYPTIYHLRKKLVDSTDKADLRLIYLALAHMIKFRGHFLIEGDLNPDNSDVDKLFIQLVQTYNQLFEENPINASGVDAKAILSARLSKSRRLENLIAQLPGEKKNGLFGNLIALSLGLTPNFKSNFDLAEDAKLQLSKDTYDDDLDNLLAQIGDQYADLFLAAKNLSDAILLSDILRVNTEITKAPLSASMIKRYDEHHQDLTLLKALVRQQLPEKYKEIFFDQSKNGYAGYIDGGASQEEFYKFIKPILEKMDGTEELLVKLNREDLLRKQRTFDNGSIPHQIHLGELHAILRRQEDFYPFLKDNREKIEKILTFRIPYYVGPLARGNSRFAWMTRKSEETITPWNFEEVVDKGASAQSFIERMTNFDKNLPNEKVLPKHSLLYEYFTVYNELTKVKYVTEGMRKPAFLSGEQKKAIVDLLFKTNRKVTVKQLKEDYFKKIECFDSVEISGVEDRFNASLGTYHDLLKIIKDKDFLDNEENEDILEDIVLTLTLFEDREMIEERLKTYAHLFDDKVMKQLKRRRYTGWGRLSRKLINGIRDKQSGKTILDFLKSDGFANRNFMQLIHDDSLTFKEDIQKAQVSGQGDSLHEHIANLAGSPAIKKGILQTVKVVDELVKVMGRHKPENIVIEMARENQTTQKGQKNSRERMKRIEEGIKELGSQILKEHPVENTQLQNEKLYLYYLQNGRDMYVDQELDINRLSDYDVDHIVPQSFLKDDSIDNKVLTRSDKARGKSDNVPSEEVVKKMKNYWRQLLNAKLITQRKFDNLTKAERGGLSELDKAGFIKRQLVETRQITKHVAQILDSRMNTKYDENDKLIREVKVITLKSKLVSDFRKDFQFYKVREINNYHHAHDAYLNAVVGTALIKKYPKLESEFVYGDYKVYDVRKMIAKSEQEIGKATAKYFFYSNIMNFFKTEITLANGEIRKRPLIETNGETGEIVWDKGRDFATVRKVLSMPQVNIVKKTEVQTGGFSKESILPKRNSDKLIARKKDWDPKKYGGFDSPTVAYSVLVVAKVEKGKSKKLKSVKELLGITIMERSSFEKNPIDFLEAKGYKEVKKDLIIKLPKYSLFELENGRKRMLASAGELQKGNELALPSKYVNFLYLASHYEKLKGSPEDNEQKQLFVEQHKHYLDEIIEQISEFSKRVILADANLDKVLSAYNKHRDKPIREQAENIIHLFTLTNLGAPAAFKYFDTTIDRKRYTSTKEVLDATLIHQSITGLYETRIDLSQLGGDGGGGSGGSGGSGGSGGSGGPRSRAIDIPVPHADKISWKITDPVWVDQWPLTYEKTLAAIALVQEQLAAGHIEPTNSPWNTPIFIIKKKSGSWRLLQDLRAVNKVMVPMGALQPGLPSPVAPPLNYHKIVIDLKDCFFTIPLHPEDRPYFAFSVPQINFQSPMPRYQWKVLPQGMANSPTLCQKFVAAAIAPVRSQWPEAYILHYMDDILLACDSAEAAKACYAHIISCLTSYGLKIAPDKVQVSEPFSYLGFELHHQQVFTPRVCLKTDHLKTLNDFQKLLGDIQWLRPYLKLPTSALVPLNNILKPDPNPLSVRALTPEAKQSLALINKAIQNQSVQQISYNLPLVLLLLPTPHTPTAVFWQPNGTDPTKNGSPLLWLHLPASPSKVLLTYPSLLAMLIIKGRYTGRQLFGRDPHSIIIPYTQDQLTWLLQTSDEWAIALSSFTGDIDNHYPSDPVIQFAKLHQFIFPKITKCAPIPQATLVFTDGSSNGIAAYVIDNQPISIKSPYLSAQLVELYAILQVFTVLAHQPFNLYTDSAYIAQSVPLLETVPFIKSSTNATPLFSKLQQLILNRQHPFFIGHLRAHLNLPGPLAEGNALADAATQIFPIISDAGKRTADGSEFEKRTADGSEFESPKKKAKVE

SEQ ID NO: 744 - protein, 2017 aa, synthetic construct
MPAAKRVKLDGGDKKYSIGLDIGTNSVGWAVITDEYKVPSKKFKVLGNTDRHSIKKNLIGALLFDSGETAEATRLKRTARRRYTRRKNRICYLQEIFSNEMAKVDDSFFHRLEESFLVEEDKKHERHPIFGNIVDEVAYHEKYPTIYHLRKKLVDSTDKADLRLIYLALAHMIKFRGHFLIEGDLNPDNSDVDKLFIQLVQTYNQLFEENPINASGVDAKAILSARLSKSRRLENLIAQLPGEKKNGLFGNLIALSLGLTPNFKSNFDLAEDAKLQLSKDTYDDDLDNLLAQIGDQYADLFLAAKNLSDAILLSDILRVNTEITKAPLSASMIKRYDEHHQDLTLLKALVRQQLPEKYKEIFFDQSKNGYAGYIDGGASQEEFYKFIKPILEKMDGTEELLVKLNREDLLRKQRTFDNGSIPHQIHLGELHAILRRQEDFYPFLKDNREKIEKILTFRIPYYVGPLARGNSRFAWMTRKSEETITPWNFEEVVDKGASAQSFIERMTNFDKNLPNEKVLPKHSLLYEYFTVYNELTKVKYVTEGMRKPAFLSGEQKKAIVDLLFKTNRKVTVKQLKEDYFKKIECFDSVEISGVEDRFNASLGTYHDLLKIIKDKDFLDNEENEDILEDIVLTLTLFEDREMIEERLKTYAHLFDDKVMKQLKRRRYTGWGRLSRKLINGIRDKQSGKTILDFLKSDGFANRNFMQLIHDDSLTFKEDIQKAQVSGQGDSLHEHIANLAGSPAIKKGILQTVKVVDELVKVMGRHKPENIVIEMARENQTTQKGQKNSRERMKRIEEGIKELGSQILKEHPVENTQLQNEKLYLYYLQNGRDMYVDQELDINRLSDYDVDHIVPQSFLKDDSIDNKVLTRSDKARGKSDNVPSEEVVKKMKNYWRQLLNAKLITQRKFDNLTKAERGGLSELDKAGFIKRQLVETRQITKHVAQILDSRMNTKYDENDKLIREVKVITLKSKLVSDFRKDFQFYKVREINNYHHAHDAYLNAVVGTALIKKYPKLESEFVYGDYKVYDVRKMIAKSEQEIGKATAKYFFYSNIMNFFKTEITLANGEIRKRPLIETNGETGEIVWDKGRDFATVRKVLSMPQVNIVKKTEVQTGGFSKESILPKRNSDKLIARKKDWDPKKYGGFDSPTVAYSVLVVAKVEKGKSKKLKSVKELLGITIMERSSFEKNPIDFLEAKGYKEVKKDLIIKLPKYSLFELENGRKRMLASAGELQKGNELALPSKYVNFLYLASHYEKLKGSPEDNEQKQLFVEQHKHYLDEIIEQISEFSKRVILADANLDKVLSAYNKHRDKPIREQAENIIHLFTLTNLGAPAAFKYFDTTIDRKRYTSTKEVLDATLIHQSITGLYETRIDLSQLGGDGGGSSPAPEAAAKGGPRSRAIDIPVPHADKISWKITDPVWVDQWPLTYEKTLAAIALVQEQLAAGHIEPTNSPWNTPIFIIKKKSGSWRLLQDLRAVNKVMVPMGALQPGLPSPVAPPLNYHKIVIDLKDCFFTIPLHPEDRPYFAFSVPQINFQSPMPRYQWKVLPQGMANSPTLCQKFVAAAIAPVRSQWPEAYILHYMDDILLACDSAEAAKACYAHIISCLTSYGLKIAPDKVQVSEPFSYLGFELHHQQVFTPRVCLKTDHLKTLNDFQKLLGDIQWLRPYLKLPTSALVPLNNILKPDPNPLSVRALTPEAKQSLALINKAIQNQSVQQISYNLPLVLLLLPTPHTPTAVFWQPNGTDPTKNGSPLLWLHLPASPSKVLLTYPSLLAMLIIKGRYTGRQLFGRDPHSIIIPYTQDQLTWLLQTSDEWAIALSSFTGDIDNHYPSDPVIQFAKLHQFIFPKITKCAPIPQATLVFTDGSSNGIAAYVIDNQPISIKSPYLSAQLVELYAILQVFTVLAHQPFNLYTDSAYIAQSVPLLETVPFIKSSTNATPLFSKLQQLILNRQHPFFIGHLRAHLNLPGPLAEGNALADAATQIFPIISDAGKRTADGSEFEKRTADGSEFESPKKKAKVE

SEQ ID NO: 745 - protein, 2032 aa, synthetic construct
MPAAKRVKLDGGDKKYSIGLDIGTNSVGWAVITDEYKVPSKKFKVLGNTDRHSIKKNLIGALLFDSGETAEATRLKRTARRRYTRRKNRICYLQEIFSNEMAKVDDSFFHRLEESFLVEEDKKHERHPIFGNIVDEVAYHEKYPTIYHLRKKLVDSTDKADLRLIYLALAHMIKFRGHFLIEGDLNPDNSDVDKLFIQLVQTYNQLFEENPINASGVDAKAILSARLSKSRRLENLIAQLPGEKKNGLFGNLIALSLGLTPNFKSNFDLAEDAKLQLSKDTYDDDLDNLLAQIGDQYADLFLAAKNLSDAILLSDILRVNTEITKAPLSASMIKRYDEHHQDLTLLKALVRQQLPEKYKEIFFDQSKNGYAGYIDGGASQEEFYKFIKPILEKMDGTEELLVKLNREDLLRKQRTFDNGSIPHQIHLGELHAILRRQEDFYPFLKDNREKIEKILTFRIPYYVGPLARGNSRFAWMTRKSEETITPWNFEEVVDKGASAQSFIERMTNFDKNLPNEKVLPKHSLLYEYFTVYNELTKVKYVTEGMRKPAFLSGEQKKAIVDLLFKTNRKVTVKQLKEDYFKKIECFDSVEISGVEDRFNASLGTYHDLLKIIKDKDFLDNEENEDILEDIVLTLTLFEDREMIEERLKTYAHLFDDKVMKQLKRRRYTGWGRLSRKLINGIRDKQSGKTILDFLKSDGFANRNFMQLIHDDSLTFKEDIQKAQVSGQGDSLHEHIANLAGSPAIKKGILQTVKVVDELVKVMGRHKPENIVIEMARENQTTQKGQKNSRERMKRIEEGIKELGSQILKEHPVENTQLQNEKLYLYYLQNGRDMYVDQELDINRLSDYDVDHIVPQSFLKDDSIDNKVLTRSDKARGKSDNVPSEEVVKKMKNYWRQLLNAKLITQRKFDNLTKAERGGLSELDKAGFIKRQLVETRQITKHVAQILDSRMNTKYDENDKLIREVKVITLKSKLVSDFRKDFQFYKVREINNYHHAHDAYLNAVVGTALIKKYPKLESEFVYGDYKVYDVRKMIAKSEQEIGKATAKYFFYSNIMNFFKTEITLANGEIRKRPLIETNGETGEIVWDKGRDFATVRKVLSMPQVNIVKKTEVQTGGFSKESILPKRNSDKLIARKKDWDPKKYGGFDSPTVAYSVLVVAKVEKGKSKKLKSVKELLGITIMERSSFEKNPIDFLEAKGYKEVKKDLIIKLPKYSLFELENGRKRMLASAGELQKGNELALPSKYVNFLYLASHYEKLKGSPEDNEQKQLFVEQHKHYLDEIIEQISEFSKRVILADANLDKVLSAYNKHRDKPIREQAENIIHLFTLTNLGAPAAFKYFDTTIDRKRYTSTKEVLDATLIHQSITGLYETRIDLSQLGGDGGSGGSSGGSSGSETPGTSESATPESSGGSSGGSSGGLATAVDILAPQRYADPITWKSDEPVWVDQWPLTQEKLAAAQQLVQEQLQAGHIIESNSPWNTPIFVIKKKSGKWRLLQDLRAVNATMVLMGALQPGLPSPVAIPQGYFKIVIDLKDCFFTIPLQPVDQKRFAFSLPSTNFKQPMKRYQWKVLPQGMANSPTLCQKYVAAAIEPVRKSWAQMYIIHYMDDILIAGKLGEQVLQCFAQLKQALTTTGLQIAPEKVQLQDPYTYLGFQINGPKITNQKAVIRRDKLQTLNDFQKLLGDINWLRPYLHLTTGDLKPLFDILKGDSNPNSPRSLSEAALASLQKVETAIAEQFVTQIDYTQPLTFLIFNTTLTPTGLFWQNNPVMWVHLPASPKKVLLPYYDAIADLIILGRDNSKKYFGLEPSTIIQPYSKSQIHWLMQNTETWPIACASYAGNIDNHYPPNKLIQFCKLHAVVFPRIISKTPLDNALLVFTDGSSTGIAAYTFEKTTVRFKTSHTSAQLVELQALIAVLSAFPHRALNVYTDSAYLAHSIPLLETVSHIKHISDTAKFFLQCQQLIYNRSIPFYLGHIRAHSGLPGPLSQGNHITDLATKVVATTLTTAGKRTADGSEFEKRTADGSEFESPKKKAKVE

SEQ ID NO: 746 - protein, 2045 aa, synthetic construct
MPAAKRVKLDGGDKKYSIGLDIGTNSVGWAVITDEYKVPSKKFKVLGNTDRHSIKKNLIGALLFDSGETAEATRLKRTARRRYTRRKNRICYLQEIFSNEMAKVDDSFFHRLEESFLVEEDKKHERHPIFGNIVDEVAYHEKYPTIYHLRKKLVDSTDKADLRLIYLALAHMIKFRGHFLIEGDLNPDNSDVDKLFIQLVQTYNQLFEENPINASGVDAKAILSARLSKSRRLENLIAQLPGEKKNGLFGNLIALSLGLTPNFKSNFDLAEDAKLQLSKDTYDDDLDNLLAQIGDQYADLFLAAKNLSDAILLSDILRVNTEITKAPLSASMIKRYDEHHQDLTLLKALVRQQLPEKYKEIFFDQSKNGYAGYIDGGASQEEFYKFIKPILEKMDGTEELLVKLNREDLLRKQRTFDNGSIPHQIHLGELHAILRRQEDFYPFLKDNREKIEKILTFRIPYYVGPLARGNSRFAWMTRKSEETITPWNFEEVVDKGASAQSFIERMTNFDKNLPNEKVLPKHSLLYEYFTVYNELTKVKYVTEGMRKPAFLSGEQKKAIVDLLFKTNRKVTVKQLKEDYFKKIECFDSVEISGVEDRFNASLGTYHDLLKIIKDKDFLDNEENEDILEDIVLTLTLFEDREMIEERLKTYAHLFDDKVMKQLKRRRYTGWGRLSRKLINGIRDKQSGKTILDFLKSDGFANRNFMQLIHDDSLTFKEDIQKAQVSGQGDSLHEHIANLAGSPAIKKGILQTVKVVDELVKVMGRHKPENIVIEMARENQTTQKGQKNSRERMKRIEEGIKELGSQILKEHPVENTQLQNEKLYLYYLQNGRDMYVDQELDINRLSDYDVDHIVPQSFLKDDSIDNKVLTRSDKARGKSDNVPSEEVVKKMKNYWRQLLNAKLITQRKFDNLTKAERGGLSELDKAGFIKRQLVETRQITKHVAQILDSRMNTKYDENDKLIREVKVITLKSKLVSDFRKDFQFYKVREINNYHHAHDAYLNAVVGTALIKKYPKLESEFVYGDYKVYDVRKMIAKSEQEIGKATAKYFFYSNIMNFFKTEITLANGEIRKRPLIETNGETGEIVWDKGRDFATVRKVLSMPQVNIVKKTEVQTGGFSKESILPKRNSDKLIARKKDWDPKKYGGFDSPTVAYSVLVVAKVEKGKSKKLKSVKELLGITIMERSSFEKNPIDFLEAKGYKEVKKDLIIKLPKYSLFELENGRKRMLASAGELQKGNELALPSKYVNFLYLASHYEKLKGSPEDNEQKQLFVEQHKHYLDEIIEQISEFSKRVILADANLDKVLSAYNKHRDKPIREQAENIIHLFTLTNLGAPAAFKYFDTTIDRKRYTSTKEVLDATLIHQSITGLYETRIDLSQLGGDGGAEAAAKEAAAKEAAAKEAAAKALEAEAAAKEAAAKEAAAKEAAAKAGGLATAVDILAPQRYADPITWKSDEPVWVDQWPLTQEKLAAAQQLVQEQLQAGHIIESNSPWNTPIFVIKKKSGKWRLLQDLRAVNATMVLMGALQPGLPSPVAIPQGYFKIVIDLKDCFFTIPLQPVDQKRFAFSLPSTNFKQPMKRYQWKVLPQGMANSPTLCQKYVAAAIEPVRKSWAQMYIIHYMDDILIAGKLGEQVLQCFAQLKQALTTTGLQIAPEKVQLQDPYTYLGFQINGPKITNQKAVIRRDKLQTLNDFQKLLGDINWLRPYLHLTTGDLKPLFDILKGDSNPNSPRSLSEAALASLQKVETAIAEQFVTQIDYTQPLTFLIFNTTLTPTGLFWQNNPVMWVHLPASPKKVLLPYYDAIADLIILGRDNSKKYFGLEPSTIIQPYSKSQIHWLMQNTETWPIACASYAGNIDNHYPPNKLIQFCKLHAVVFPRIISKTPLDNALLVFTDGSSTGIAAYTFEKTTVRFKTSHTSAQLVELQALIAVLSAFPHRALNVYTDSAYLAHSIPLLETVSHIKHISDTAKFFLQCQQLIYNRSIPFYLGHIRAHSGLPGPLSQGNHITDLATKVVATTLTTAGKRTADGSEFEKRTADGSEFESPKKKAKVE

SEQ ID NO: 747 - protein, 2029 aa, synthetic construct
MPAAKRVKLDGGDKKYSIGLDIGTNSVGWAVITDEYKVPSKKFKVLGNTDRHSIKKNLIGALLFDSGETAEATRLKRTARRRYTRRKNRICYLQEIFSNEMAKVDDSFFHRLEESFLVEEDKKHERHPIFGNIVDEVAYHEKYPTIYHLRKKLVDSTDKADLRLIYLALAHMIKFRGHFLIEGDLNPDNSDVDKLFIQLVQTYNQLFEENPINASGVDAKAILSARLSKSRRLENLIAQLPGEKKNGLFGNLIALSLGLTPNFKSNFDLAEDAKLQLSKDTYDDDLDNLLAQIGDQYADLFLAAKNLSDAILLSDILRVNTEITKAPLSASMIKRYDEHHQDLTLLKALVRQQLPEKYKEIFFDQSKNGYAGYIDGGASQEEFYKFIKPILEKMDGTEELLVKLNREDLLRKQRTFDNGSIPHQIHLGELHAILRRQEDFYPFLKDNREKIEKILTFRIPYYVGPLARGNSRFAWMTRKSEETITPWNFEEVVDKGASAQSFIERMTNFDKNLPNEKVLPKHSLLYEYFTVYNELTKVKYVTEGMRKPAFLSGEQKKAIVDLLFKTNRKVTVKQLKEDYFKKIECFDSVEISGVEDRFNASLGTYHDLLKIIKDKDFLDNEENEDILEDIVLTLTLFEDREMIEERLKTYAHLFDDKVMKQLKRRRYTGWGRLSRKLINGIRDKQSGKTILDFLKSDGFANRNFMQLIHDDSLTFKEDIQKAQVSGQGDSLHEHIANLAGSPAIKKGILQTVKVVDELVKVMGRHKPENIVIEMARENQTTQKGQKNSRERMKRIEEGIKELGSQILKEHPVENTQLQNEKLYLYYLQNGRDMYVDQELDINRLSDYDVDHIVPQSFLKDDSIDNKVLTRSDKARGKSDNVPSEEVVKKMKNYWRQLLNAKLITQRKFDNLTKAERGGLSELDKAGFIKRQLVETRQITKHVAQILDSRMNTKYDENDKLIREVKVITLKSKLVSDFRKDFQFYKVREINNYHHAHDAYLNAVVGTALIKKYPKLESEFVYGDYKVYDVRKMIAKSEQEIGKATAKYFFYSNIMNFFKTEITLANGEIRKRPLIETNGETGEIVWDKGRDFATVRKVLSMPQVNIVKKTEVQTGGFSKESILPKRNSDKLIARKKDWDPKKYGGFDSPTVAYSVLVVAKVEKGKSKKLKSVKELLGITIMERSSFEKNPIDFLEAKGYKEVKKDLIIKLPKYSLFELENGRKRMLASAGELQKGNELALPSKYVNFLYLASHYEKLKGSPEDNEQKQLFVEQHKHYLDEIIEQISEFSKRVILADANLDKVLSAYNKHRDKPIREQAENIIHLFTLTNLGAPAAFKYFDTTIDRKRYTSTKEVLDATLIHQSITGLYETRIDLSQLGGDGGEAAAKEAAAKEAAAKEAAAKEAAAKEAAAKGGLATAVDILAPQRYADPITWKSDEPVWVDQWPLTQEKLAAAQQLVQEQLQAGHIIESNSPWNTPIFVIKKKSGKWRLLQDLRAVNATMVLMGALQPGLPSPVAIPQGYFKIVIDLKDCFFTIPLQPVDQKRFAFSLPSTNFKQPMKRYQWKVLPQGMANSPTLCQKYVAAAIEPVRKSWAQMYIIHYMDDILIAGKLGEQVLQCFAQLKQALTTTGLQIAPEKVQLQDPYTYLGFQINGPKITNQKAVIRRDKLQTLNDFQKLLGDINWLRPYLHLTTGDLKPLFDILKGDSNPNSPRSLSEAALASLQKVETAIAEQFVTQIDYTQPLTFLIFNTTLTPTGLFWQNNPVMWVHLPASPKKVLLPYYDAIADLIILGRDNSKKYFGLEPSTIIQPYSKSQIHWLMQNTETWPIACASYAGNIDNHYPPNKLIQFCKLHAVVFPRIISKTPLDNALLVFTDGSSTGIAAYTFEKTTVRFKTSHTSAQLVELQALIAVLSAFPHRALNVYTDSAYLAHSIPLLETVSHIKHISDTAKFFLQCQQLIYNRSIPFYLGHIRAHSGLPGPLSQGNHITDLATKVVATTLTTAGKRTADGSEFEKRTADGSEFESPKKKAKVE

SEQ ID NO: 748 - protein, 2024 aa, synthetic construct
MPAAKRVKLDGGDKKYSIGLDIGTNSVGWAVITDEYKVPSKKFKVLGNTDRHSIKKNLIGALLFDSGETAEATRLKRTARRRYTRRKNRICYLQEIFSNEMAKVDDSFFHRLEESFLVEEDKKHERHPIFGNIVDEVAYHEKYPTIYHLRKKLVDSTDKADLRLIYLALAHMIKFRGHFLIEGDLNPDNSDVDKLFIQLVQTYNQLFEENPINASGVDAKAILSARLSKSRRLENLIAQLPGEKKNGLFGNLIALSLGLTPNFKSNFDLAEDAKLQLSKDTYDDDLDNLLAQIGDQYADLFLAAKNLSDAILLSDILRVNTEITKAPLSASMIKRYDEHHQDLTLLKALVRQQLPEKYKEIFFDQSKNGYAGYIDGGASQEEFYKFIKPILEKMDGTEELLVKLNREDLLRKQRTFDNGSIPHQIHLGELHAILRRQEDFYPFLKDNREKIEKILTFRIPYYVGPLARGNSRFAWMTRKSEETITPWNFEEVVDKGASAQSFIERMTNFDKNLPNEKVLPKHSLLYEYFTVYNELTKVKYVTEGMRKPAFLSGEQKKAIVDLLFKTNRKVTVKQLKEDYFKKIECFDSVEISGVEDRFNASLGTYHDLLKIIKDKDFLDNEENEDILEDIVLTLTLFEDREMIEERLKTYAHLFDDKVMKQLKRRRYTGWGRLSRKLINGIRDKQSGKTILDFLKSDGFANRNFMQLIHDDSLTFKEDIQKAQVSGQGDSLHEHIANLAGSPAIKKGILQTVKVVDELVKVMGRHKPENIVIEMARENQTTQKGQKNSRERMKRIEEGIKELGSQILKEHPVENTQLQNEKLYLYYLQNGRDMYVDQELDINRLSDYDVDHIVPQSFLKDDSIDNKVLTRSDKARGKSDNVPSEEVVKKMKNYWRQLLNAKLITQRKFDNLTKAERGGLSELDKAGFIKRQLVETRQITKHVAQILDSRMNTKYDENDKLIREVKVITLKSKLVSDFRKDFQFYKVREINNYHHAHDAYLNAVVGTALIKKYPKLESEFVYGDYKVYDVRKMIAKSEQEIGKATAKYFFYSNIMNFFKTEITLANGEIRKRPLIETNGETGEIVWDKGRDFATVRKVLSMPQVNIVKKTEVQTGGFSKESILPKRNSDKLIARKKDWDPKKYGGFDSPTVAYSVLVVAKVEKGKSKKLKSVKELLGITIMERSSFEKNPIDFLEAKGYKEVKKDLIIKLPKYSLFELENGRKRMLASAGELQKGNELALPSKYVNFLYLASHYEKLKGSPEDNEQKQLFVEQHKHYLDEIIEQISEFSKRVILADANLDKVLSAYNKHRDKPIREQAENIIHLFTLTNLGAPAAFKYFDTTIDRKRYTSTKEVLDATLIHQSITGLYETRIDLSQLGGDGGEAAAKEAAAKEAAAKEAAAKEAAAKGGLATAVDILAPQRYADPITWKSDEPVWVDQWPLTQEKLAAAQQLVQEQLQAGHIIESNSPWNTPIFVIKKKSGKWRLLQDLRAVNATMVLMGALQPGLPSPVAIPQGYFKIVIDLKDCFFTIPLQPVDQKRFAFSLPSTNFKQPMKRYQWKVLPQGMANSPTLCQKYVAAAIEPVRKSWAQMYIIHYMDDILIAGKLGEQVLQCFAQLKQALTTTGLQIAPEKVQLQDPYTYLGFQINGPKITNQKAVIRRDKLQTLNDFQKLLGDINWLRPYLHLTTGDLKPLFDILKGDSNPNSPRSLSEAALASLQKVETAIAEQFVTQIDYTQPLTFLIFNTTLTPTGLFWQNNPVMWVHLPASPKKVLLPYYDAIADLIILGRDNSKKYFGLEPSTIIQPYSKSQIHWLMQNTETWPIACASYAGNIDNHYPPNKLIQFCKLHAVVFPRIISKTPLDNALLVFTDGSSTGIAAYTFEKTTVRFKTSHTSAQLVELQALIAVLSAFPHRALNVYTDSAYLAHSIPLLETVSHIKHISDTAKFFLQCQQLIYNRSIPFYLGHIRAHSGLPGPLSQGNHITDLATKVVATTLTTAGKRTADGSEFEKRTADGSEFESPKKKAKVE

SEQ ID NO: 749 - protein, 2012 aa, synthetic construct
MPAAKRVKLDGGDKKYSIGLDIGTNSVGWAVITDEYKVPSKKFKVLGNTDRHSIKKNLIGALLFDSGETAEATRLKRTARRRYTRRKNRICYLQEIFSNEMAKVDDSFFHRLEESFLVEEDKKHERHPIFGNIVDEVAYHEKYPTIYHLRKKLVDSTDKADLRLIYLALAHMIKFRGHFLIEGDLNPDNSDVDKLFIQLVQTYNQLFEENPINASGVDAKAILSARLSKSRRLENLIAQLPGEKKNGLFGNLIALSLGLTPNFKSNFDLAEDAKLQLSKDTYDDDLDNLLAQIGDQYADLFLAAKNLSDAILLSDILRVNTEITKAPLSASMIKRYDEHHQDLTLLKALVRQQLPEKYKEIFFDQSKNGYAGYIDGGASQEEFYKFIKPILEKMDGTEELLVKLNREDLLRKQRTFDNGSIPHQIHLGELHAILRRQEDFYPFLKDNREKIEKILTFRIPYYVGPLARGNSRFAWMTRKSEETITPWNFEEVVDKGASAQSFIERMTNFDKNLPNEKVLPKHSLLYEYFTVYNELTKVKYVTEGMRKPAFLSGEQKKAIVDLLFKTNRKVTVKQLKEDYFKKIECFDSVEISGVEDRFNASLGTYHDLLKIIKDKDFLDNEENEDILEDIVLTLTLFEDREMIEERLKTYAHLFDDKVMKQLKRRRYTGWGRLSRKLINGIRDKQSGKTILDFLKSDGFANRNFMQLIHDDSLTFKEDIQKAQVSGQGDSLHEHIANLAGSPAIKKGILQTVKVVDELVKVMGRHKPENIVIEMARENQTTQKGQKNSRERMKRIEEGIKELGSQILKEHPVENTQLQNEKLYLYYLQNGRDMYVDQELDINRLSDYDVDHIVPQSFLKDDSIDNKVLTRSDKARGKSDNVPSEEVVKKMKNYWRQLLNAKLITQRKFDNLTKAERGGLSELDKAGFIKRQLVETRQITKHVAQILDSRMNTKYDENDKLIREVKVITLKSKLVSDFRKDFQFYKVREINNYHHAHDAYLNAVVGTALIKKYPKLESEFVYGDYKVYDVRKMIAKSEQEIGKATAKYFFYSNIMNFFKTEITLANGEIRKRPLIETNGETGEIVWDKGRDFATVRKVLSMPQVNIVKKTEVQTGGFSKESILPKRNSDKLIARKKDWDPKKYGGFDSPTVAYSVLVVAKVEKGKSKKLKSVKELLGITIMERSSFEKNPIDFLEAKGYKEVKKDLIIKLPKYSLFELENGRKRMLASAGELQKGNELALPSKYVNFLYLASHYEKLKGSPEDNEQKQLFVEQHKHYLDEIIEQISEFSKRVILADANLDKVLSAYNKHRDKPIREQAENIIHLFTLTNLGAPAAFKYFDTTIDRKRYTSTKEVLDATLIHQSITGLYETRIDLSQLGGDGGPAPAPAPAPAPAPGGLATAVDILAPQRYADPITWKSDEPVWVDQWPLTQEKLAAAQQLVQEQLQAGHIIESNSPWNTPIFVIKKKSGKWRLLQDLRAVNATMVLMGALQPGLPSPVAIPQGYFKIVIDLKDCFFTIPLQPVDQKRFAFSLPSTNFKQPMKRYQWKVLPQGMANSPTLCQKYVAAAIEPVRKSWAQMYIIHYMDDILIAGKLGEQVLQCFAQLKQALTTTGLQIAPEKVQLQDPYTYLGFQINGPKITNQKAVIRRDKLQTLNDFQKLLGDINWLRPYLHLTTGDLKPLFDILKGDSNPNSPRSLSEAALASLQKVETAIAEQFVTQIDYTQPLTFLIFNTTLTPTGLFWQNNPVMWVHLPASPKKVLLPYYDAIADLIILGRDNSKKYFGLEPSTIIQPYSKSQIHWLMQNTETWPIACASYAGNIDNHYPPNKLIQFCKLHAVVFPRIISKTPLDNALLVFTDGSSTGIAAYTFEKTTVRFKTSHTSAQLVELQALIAVLSAFPHRALNVYTDSAYLAHSIPLLETVSHIKHISDTAKFFLQCQQLIYNRSIPFYLGHIRAHSGLPGPLSQGNHITDLATKVVATTLTTAGKRTADGSEFEKRTADGSEFESPKKKAKVE

SEQ ID NO: 750 - protein, 2010 aa, synthetic construct
MPAAKRVKLDGGDKKYSIGLDIGTNSVGWAVITDEYKVPSKKFKVLGNTDRHSIKKNLIGALLFDSGETAEATRLKRTARRRYTRRKNRICYLQEIFSNEMAKVDDSFFHRLEESFLVEEDKKHERHPIFGNIVDEVAYHEKYPTIYHLRKKLVDSTDKADLRLIYLALAHMIKFRGHFLIEGDLNPDNSDVDKLFIQLVQTYNQLFEENPINASGVDAKAILSARLSKSRRLENLIAQLPGEKKNGLFGNLIALSLGLTPNFKSNFDLAEDAKLQLSKDTYDDDLDNLLAQIGDQYADLFLAAKNLSDAILLSDILRVNTEITKAPLSASMIKRYDEHHQDLTLLKALVRQQLPEKYKEIFFDQSKNGYAGYIDGGASQEEFYKFIKPILEKMDGTEELLVKLNREDLLRKQRTFDNGSIPHQIHLGELHAILRRQEDFYPFLKDNREKIEKILTFRIPYYVGPLARGNSRFAWMTRKSEETITPWNFEEVVDKGASAQSFIERMTNFDKNLPNEKVLPKHSLLYEYFTVYNELTKVKYVTEGMRKPAFLSGEQKKAIVDLLFKTNRKVTVKQLKEDYFKKIECFDSVEISGVEDRFNASLGTYHDLLKIIKDKDFLDNEENEDILEDIVLTLTLFEDREMIEERLKTYAHLFDDKVMKQLKRRRYTGWGRLSRKLINGIRDKQSGKTILDFLKSDGFANRNFMQLIHDDSLTFKEDIQKAQVSGQGDSLHEHIANLAGSPAIKKGILQTVKVVDELVKVMGRHKPENIVIEMARENQTTQKGQKNSRERMKRIEEGIKELGSQILKEHPVENTQLQNEKLYLYYLQNGRDMYVDQELDINRLSDYDVDHIVPQSFLKDDSIDNKVLTRSDKARGKSDNVPSEEVVKKMKNYWRQLLNAKLITQRKFDNLTKAERGGLSELDKAGFIKRQLVETRQITKHVAQILDSRMNTKYDENDKLIREVKVITLKSKLVSDFRKDFQFYKVREINNYHHAHDAYLNAVVGTALIKKYPKLESEFVYGDYKVYDVRKMIAKSEQEIGKATAKYFFYSNIMNFFKTEITLANGEIRKRPLIETNGETGEIVWDKGRDFATVRKVLSMPQVNIVKKTEVQTGGFSKESILPKRNSDKLIARKKDWDPKKYGGFDSPTVAYSVLVVAKVEKGKSKKLKSVKELLGITIMERSSFEKNPIDFLEAKGYKEVKKDLIIKLPKYSLFELENGRKRMLASAGELQKGNELALPSKYVNFLYLASHYEKLKGSPEDNEQKQLFVEQHKHYLDEIIEQISEFSKRVILADANLDKVLSAYNKHRDKPIREQAENIIHLFTLTNLGAPAAFKYFDTTIDRKRYTSTKEVLDATLIHQSITGLYETRIDLSQLGGDGGPAPAPAPAPAPGGLATAVDILAPQRYADPITWKSDEPVWVDQWPLTQEKLAAAQQLVQEQLQAGHIIESNSPWNTPIFVIKKKSGKWRLLQDLRAVNATMVLMGALQPGLPSPVAIPQGYFKIVIDLKDCFFTIPLQPVDQKRFAFSLPSTNFKQPMKRYQWKVLPQGMANSPTLCQKYVAAAIEPVRKSWAQMYIIHYMDDILIAGKLGEQVLQCFAQLKQALTTTGLQIAPEKVQLQDPYTYLGFQINGPKITNQKAVIRRDKLQTLNDFQKLLGDINWLRPYLHLTTGDLKPLFDILKGDSNPNSPRSLSEAALASLQKVETAIAEQFVTQIDYTQPLTFLIFNTTLTPTGLFWQNNPVMWVHLPASPKKVLLPYYDAIADLIILGRDNSKKYFGLEPSTIIQPYSKSQIHWLMQNTETWPIACASYAGNIDNHYPPNKLIQFCKLHAVVFPRIISKTPLDNALLVFTDGSSTGIAAYTFEKTTVRFKTSHTSAQLVELQALIAVLSAFPHRALNVYTDSAYLAHSIPLLETVSHIKHISDTAKFFLQCQQLIYNRSIPFYLGHIRAHSGLPGPLSQGNHITDLATKVVATTLTTAGKRTADGSEFEKRTADGSEFESPKKKAKVE

SEQ ID NO: 751 - protein, 2014 aa, synthetic construct
MPAAKRVKLDGGDKKYSIGLDIGTNSVGWAVITDEYKVPSKKFKVLGNTDRHSIKKNLIGALLFDSGETAEATRLKRTARRRYTRRKNRICYLQEIFSNEMAKVDDSFFHRLEESFLVEEDKKHERHPIFGNIVDEVAYHEKYPTIYHLRKKLVDSTDKADLRLIYLALAHMIKFRGHFLIEGDLNPDNSDVDKLFIQLVQTYNQLFEENPINASGVDAKAILSARLSKSRRLENLIAQLPGEKKNGLFGNLIALSLGLTPNFKSNFDLAEDAKLQLSKDTYDDDLDNLLAQIGDQYADLFLAAKNLSDAILLSDILRVNTEITKAPLSASMIKRYDEHHQDLTLLKALVRQQLPEKYKEIFFDQSKNGYAGYIDGGASQEEFYKFIKPILEKMDGTEELLVKLNREDLLRKQRTFDNGSIPHQIHLGELHAILRRQEDFYPFLKDNREKIEKILTFRIPYYVGPLARGNSRFAWMTRKSEETITPWNFEEVVDKGASAQSFIERMTNFDKNLPNEKVLPKHSLLYEYFTVYNELTKVKYVTEGMRKPAFLSGEQKKAIVDLLFKTNRKVTVKQLKEDYFKKIECFDSVEISGVEDRFNASLGTYHDLLKIIKDKDFLDNEENEDILEDIVLTLTLFEDREMIEERLKTYAHLFDDKVMKQLKRRRYTGWGRLSRKLINGIRDKQSGKTILDFLKSDGFANRNFMQLIHDDSLTFKEDIQKAQVSGQGDSLHEHIANLAGSPAIKKGILQTVKVVDELVKVMGRHKPENIVIEMARENQTTQKGQKNSRERMKRIEEGIKELGSQILKEHPVENTQLQNEKLYLYYLQNGRDMYVDQELDINRLSDYDVDHIVPQSFLKDDSIDNKVLTRSDKARGKSDNVPSEEVVKKMKNYWRQLLNAKLITQRKFDNLTKAERGGLSELDKAGFIKRQLVETRQITKHVAQILDSRMNTKYDENDKLIREVKVITLKSKLVSDFRKDFQFYKVREINNYHHAHDAYLNAVVGTALIKKYPKLESEFVYGDYKVYDVRKMIAKSEQEIGKATAKYFFYSNIMNFFKTEITLANGEIRKRPLIETNGETGEIVWDKGRDFATVRKVLSMPQVNIVKKTEVQTGGFSKESILPKRNSDKLIARKKDWDPKKYGGFDSPTVAYSVLVVAKVEKGKSKKLKSVKELLGITIMERSSFEKNPIDFLEAKGYKEVKKDLIIKLPKYSLFELENGRKRMLASAGELQKGNELALPSKYVNFLYLASHYEKLKGSPEDNEQKQLFVEQHKHYLDEIIEQISEFSKRVILADANLDKVLSAYNKHRDKPIREQAENIIHLFTLTNLGAPAAFKYFDTTIDRKRYTSTKEVLDATLIHQSITGLYETRIDLSQLGGDGGGSSGSSGSSGSSGSSGGLATAVDILAPQRYADPITWKSDEPVWVDQWPLTQEKLAAAQQLVQEQLQAGHIIESNSPWNTPIFVIKKKSGKWRLLQDLRAVNATMVLMGALQPGLPSPVAIPQGYFKIVIDLKDCFFTIPLQPVDQKRFAFSLPSTNFKQPMKRYQWKVLPQGMANSPTLCQKYVAAAIEPVRKSWAQMYIIHYMDDILIAGKLGEQVLQCFAQLKQALTTTGLQIAPEKVQLQDPYTYLGFQINGPKITNQKAVIRRDKLQTLNDFQKLLGDINWLRPYLHLTTGDLKPLFDILKGDSNPNSPRSLSEAALASLQKVETAIAEQFVTQIDYTQPLTFLIFNTTLTPTGLFWQNNPVMWVHLPASPKKVLLPYYDAIADLIILGRDNSKKYFGLEPSTIIQPYSKSQIHWLMQNTETWPIACASYAGNIDNHYPPNKLIQFCKLHAVVFPRIISKTPLDNALLVFTDGSSTGIAAYTFEKTTVRFKTSHTSAQLVELQALIAVLSAFPHRALNVYTDSAYLAHSIPLLETVSHIKHISDTAKFFLQCQQLIYNRSIPFYLGHIRAHSGLPGPLSQGNHITDLATKVVATTLTTAGKRTADGSEFEKRTADGSEFESPKKKAKVE

SEQ ID NO: 752 - protein, 2015 aa, synthetic construct
MPAAKRVKLDGGDKKYSIGLDIGTNSVGWAVITDEYKVPSKKFKVLGNTDRHSIKKNLIGALLFDSGETAEATRLKRTARRRYTRRKNRICYLQEIFSNEMAKVDDSFFHRLEESFLVEEDKKHERHPIFGNIVDEVAYHEKYPTIYHLRKKLVDSTDKADLRLIYLALAHMIKFRGHFLIEGDLNPDNSDVDKLFIQLVQTYNQLFEENPINASGVDAKAILSARLSKSRRLENLIAQLPGEKKNGLFGNLIALSLGLTPNFKSNFDLAEDAKLQLSKDTYDDDLDNLLAQIGDQYADLFLAAKNLSDAILLSDILRVNTEITKAPLSASMIKRYDEHHQDLTLLKALVRQQLPEKYKEIFFDQSKNGYAGYIDGGASQEEFYKFIKPILEKMDGTEELLVKLNREDLLRKQRTFDNGSIPHQIHLGELHAILRRQEDFYPFLKDNREKIEKILTFRIPYYVGPLARGNSRFAWMTRKSEETITPWNFEEVVDKGASAQSFIERMTNFDKNLPNEKVLPKHSLLYEYFTVYNELTKVKYVTEGMRKPAFLSGEQKKAIVDLLFKTNRKVTVKQLKEDYFKKIECFDSVEISGVEDRFNASLGTYHDLLKIIKDKDFLDNEENEDILEDIVLTLTLFEDREMIEERLKTYAHLFDDKVMKQLKRRRYTGWGRLSRKLINGIRDKQSGKTILDFLKSDGFANRNFMQLIHDDSLTFKEDIQKAQVSGQGDSLHEHIANLAGSPAIKKGILQTVKVVDELVKVMGRHKPENIVIEMARENQTTQKGQKNSRERMKRIEEGIKELGSQILKEHPVENTQLQNEKLYLYYLQNGRDMYVDQELDINRLSDYDVDHIVPQSFLKDDSIDNKVLTRSDKARGKSDNVPSEEVVKKMKNYWRQLLNAKLITQRKFDNLTKAERGGLSELDKAGFIKRQLVETRQITKHVAQILDSRMNTKYDENDKLIREVKVITLKSKLVSDFRKDFQFYKVREINNYHHAHDAYLNAVVGTALIKKYPKLESEFVYGDYKVYDVRKMIAKSEQEIGKATAKYFFYSNIMNFFKTEITLANGEIRKRPLIETNGETGEIVWDKGRDFATVRKVLSMPQVNIVKKTEVQTGGFSKESILPKRNSDKLIARKKDWDPKKYGGFDSPTVAYSVLVVAKVEKGKSKKLKSVKELLGITIMERSSFEKNPIDFLEAKGYKEVKKDLIIKLPKYSLFELENGRKRMLASAGELQKGNELALPSKYVNFLYLASHYEKLKGSPEDNEQKQLFVEQHKHYLDEIIEQISEFSKRVILADANLDKVLSAYNKHRDKPIREQAENIIHLFTLTNLGAPAAFKYFDTTIDRKRYTSTKEVLDATLIHQSITGLYETRIDLSQLGGDGGSGSETPGTSESATPESGGLATAVDILAPQRYADPITWKSDEPVWVDQWPLTQEKLAAAQQLVQEQLQAGHIIESNSPWNTPIFVIKKKSGKWRLLQDLRAVNATMVLMGALQPGLPSPVAIPQGYFKIVIDLKDCFFTIPLQPVDQKRFAFSLPSTNFKQPMKRYQWKVLPQGMANSPTLCQKYVAAAIEPVRKSWAQMYIIHYMDDILIAGKLGEQVLQCFAQLKQALTTTGLQIAPEKVQLQDPYTYLGFQINGPKITNQKAVIRRDKLQTLNDFQKLLGDINWLRPYLHLTTGDLKPLFDILKGDSNPNSPRSLSEAALASLQKVETAIAEQFVTQIDYTQPLTFLIFNTTLTPTGLFWQNNPVMWVHLPASPKKVLLPYYDAIADLIILGRDNSKKYFGLEPSTIIQPYSKSQIHWLMQNTETWPIACASYAGNIDNHYPPNKLIQFCKLHAVVFPRIISKTPLDNALLVFTDGSSTGIAAYTFEKTTVRFKTSHTSAQLVELQALIAVLSAFPHRALNVYTDSAYLAHSIPLLETVSHIKHISDTAKFFLQCQQLIYNRSIPFYLGHIRAHSGLPGPLSQGNHITDLATKVVATTLTTAGKRTADGSEFEKRTADGSEFESPKKKAKVE

SEQ ID NO: 753 - protein, 2010 aa, synthetic construct
MPAAKRVKLDGGDKKYSIGLDIGTNSVGWAVITDEYKVPSKKFKVLGNTDRHSIKKNLIGALLFDSGETAEATRLKRTARRRYTRRKNRICYLQEIFSNEMAKVDDSFFHRLEESFLVEEDKKHERHPIFGNIVDEVAYHEKYPTIYHLRKKLVDSTDKADLRLIYLALAHMIKFRGHFLIEGDLNPDNSDVDKLFIQLVQTYNQLFEENPINASGVDAKAILSARLSKSRRLENLIAQLPGEKKNGLFGNLIALSLGLTPNFKSNFDLAEDAKLQLSKDTYDDDLDNLLAQIGDQYADLFLAAKNLSDAILLSDILRVNTEITKAPLSASMIKRYDEHHQDLTLLKALVRQQLPEKYKEIFFDQSKNGYAGYIDGGASQEEFYKFIKPILEKMDGTEELLVKLNREDLLRKQRTFDNGSIPHQIHLGELHAILRRQEDFYPFLKDNREKIEKILTFRIPYYVGPLARGNSRFAWMTRKSEETITPWNFEEVVDKGASAQSFIERMTNFDKNLPNEKVLPKHSLLYEYFTVYNELTKVKYVTEGMRKPAFLSGEQKKAIVDLLFKTNRKVTVKQLKEDYFKKIECFDSVEISGVEDRFNASLGTYHDLLKIIKDKDFLDNEENEDILEDIVLTLTLFEDREMIEERLKTYAHLFDDKVMKQLKRRRYTGWGRLSRKLINGIRDKQSGKTILDFLKSDGFANRNFMQLIHDDSLTFKEDIQKAQVSGQGDSLHEHIANLAGSPAIKKGILQTVKVVDELVKVMGRHKPENIVIEMARENQTTQKGQKNSRERMKRIEEGIKELGSQILKEHPVENTQLQNEKLYLYYLQNGRDMYVDQELDINRLSDYDVDHIVPQSFLKDDSIDNKVLTRSDKARGKSDNVPSEEVVKKMKNYWRQLLNAKLITQRKFDNLTKAERGGLSELDKAGFIKRQLVETRQITKHVAQILDSRMNTKYDENDKLIREVKVITLKSKLVSDFRKDFQFYKVREINNYHHAHDAYLNAVVGTALIKKYPKLESEFVYGDYKVYDVRKMIAKSEQEIGKATAKYFFYSNIMNFFKTEITLANGEIRKRPLIETNGETGEIVWDKGRDFATVRKVLSMPQVNIVKKTEVQTGGFSKESILPKRNSDKLIARKKDWDPKKYGGFDSPTVAYSVLVVAKVEKGKSKKLKSVKELLGITIMERSSFEKNPIDFLEAKGYKEVKKDLIIKLPKYSLFELENGRKRMLASAGELQKGNELALPSKYVNFLYLASHYEKLKGSPEDNEQKQLFVEQHKHYLDEIIEQISEFSKRVILADANLDKVLSAYNKHRDKPIREQAENIIHLFTLTNLGAPAAFKYFDTTIDRKRYTSTKEVLDATLIHQSITGLYETRIDLSQLGGDGGGSSPAPEAAAKGGLATAVDILAPQRYADPITWKSDEPVWVDQWPLTQEKLAAAQQLVQEQLQAGHIIESNSPWNTPIFVIKKKSGKWRLLQDLRAVNATMVLMGALQPGLPSPVAIPQGYFKIVIDLKDCFFTIPLQPVDQKRFAFSLPSTNFKQPMKRYQWKVLPQGMANSPTLCQKYVAAAIEPVRKSWAQMYIIHYMDDILIAGKLGEQVLQCFAQLKQALTTTGLQIAPEKVQLQDPYTYLGFQINGPKITNQKAVIRRDKLQTLNDFQKLLGDINWLRPYLHLTTGDLKPLFDILKGDSNPNSPRSLSEAALASLQKVETAIAEQFVTQIDYTQPLTFLIFNTTLTPTGLFWQNNPVMWVHLPASPKKVLLPYYDAIADLIILGRDNSKKYFGLEPSTIIQPYSKSQIHWLMQNTETWPIACASYAGNIDNHYPPNKLIQFCKLHAVVFPRIISKTPLDNALLVFTDGSSTGIAAYTFEKTTVRFKTSHTSAQLVELQALIAVLSAFPHRALNVYTDSAYLAHSIPLLETVSHIKHISDTAKFFLQCQQLIYNRSIPFYLGHIRAHSGLPGPLSQGNHITDLATKVVATTLTTAGKRTADGSEFEKRTADGSEFESPKKKAKVE

SEQ ID NO: 754 - protein, 2010 aa, synthetic construct
MPAAKRVKLDGGDKKYSIGLDIGTNSVGWAVITDEYKVPSKKFKVLGNTDRHSIKKNLIGALLFDSGETAEATRLKRTARRRYTRRKNRICYLQEIFSNEMAKVDDSFFHRLEESFLVEEDKKHERHPIFGNIVDEVAYHEKYPTIYHLRKKLVDSTDKADLRLIYLALAHMIKFRGHFLIEGDLNPDNSDVDKLFIQLVQTYNQLFEENPINASGVDAKAILSARLSKSRRLENLIAQLPGEKKNGLFGNLIALSLGLTPNFKSNFDLAEDAKLQLSKDTYDDDLDNLLAQIGDQYADLFLAAKNLSDAILLSDILRVNTEITKAPLSASMIKRYDEHHQDLTLLKALVRQQLPEKYKEIFFDQSKNGYAGYIDGGASQEEFYKFIKPILEKMDGTEELLVKLNREDLLRKQRTFDNGSIPHQIHLGELHAILRRQEDFYPFLKDNREKIEKILTFRIPYYVGPLARGNSRFAWMTRKSEETITPWNFEEVVDKGASAQSFIERMTNFDKNLPNEKVLPKHSLLYEYFTVYNELTKVKYVTEGMRKPAFLSGEQKKAIVDLLFKTNRKVTVKQLKEDYFKKIECFDSVEISGVEDRFNASLGTYHDLLKIIKDKDFLDNEENEDILEDIVLTLTLFEDREMIEERLKTYAHLFDDKVMKQLKRRRYTGWGRLSRKLINGIRDKQSGKTILDFLKSDGFANRNFMQLIHDDSLTFKEDIQKAQVSGQGDSLHEHIANLAGSPAIKKGILQTVKVVDELVKVMGRHKPENIVIEMARENQTTQKGQKNSRERMKRIEEGIKELGSQILKEHPVENTQLQNEKLYLYYLQNGRDMYVDQELDINRLSDYDVDHIVPQSFLKDDSIDNKVLTRSDKARGKSDNVPSEEVVKKMKNYWRQLLNAKLITQRKFDNLTKAERGGLSELDKAGFIKRQLVETRQITKHVAQILDSRMNTKYDENDKLIREVKVITLKSKLVSDFRKDFQFYKVREINNYHHAHDAYLNAVVGTALIKKYPKLESEFVYGDYKVYDVRKMIAKSEQEIGKATAKYFFYSNIMNFFKTEITLANGEIRKRPLIETNGETGEIVWDKGRDFATVRKVLSMPQVNIVKKTEVQTGGFSKESILPKRNSDKLIARKKDWDPKKYGGFDSPTVAYSVLVVAKVEKGKSKKLKSVKELLGITIMERSSFEKNPIDFLEAKGYKEVKKDLIIKLPKYSLFELENGRKRMLASAGELQKGNELALPSKYVNFLYLASHYEKLKGSPEDNEQKQLFVEQHKHYLDEIIEQISEFSKRVILADANLDKVLSAYNKHRDKPIREQAENIIHLFTLTNLGAPAAFKYFDTTIDRKRYTSTKEVLDATLIHQSITGLYETRIDLSQLGGDGGGSSGGSEAAAKGGLATAVDILAPQRYADPITWKSDEPVWVDQWPLTQEKLAAAQQLVQEQLQAGHIIESNSPWNTPIFVIKKKSGKWRLLQDLRAVNATMVLMGALQPGLPSPVAIPQGYFKIVIDLKDCFFTIPLQPVDQKRFAFSLPSTNFKQPMKRYQWKVLPQGMANSPTLCQKYVAAAIEPVRKSWAQMYIIHYMDDILIAGKLGEQVLQCFAQLKQALTTTGLQIAPEKVQLQDPYTYLGFQINGPKITNQKAVIRRDKLQTLNDFQKLLGDINWLRPYLHLTTGDLKPLFDILKGDSNPNSPRSLSEAALASLQKVETAIAEQFVTQIDYTQPLTFLIFNTTLTPTGLFWQNNPVMWVHLPASPKKVLLPYYDAIADLIILGRDNSKKYFGLEPSTIIQPYSKSQIHWLMQNTETWPIACASYAGNIDNHYPPNKLIQFCKLHAVVFPRIISKTPLDNALLVFTDGSSTGIAAYTFEKTTVRFKTSHTSAQLVELQALIAVLSAFPHRALNVYTDSAYLAHSIPLLETVSHIKHISDTAKFFLQCQQLIYNRSIPFYLGHIRAHSGLPGPLSQGNHITDLATKVVATTLTTAGKRTADGSEFEKRTADGSEFESPKKKAKVE

SEQ ID NO: 755 - protein, 2008 aa, synthetic construct
MPAAKRVKLDGGDKKYSIGLDIGTNSVGWAVITDEYKVPSKKFKVLGNTDRHSIKKNLIGALLFDSGETAEATRLKRTARRRYTRRKNRICYLQEIFSNEMAKVDDSFFHRLEESFLVEEDKKHERHPIFGNIVDEVAYHEKYPTIYHLRKKLVDSTDKADLRLIYLALAHMIKFRGHFLIEGDLNPDNSDVDKLFIQLVQTYNQLFEENPINASGVDAKAILSARLSKSRRLENLIAQLPGEKKNGLFGNLIALSLGLTPNFKSNFDLAEDAKLQLSKDTYDDDLDNLLAQIGDQYADLFLAAKNLSDAILLSDILRVNTEITKAPLSASMIKRYDEHHQDLTLLKALVRQQLPEKYKEIFFDQSKNGYAGYIDGGASQEEFYKFIKPILEKMDGTEELLVKLNREDLLRKQRTFDNGSIPHQIHLGELHAILRRQEDFYPFLKDNREKIEKILTFRIPYYVGPLARGNSRFAWMTRKSEETITPWNFEEVVDKGASAQSFIERMTNFDKNLPNEKVLPKHSLLYEYFTVYNELTKVKYVTEGMRKPAFLSGEQKKAIVDLLFKTNRKVTVKQLKEDYFKKIECFDSVEISGVEDRFNASLGTYHDLLKIIKDKDFLDNEENEDILEDIVLTLTLFEDREMIEERLKTYAHLFDDKVMKQLKRRRYTGWGRLSRKLINGIRDKQSGKTILDFLKSDGFANRNFMQLIHDDSLTFKEDIQKAQVSGQGDSLHEHIANLAGSPAIKKGILQTVKVVDELVKVMGRHKPENIVIEMARENQTTQKGQKNSRERMKRIEEGIKELGSQILKEHPVENTQLQNEKLYLYYLQNGRDMYVDQELDINRLSDYDVDHIVPQSFLKDDSIDNKVLTRSDKARGKSDNVPSEEVVKKMKNYWRQLLNAKLITQRKFDNLTKAERGGLSELDKAGFIKRQLVETRQITKHVAQILDSRMNTKYDENDKLIREVKVITLKSKLVSDFRKDFQFYKVREINNYHHAHDAYLNAVVGTALIKKYPKLESEFVYGDYKVYDVRKMIAKSEQEIGKATAKYFFYSNIMNFFKTEITLANGEIRKRPLIETNGETGEIVWDKGRDFATVRKVLSMPQVNIVKKTEVQTGGFSKESILPKRNSDKLIARKKDWDPKKYGGFDSPTVAYSVLVVAKVEKGKSKKLKSVKELLGITIMERSSFEKNPIDFLEAKGYKEVKKDLIIKLPKYSLFELENGRKRMLASAGELQKGNELALPSKYVNFLYLASHYEKLKGSPEDNEQKQLFVEQHKHYLDEIIEQISEFSKRVILADANLDKVLSAYNKHRDKPIREQAENIIHLFTLTNLGAPAAFKYFDTTIDRKRYTSTKEVLDATLIHQSITGLYETRIDLSQLGGDGGPAPGGGGGSGGLATAVDILAPQRYADPITWKSDEPVWVDQWPLTQEKLAAAQQLVQEQLQAGHIIESNSPWNTPIFVIKKKSGKWRLLQDLRAVNATMVLMGALQPGLPSPVAIPQGYFKIVIDLKDCFFTIPLQPVDQKRFAFSLPSTNFKQPMKRYQWKVLPQGMANSPTLCQKYVAAAIEPVRKSWAQMYIIHYMDDILIAGKLGEQVLQCFAQLKQALTTTGLQIAPEKVQLQDPYTYLGFQINGPKITNQKAVIRRDKLQTLNDFQKLLGDINWLRPYLHLTTGDLKPLFDILKGDSNPNSPRSLSEAALASLQKVETAIAEQFVTQIDYTQPLTFLIFNTTLTPTGLFWQNNPVMWVHLPASPKKVLLPYYDAIADLIILGRDNSKKYFGLEPSTIIQPYSKSQIHWLMQNTETWPIACASYAGNIDNHYPPNKLIQFCKLHAVVFPRIISKTPLDNALLVFTDGSSTGIAAYTFEKTTVRFKTSHTSAQLVELQALIAVLSAFPHRALNVYTDSAYLAHSIPLLETVSHIKHISDTAKFFLQCQQLIYNRSIPFYLGHIRAHSGLPGPLSQGNHITDLATKVVATTLTTAGKRTADGSEFEKRTADGSEFESPKKKAKVE

SEQ ID NO: 756 - protein, 2005 aa, synthetic construct
MPAAKRVKLDGGDKKYSIGLDIGTNSVGWAVITDEYKVPSKKFKVLGNTDRHSIKKNLIGALLFDSGETAEATRLKRTARRRYTRRKNRICYLQEIFSNEMAKVDDSFFHRLEESFLVEEDKKHERHPIFGNIVDEVAYHEKYPTIYHLRKKLVDSTDKADLRLIYLALAHMIKFRGHFLIEGDLNPDNSDVDKLFIQLVQTYNQLFEENPINASGVDAKAILSARLSKSRRLENLIAQLPGEKKNGLFGNLIALSLGLTPNFKSNFDLAEDAKLQLSKDTYDDDLDNLLAQIGDQYADLFLAAKNLSDAILLSDILRVNTEITKAPLSASMIKRYDEHHQDLTLLKALVRQQLPEKYKEIFFDQSKNGYAGYIDGGASQEEFYKFIKPILEKMDGTEELLVKLNREDLLRKQRTFDNGSIPHQIHLGELHAILRRQEDFYPFLKDNREKIEKILTFRIPYYVGPLARGNSRFAWMTRKSEETITPWNFEEVVDKGASAQSFIERMTNFDKNLPNEKVLPKHSLLYEYFTVYNELTKVKYVTEGMRKPAFLSGEQKKAIVDLLFKTNRKVTVKQLKEDYFKKIECFDSVEISGVEDRFNASLGTYHDLLKIIKDKDFLDNEENEDILEDIVLTLTLFEDREMIEERLKTYAHLFDDKVMKQLKRRRYTGWGRLSRKLINGIRDKQSGKTILDFLKSDGFANRNFMQLIHDDSLTFKEDIQKAQVSGQGDSLHEHIANLAGSPAIKKGILQTVKVVDELVKVMGRHKPENIVIEMARENQTTQKGQKNSRERMKRIEEGIKELGSQILKEHPVENTQLQNEKLYLYYLQNGRDMYVDQELDINRLSDYDVDHIVPQSFLKDDSIDNKVLTRSDKARGKSDNVPSEEVVKKMKNYWRQLLNAKLITQRKFDNLTKAERGGLSELDKAGFIKRQLVETRQITKHVAQILDSRMNTKYDENDKLIREVKVITLKSKLVSDFRKDFQFYKVREINNYHHAHDAYLNAVVGTALIKKYPKLESEFVYGDYKVYDVRKMIAKSEQEIGKATAKYFFYSNIMNFFKTEITLANGEIRKRPLIETNGETGEIVWDKGRDFATVRKVLSMPQVNIVKKTEVQTGGFSKESILPKRNSDKLIARKKDWDPKKYGGFDSPTVAYSVLVVAKVEKGKSKKLKSVKELLGITIMERSSFEKNPIDFLEAKGYKEVKKDLIIKLPKYSLFELENGRKRMLASAGELQKGNELALPSKYVNFLYLASHYEKLKGSPEDNEQKQLFVEQHKHYLDEIIEQISEFSKRVILADANLDKVLSAYNKHRDKPIREQAENIIHLFTLTNLGAPAAFKYFDTTIDRKRYTSTKEVLDATLIHQSITGLYETRIDLSQLGGDGGGGGGGSGGLATAVDILAPQRYADPITWKSDEPVWVDQWPLTQEKLAAAQQLVQEQLQAGHIIESNSPWNTPIFVIKKKSGKWRLLQDLRAVNATMVLMGALQPGLPSPVAIPQGYFKIVIDLKDCFFTIPLQPVDQKRFAFSLPSTNFKQPMKRYQWKVLPQGMANSPTLCQKYVAAAIEPVRKSWAQMYIIHYMDDILIAGKLGEQVLQCFAQLKQALTTTGLQIAPEKVQLQDPYTYLGFQINGPKITNQKAVIRRDKLQTLNDFQKLLGDINWLRPYLHLTTGDLKPLFDILKGDSNPNSPRSLSEAALASLQKVETAIAEQFVTQIDYTQPLTFLIFNTTLTPTGLFWQNNPVMWVHLPASPKKVLLPYYDAIADLIILGRDNSKKYFGLEPSTIIQPYSKSQIHWLMQNTETWPIACASYAGNIDNHYPPNKLIQFCKLHAVVFPRIISKTPLDNALLVFTDGSSTGIAAYTFEKTTVRFKTSHTSAQLVELQALIAVLSAFPHRALNVYTDSAYLAHSIPLLETVSHIKHISDTAKFFLQCQQLIYNRSIPFYLGHIRAHSGLPGPLSQGNHITDLATKVVATTLTTAGKRTADGSEFEKRTADGSEFESPKKKAKVE

SEQ ID NO: 757 - protein, 2014 aa, synthetic construct
MPAAKRVKLDGGDKKYSIGLDIGTNSVGWAVITDEYKVPSKKFKVLGNTDRHSIKKNLIGALLFDSGETAEATRLKRTARRRYTRRKNRICYLQEIFSNEMAKVDDSFFHRLEESFLVEEDKKHERHPIFGNIVDEVAYHEKYPTIYHLRKKLVDSTDKADLRLIYLALAHMIKFRGHFLIEGDLNPDNSDVDKLFIQLVQTYNQLFEENPINASGVDAKAILSARLSKSRRLENLIAQLPGEKKNGLFGNLIALSLGLTPNFKSNFDLAEDAKLQLSKDTYDDDLDNLLAQIGDQYADLFLAAKNLSDAILLSDILRVNTEITKAPLSASMIKRYDEHHQDLTLLKALVRQQLPEKYKEIFFDQSKNGYAGYIDGGASQEEFYKFIKPILEKMDGTEELLVKLNREDLLRKQRTFDNGSIPHQIHLGELHAILRRQEDFYPFLKDNREKIEKILTFRIPYYVGPLARGNSRFAWMTRKSEETITPWNFEEVVDKGASAQSFIERMTNFDKNLPNEKVLPKHSLLYEYFTVYNELTKVKYVTEGMRKPAFLSGEQKKAIVDLLFKTNRKVTVKQLKEDYFKKIECFDSVEISGVEDRFNASLGTYHDLLKIIKDKDFLDNEENEDILEDIVLTLTLFEDREMIEERLKTYAHLFDDKVMKQLKRRRYTGWGRLSRKLINGIRDKQSGKTILDFLKSDGFANRNFMQLIHDDSLTFKEDIQKAQVSGQGDSLHEHIANLAGSPAIKKGILQTVKVVDELVKVMGRHKPENIVIEMARENQTTQKGQKNSRERMKRIEEGIKELGSQILKEHPVENTQLQNEKLYLYYLQNGRDMYVDQELDINRLSDYDVDHIVPQSFLKDDSIDNKVLTRSDKARGKSDNVPSEEVVKKMKNYWRQLLNAKLITQRKFDNLTKAERGGLSELDKAGFIKRQLVETRQITKHVAQILDSRMNTKYDENDKLIREVKVITLKSKLVSDFRKDFQFYKVREINNYHHAHDAYLNAVVGTALIKKYPKLESEFVYGDYKVYDVRKMIAKSEQEIGKATAKYFFYSNIMNFFKTEITLANGEIRKRPLIETNGETGEIVWDKGRDFATVRKVLSMPQVNIVKKTEVQTGGFSKESILPKRNSDKLIARKKDWDPKKYGGFDSPTVAYSVLVVAKVEKGKSKKLKSVKELLGITIMERSSFEKNPIDFLEAKGYKEVKKDLIIKLPKYSLFELENGRKRMLASAGELQKGNELALPSKYVNFLYLASHYEKLKGSPEDNEQKQLFVEQHKHYLDEIIEQISEFSKRVILADANLDKVLSAYNKHRDKPIREQAENIIHLFTLTNLGAPAAFKYFDTTIDRKRYTSTKEVLDATLIHQSITGLYETRIDLSQLGGDGGGSSGSSGSSGSSGSSGGLATAVDILAPQRYADPITWKSDEPVWVDQWPLTQEKLAAAQQLVQEQLQAGHIIESNSPWNTPIFVIKKKSGKWRLLQDLRAVNATMVLMGALQPGLPSPVAPPQGYFKIVIDLKDCFFTIPLQPVDQKRFAFSLPSTNFKQPMKRYQWKVLPQGMANSPTLCQKYVAAAIEPVRKSWAQMYIIHYMDDILIAGKLGEQVLQCFAQLKQALTTTGLQIAPEKVQLQDPYTYLGFQINGPKITNQKAVIRRDKLQTLNDFQKLLGDINWLRPYLHLTTGDLKPLFDILKGDSNPNSPRSLSEAALASLQKVETAIAEQFVTQIDYTQPLTFLIFNTTLTPTGLFWQNNPVMWVHLPASPKKVLLPYYDAIADLIILGRDNSKKYFGLEPSTIIQPYSKSQIHWLMQNTETWPIACASYAGNIDNHYPPNKLIQFCKLHAVVFPRIISKTPLDNALLVFTDGSSTGIAAYTFEKTTVRFKTSHTSAQLVELQALIAVLSAFPHRALNVYTDSAYLAHSIPLLETVSHIKHISDTAKFFLQCQQLIYNRSIPFYLGHIRAHSGLPGPLSQGNHITDLATKVVATTLTTAGKRTADGSEFEKRTADGSEFESPKKKAKVE

SEQ ID NO: 758 - protein, 2010 aa, synthetic construct
MPAAKRVKLDGGDKKYSIGLDIGTNSVGWAVITDEYKVPSKKFKVLGNTDRHSIKKNLIGALLFDSGETAEATRLKRTARRRYTRRKNRICYLQEIFSNEMAKVDDSFFHRLEESFLVEEDKKHERHPIFGNIVDEVAYHEKYPTIYHLRKKLVDSTDKADLRLIYLALAHMIKFRGHFLIEGDLNPDNSDVDKLFIQLVQTYNQLFEENPINASGVDAKAILSARLSKSRRLENLIAQLPGEKKNGLFGNLIALSLGLTPNFKSNFDLAEDAKLQLSKDTYDDDLDNLLAQIGDQYADLFLAAKNLSDAILLSDILRVNTEITKAPLSASMIKRYDEHHQDLTLLKALVRQQLPEKYKEIFFDQSKNGYAGYIDGGASQEEFYKFIKPILEKMDGTEELLVKLNREDLLRKQRTFDNGSIPHQIHLGELHAILRRQEDFYPFLKDNREKIEKILTFRIPYYVGPLARGNSRFAWMTRKSEETITPWNFEEVVDKGASAQSFIERMTNFDKNLPNEKVLPKHSLLYEYFTVYNELTKVKYVTEGMRKPAFLSGEQKKAIVDLLFKTNRKVTVKQLKEDYFKKIECFDSVEISGVEDRFNASLGTYHDLLKIIKDKDFLDNEENEDILEDIVLTLTLFEDREMIEERLKTYAHLFDDKVMKQLKRRRYTGWGRLSRKLINGIRDKQSGKTILDFLKSDGFANRNFMQLIHDDSLTFKEDIQKAQVSGQGDSLHEHIANLAGSPAIKKGILQTVKVVDELVKVMGRHKPENIVIEMARENQTTQKGQKNSRERMKRIEEGIKELGSQILKEHPVENTQLQNEKLYLYYLQNGRDMYVDQELDINRLSDYDVDHIVPQSFLKDDSIDNKVLTRSDKARGKSDNVPSEEVVKKMKNYWRQLLNAKLITQRKFDNLTKAERGGLSELDKAGFIKRQLVETRQITKHVAQILDSRMNTKYDENDKLIREVKVITLKSKLVSDFRKDFQFYKVREINNYHHAHDAYLNAVVGTALIKKYPKLESEFVYGDYKVYDVRKMIAKSEQEIGKATAKYFFYSNIMNFFKTEITLANGEIRKRPLIETNGETGEIVWDKGRDFATVRKVLSMPQVNIVKKTEVQTGGFSKESILPKRNSDKLIARKKDWDPKKYGGFDSPTVAYSVLVVAKVEKGKSKKLKSVKELLGITIMERSSFEKNPIDFLEAKGYKEVKKDLIIKLPKYSLFELENGRKRMLASAGELQKGNELALPSKYVNFLYLASHYEKLKGSPEDNEQKQLFVEQHKHYLDEIIEQISEFSKRVILADANLDKVLSAYNKHRDKPIREQAENIIHLFTLTNLGAPAAFKYFDTTIDRKRYTSTKEVLDATLIHQSITGLYETRIDLSQLGGDGGGSSPAPEAAAKGGLATAVDILAPQRYADPITWKSDEPVWVDQWPLTQEKLAAAQQLVQEQLQAGHIIESNSPWNTPIFVIKKKSGKWRLLQDLRAVNATMVLMGALQPGLPSPVAPPQGYFKIVIDLKDCFFTIPLQPVDQKRFAFSLPSTNFKQPMKRYQWKVLPQGMANSPTLCQKYVAAAIEPVRKSWAQMYIIHYMDDILIAGKLGEQVLQCFAQLKQALTTTGLQIAPEKVQLQDPYTYLGFQINGPKITNQKAVIRRDKLQTLNDFQKLLGDINWLRPYLHLTTGDLKPLFDILKGDSNPNSPRSLSEAALASLQKVETAIAEQFVTQIDYTQPLTFLIFNTTLTPTGLFWQNNPVMWVHLPASPKKVLLPYYDAIADLIILGRDNSKKYFGLEPSTIIQPYSKSQIHWLMQNTETWPIACASYAGNIDNHYPPNKLIQFCKLHAVVFPRIISKTPLDNALLVFTDGSSTGIAAYTFEKTTVRFKTSHTSAQLVELQALIAVLSAFPHRALNVYTDSAYLAHSIPLLETVSHIKHISDTAKFFLQCQQLIYNRSIPFYLGHIRAHSGLPGPLSQGNHITDLATKVVATTLTTAGKRTADGSEFEKRTADGSEFESPKKKAKVE

SEQ ID NO: 759 - protein, 2072 aa, synthetic construct
MPAAKRVKLDGGDKKYSIGLDIGTNSVGWAVITDEYKVPSKKFKVLGNTDRHSIKKNLIGALLFDSGETAEATRLKRTARRRYTRRKNRICYLQEIFSNEMAKVDDSFFHRLEESFLVEEDKKHERHPIFGNIVDEVAYHEKYPTIYHLRKKLVDSTDKADLRLIYLALAHMIKFRGHFLIEGDLNPDNSDVDKLFIQLVQTYNQLFEENPINASGVDAKAILSARLSKSRRLENLIAQLPGEKKNGLFGNLIALSLGLTPNFKSNFDLAEDAKLQLSKDTYDDDLDNLLAQIGDQYADLFLAAKNLSDAILLSDILRVNTEITKAPLSASMIKRYDEHHQDLTLLKALVRQQLPEKYKEIFFDQSKNGYAGYIDGGASQEEFYKFIKPILEKMDGTEELLVKLNREDLLRKQRTFDNGSIPHQIHLGELHAILRRQEDFYPFLKDNREKIEKILTFRIPYYVGPLARGNSRFAWMTRKSEETITPWNFEEVVDKGASAQSFIERMTNFDKNLPNEKVLPKHSLLYEYFTVYNELTKVKYVTEGMRKPAFLSGEQKKAIVDLLFKTNRKVTVKQLKEDYFKKIECFDSVEISGVEDRFNASLGTYHDLLKIIKDKDFLDNEENEDILEDIVLTLTLFEDREMIEERLKTYAHLFDDKVMKQLKRRRYTGWGRLSRKLINGIRDKQSGKTILDFLKSDGFANRNFMQLIHDDSLTFKEDIQKAQVSGQGDSLHEHIANLAGSPAIKKGILQTVKVVDELVKVMGRHKPENIVIEMARENQTTQKGQKNSRERMKRIEEGIKELGSQILKEHPVENTQLQNEKLYLYYLQNGRDMYVDQELDINRLSDYDVDHIVPQSFLKDDSIDNKVLTRSDKARGKSDNVPSEEVVKKMKNYWRQLLNAKLITQRKFDNLTKAERGGLSELDKAGFIKRQLVETRQITKHVAQILDSRMNTKYDENDKLIREVKVITLKSKLVSDFRKDFQFYKVREINNYHHAHDAYLNAVVGTALIKKYPKLESEFVYGDYKVYDVRKMIAKSEQEIGKATAKYFFYSNIMNFFKTEITLANGEIRKRPLIETNGETGEIVWDKGRDFATVRKVLSMPQVNIVKKTEVQTGGFSKESILPKRNSDKLIARKKDWDPKKYGGFDSPTVAYSVLVVAKVEKGKSKKLKSVKELLGITIMERSSFEKNPIDFLEAKGYKEVKKDLIIKLPKYSLFELENGRKRMLASAGELQKGNELALPSKYVNFLYLASHYEKLKGSPEDNEQKQLFVEQHKHYLDEIIEQISEFSKRVILADANLDKVLSAYNKHRDKPIREQAENIIHLFTLTNLGAPAAFKYFDTTIDRKRYTSTKEVLDATLIHQSITGLYETRIDLSQLGGDGGPAPEAAAKGGSCQTKNTLNIDEYLLQFPDQLWASLPTDIGRMLVPPITIKIKDNASLPSIRQYPLPKDKTEGLRPLISSLENQGILIKCHSPCNTPIFPIKKAGRDEYRMIHDLRAINNIVAPLTAVVASPTTVLSNLAPSLHWFTVIDLSNAFFSVPIHKDSQYLFAFTFEGHQYTWTVLPQGFIHSPTLFSQALYQSLHKIKFKISSEICIYMDDVLIASKDRDTNLKDTAVMLQHLASEGHKVSKKKLQLCQQEVVYLGQLLTPEGRKILPDRKVTVSQFQQPTTIRQIRAFLGLVGYCRHWIPEFSIHSKFLEKQLKKDTAEPFQLDDQQVEAFNKLKHAITTAPVLVVPDPAKPFQLYTSHSEHASIAVLTQKHAGRTRPIAFLSSKFDAIESGLPPCLKACASIHRSLTQADSFILGAPLIIYTTHAICTLLQRDRSQLVTASRFSKWEADLLRPELTFVACSAVSPAHLYMQSCENNIPPHDCVLLTHTISRPRPDLSDLPIPDPDMTLFSDGSYTTGRGGAAVVMHRPVTDDFIIIHQQPGGASAQTAELLALAAACHLATDKTVNIYTDSRYAYGVVHDFGHLWMHRGFVTSAGTPIKNHKEIEYLLKQIMKPKQVSVIKIEAHTKGVSMEVRGNAAADEAAKNAVFLVQRAGKRTADGSEFEKRTADGSEFESPKKKAKVE

SEQ ID NO: 760 - protein, 2070 aa, synthetic construct
MPAAKRVKLDGGDKKYSIGLDIGTNSVGWAVITDEYKVPSKKFKVLGNTDRHSIKKNLIGALLFDSGETAEATRLKRTARRRYTRRKNRICYLQEIFSNEMAKVDDSFFHRLEESFLVEEDKKHERHPIFGNIVDEVAYHEKYPTIYHLRKKLVDSTDKADLRLIYLALAHMIKFRGHFLIEGDLNPDNSDVDKLFIQLVQTYNQLFEENPINASGVDAKAILSARLSKSRRLENLIAQLPGEKKNGLFGNLIALSLGLTPNFKSNFDLAEDAKLQLSKDTYDDDLDNLLAQIGDQYADLFLAAKNLSDAILLSDILRVNTEITKAPLSASMIKRYDEHHQDLTLLKALVRQQLPEKYKEIFFDQSKNGYAGYIDGGASQEEFYKFIKPILEKMDGTEELLVKLNREDLLRKQRTFDNGSIPHQIHLGELHAILRRQEDFYPFLKDNREKIEKILTFRIPYYVGPLARGNSRFAWMTRKSEETITPWNFEEVVDKGASAQSFIERMTNFDKNLPNEKVLPKHSLLYEYFTVYNELTKVKYVTEGMRKPAFLSGEQKKAIVDLLFKTNRKVTVKQLKEDYFKKIECFDSVEISGVEDRFNASLGTYHDLLKIIKDKDFLDNEENEDILEDIVLTLTLFEDREMIEERLKTYAHLFDDKVMKQLKRRRYTGWGRLSRKLINGIRDKQSGKTILDFLKSDGFANRNFMQLIHDDSLTFKEDIQKAQVSGQGDSLHEHIANLAGSPAIKKGILQTVKVVDELVKVMGRHKPENIVIEMARENQTTQKGQKNSRERMKRIEEGIKELGSQILKEHPVENTQLQNEKLYLYYLQNGRDMYVDQELDINRLSDYDVDHIVPQSFLKDDSIDNKVLTRSDKARGKSDNVPSEEVVKKMKNYWRQLLNAKLITQRKFDNLTKAERGGLSELDKAGFIKRQLVETRQITKHVAQILDSRMNTKYDENDKLIREVKVITLKSKLVSDFRKDFQFYKVREINNYHHAHDAYLNAVVGTALIKKYPKLESEFVYGDYKVYDVRKMIAKSEQEIGKATAKYFFYSNIMNFFKTEITLANGEIRKRPLIETNGETGEIVWDKGRDFATVRKVLSMPQVNIVKKTEVQTGGFSKESILPKRNSDKLIARKKDWDPKKYGGFDSPTVAYSVLVVAKVEKGKSKKLKSVKELLGITIMERSSFEKNPIDFLEAKGYKEVKKDLIIKLPKYSLFELENGRKRMLASAGELQKGNELALPSKYVNFLYLASHYEKLKGSPEDNEQKQLFVEQHKHYLDEIIEQISEFSKRVILADANLDKVLSAYNKHRDKPIREQAENIIHLFTLTNLGAPAAFKYFDTTIDRKRYTSTKEVLDATLIHQSITGLYETRIDLSQLGGDGGGGGGGGGGSCQTKNTLNIDEYLLQFPDQLWASLPTDIGRMLVPPITIKIKDNASLPSIRQYPLPKDKTEGLRPLISSLENQGILIKCHSPCNTPIFPIKKAGRDEYRMIHDLRAINNIVAPLTAVVASPTTVLSNLAPSLHWFTVIDLSNAFFSVPIHKDSQYLFAFTFEGHQYTWTVLPQGFIHSPTLFSQALYQSLHKIKFKISSEICIYMDDVLIASKDRDTNLKDTAVMLQHLASEGHKVSKKKLQLCQQEVVYLGQLLTPEGRKILPDRKVTVSQFQQPTTIRQIRAFLGLVGYCRHWIPEFSIHSKFLEKQLKKDTAEPFQLDDQQVEAFNKLKHAITTAPVLVVPDPAKPFQLYTSHSEHASIAVLTQKHAGRTRPIAFLSSKFDAIESGLPPCLKACASIHRSLTQADSFILGAPLIIYTTHAICTLLQRDRSQLVTASRFSKWEADLLRPELTFVACSAVSPAHLYMQSCENNIPPHDCVLLTHTISRPRPDLSDLPIPDPDMTLFSDGSYTTGRGGAAVVMHRPVTDDFIIIHQQPGGASAQTAELLALAAACHLATDKTVNIYTDSRYAYGVVHDFGHLWMHRGFVTSAGTPIKNHKEIEYLLKQIMKPKQVSVIKIEAHTKGVSMEVRGNAAADEAAKNAVFLVQRAGKRTADGSEFEKRTADGSEFESPKKKAKVE

SEQ ID NO: 761 - protein, 2077 aa, synthetic construct
MPAAKRVKLDGGDKKYSIGLDIGTNSVGWAVITDEYKVPSKKFKVLGNTDRHSIKKNLIGALLFDSGETAEATRLKRTARRRYTRRKNRICYLQEIFSNEMAKVDDSFFHRLEESFLVEEDKKHERHPIFGNIVDEVAYHEKYPTIYHLRKKLVDSTDKADLRLIYLALAHMIKFRGHFLIEGDLNPDNSDVDKLFIQLVQTYNQLFEENPINASGVDAKAILSARLSKSRRLENLIAQLPGEKKNGLFGNLIALSLGLTPNFKSNFDLAEDAKLQLSKDTYDDDLDNLLAQIGDQYADLFLAAKNLSDAILLSDILRVNTEITKAPLSASMIKRYDEHHQDLTLLKALVRQQLPEKYKEIFFDQSKNGYAGYIDGGASQEEFYKFIKPILEKMDGTEELLVKLNREDLLRKQRTFDNGSIPHQIHLGELHAILRRQEDFYPFLKDNREKIEKILTFRIPYYVGPLARGNSRFAWMTRKSEETITPWNFEEVVDKGASAQSFIERMTNFDKNLPNEKVLPKHSLLYEYFTVYNELTKVKYVTEGMRKPAFLSGEQKKAIVDLLFKTNRKVTVKQLKEDYFKKIECFDSVEISGVEDRFNASLGTYHDLLKIIKDKDFLDNEENEDILEDIVLTLTLFEDREMIEERLKTYAHLFDDKVMKQLKRRRYTGWGRLSRKLINGIRDKQSGKTILDFLKSDGFANRNFMQLIHDDSLTFKEDIQKAQVSGQGDSLHEHIANLAGSPAIKKGILQTVKVVDELVKVMGRHKPENIVIEMARENQTTQKGQKNSRERMKRIEEGIKELGSQILKEHPVENTQLQNEKLYLYYLQNGRDMYVDQELDINRLSDYDVDHIVPQSFLKDDSIDNKVLTRSDKARGKSDNVPSEEVVKKMKNYWRQLLNAKLITQRKFDNLTKAERGGLSELDKAGFIKRQLVETRQITKHVAQILDSRMNTKYDENDKLIREVKVITLKSKLVSDFRKDFQFYKVREINNYHHAHDAYLNAVVGTALIKKYPKLESEFVYGDYKVYDVRKMIAKSEQEIGKATAKYFFYSNIMNFFKTEITLANGEIRKRPLIETNGETGEIVWDKGRDFATVRKVLSMPQVNIVKKTEVQTGGFSKESILPKRNSDKLIARKKDWDPKKYGGFDSPTVAYSVLVVAKVEKGKSKKLKSVKELLGITIMERSSFEKNPIDFLEAKGYKEVKKDLIIKLPKYSLFELENGRKRMLASAGELQKGNELALPSKYVNFLYLASHYEKLKGSPEDNEQKQLFVEQHKHYLDEIIEQISEFSKRVILADANLDKVLSAYNKHRDKPIREQAENIIHLFTLTNLGAPAAFKYFDTTIDRKRYTSTKEVLDATLIHQSITGLYETRIDLSQLGGDGGPAPAPAPAPAPAPGGSCQTKNTLNIDEYLLQFPDQLWASLPTDIGRMLVPPITIKIKDNASLPSIRQYPLPKDKTEGLRPLISSLENQGILIKCHSPCNTPIFPIKKAGRDEYRMIHDLRAINNIVAPLTAVVASPTTVLSNLAPSLHWFTVIDLSNAFFSVPIHKDSQYLFAFTFEGHQYTWTVLPQGFIHSPTLFSQALYQSLHKIKFKISSEICIYMDDVLIASKDRDTNLKDTAVMLQHLASEGHKVSKKKLQLCQQEVVYLGQLLTPEGRKILPDRKVTVSQFQQPTTIRQIRAFLGLVGYCRHWIPEFSIHSKFLEKQLKKDTAEPFQLDDQQVEAFNKLKHAITTAPVLVVPDPAKPFQLYTSHSEHASIAVLTQKHAGRTRPIAFLSSKFDAIESGLPPCLKACASIHRSLTQADSFILGAPLIIYTTHAICTLLQRDRSQLVTASRFSKWEADLLRPELTFVACSAVSPAHLYMQSCENNIPPHDCVLLTHTISRPRPDLSDLPIPDPDMTLFSDGSYTTGRGGAAVVMHRPVTDDFIIIHQQPGGASAQTAELLALAAACHLATDKTVNIYTDSRYAYGVVHDFGHLWMHRGFVTSAGTPIKNHKEIEYLLKQIMKPKQVSVIKIEAHTKGVSMEVRGNAAADEAAKNAVFLVQRAGKRTADGSEFEKRTADGSEFESPKKKAKVE

SEQ ID NO: 762 - protein, 2079 aa, synthetic construct
MPAAKRVKLDGGDKKYSIGLDIGTNSVGWAVITDEYKVPSKKFKVLGNTDRHSIKKNLIGALLFDSGETAEATRLKRTARRRYTRRKNRICYLQEIFSNEMAKVDDSFFHRLEESFLVEEDKKHERHPIFGNIVDEVAYHEKYPTIYHLRKKLVDSTDKADLRLIYLALAHMIKFRGHFLIEGDLNPDNSDVDKLFIQLVQTYNQLFEENPINASGVDAKAILSARLSKSRRLENLIAQLPGEKKNGLFGNLIALSLGLTPNFKSNFDLAEDAKLQLSKDTYDDDLDNLLAQIGDQYADLFLAAKNLSDAILLSDILRVNTEITKAPLSASMIKRYDEHHQDLTLLKALVRQQLPEKYKEIFFDQSKNGYAGYIDGGASQEEFYKFIKPILEKMDGTEELLVKLNREDLLRKQRTFDNGSIPHQIHLGELHAILRRQEDFYPFLKDNREKIEKILTFRIPYYVGPLARGNSRFAWMTRKSEETITPWNFEEVVDKGASAQSFIERMTNFDKNLPNEKVLPKHSLLYEYFTVYNELTKVKYVTEGMRKPAFLSGEQKKAIVDLLFKTNRKVTVKQLKEDYFKKIECFDSVEISGVEDRFNASLGTYHDLLKIIKDKDFLDNEENEDILEDIVLTLTLFEDREMIEERLKTYAHLFDDKVMKQLKRRRYTGWGRLSRKLINGIRDKQSGKTILDFLKSDGFANRNFMQLIHDDSLTFKEDIQKAQVSGQGDSLHEHIANLAGSPAIKKGILQTVKVVDELVKVMGRHKPENIVIEMARENQTTQKGQKNSRERMKRIEEGIKELGSQILKEHPVENTQLQNEKLYLYYLQNGRDMYVDQELDINRLSDYDVDHIVPQSFLKDDSIDNKVLTRSDKARGKSDNVPSEEVVKKMKNYWRQLLNAKLITQRKFDNLTKAERGGLSELDKAGFIKRQLVETRQITKHVAQILDSRMNTKYDENDKLIREVKVITLKSKLVSDFRKDFQFYKVREINNYHHAHDAYLNAVVGTALIKKYPKLESEFVYGDYKVYDVRKMIAKSEQEIGKATAKYFFYSNIMNFFKTEITLANGEIRKRPLIETNGETGEIVWDKGRDFATVRKVLSMPQVNIVKKTEVQTGGFSKESILPKRNSDKLIARKKDWDPKKYGGFDSPTVAYSVLVVAKVEKGKSKKLKSVKELLGITIMERSSFEKNPIDFLEAKGYKEVKKDLIIKLPKYSLFELENGRKRMLASAGELQKGNELALPSKYVNFLYLASHYEKLKGSPEDNEQKQLFVEQHKHYLDEIIEQISEFSKRVILADANLDKVLSAYNKHRDKPIREQAENIIHLFTLTNLGAPAAFKYFDTTIDRKRYTSTKEVLDATLIHQSITGLYETRIDLSQLGGDGGGGGGSEAAAKGGGGSGGSCQTKNTLNIDEYLLQFPDQLWASLPTDIGRMLVPPITIKIKDNASLPSIRQYPLPKDKTEGLRPLISSLENQGILIKCHSPCNTPIFPIKKAGRDEYRMIHDLRAINNIVAPLTAVVASPTTVLSNLAPSLHWFTVIDLSNAFFSVPIHKDSQYLFAFTFEGHQYTWTVLPQGFIHSPTLFNQALYQSLHKIKFKISSEICIYMDDVLIASKDRDTNLKDTAVMLQHLASEGHKVSKKKLQLCQQEVVYLGQLLTPEGRKILPDRKVTVSQFQQPTTIRQIRAFLGLVGYCRHWIPEFSIHSKFLEKQLKPDTAEPFQLDDQQVEAFNKLKHAITTAPVLVVPDPAKPFQLYTSHSEHASIAVLTQKHAGRTRPIAFLSSKFDAIESGLPPCLKACASIHRSLTQADSFILGAPLIIYTTHAICTLLQRDRSQLVTASRFSKWEADLLRPELTFVACSAVSPAHLYMQSCENNIPPHDCVLLTHTISRPRPDLSDLPIPDPDMTLFSDGSYTTGRGGAAVVMHRPVTDDFIIIHQQPGGASAQTAELLALAAACHLATDKTVNIYTDSRYAYGVVHDFGHLWMHRGFVTSAGTPIKNHKEIEYLLKQIMKPKQVSVIKIEAHTKGVSMEVRGNAAADEAAKNAVFLVQRAGKRTADGSEFEKRTADGSEFESPKKKAKVE

SEQ ID NO: 763 - protein, 2110 aa, synthetic construct
MPAAKRVKLDGGDKKYSIGLDIGTNSVGWAVITDEYKVPSKKFKVLGNTDRHSIKKNLIGALLFDSGETAEATRLKRTARRRYTRRKNRICYLQEIFSNEMAKVDDSFFHRLEESFLVEEDKKHERHPIFGNIVDEVAYHEKYPTIYHLRKKLVDSTDKADLRLIYLALAHMIKFRGHFLIEGDLNPDNSDVDKLFIQLVQTYNQLFEENPINASGVDAKAILSARLSKSRRLENLIAQLPGEKKNGLFGNLIALSLGLTPNFKSNFDLAEDAKLQLSKDTYDDDLDNLLAQIGDQYADLFLAAKNLSDAILLSDILRVNTEITKAPLSASMIKRYDEHHQDLTLLKALVRQQLPEKYKEIFFDQSKNGYAGYIDGGASQEEFYKFIKPILEKMDGTEELLVKLNREDLLRKQRTFDNGSIPHQIHLGELHAILRRQEDFYPFLKDNREKIEKILTFRIPYYVGPLARGNSRFAWMTRKSEETITPWNFEEVVDKGASAQSFIERMTNFDKNLPNEKVLPKHSLLYEYFTVYNELTKVKYVTEGMRKPAFLSGEQKKAIVDLLFKTNRKVTVKQLKEDYFKKIECFDSVEISGVEDRFNASLGTYHDLLKIIKDKDFLDNEENEDILEDIVLTLTLFEDREMIEERLKTYAHLFDDKVMKQLKRRRYTGWGRLSRKLINGIRDKQSGKTILDFLKSDGFANRNFMQLIHDDSLTFKEDIQKAQVSGQGDSLHEHIANLAGSPAIKKGILQTVKVVDELVKVMGRHKPENIVIEMARENQTTQKGQKNSRERMKRIEEGIKELGSQILKEHPVENTQLQNEKLYLYYLQNGRDMYVDQELDINRLSDYDVDHIVPQSFLKDDSIDNKVLTRSDKARGKSDNVPSEEVVKKMKNYWRQLLNAKLITQRKFDNLTKAERGGLSELDKAGFIKRQLVETRQITKHVAQILDSRMNTKYDENDKLIREVKVITLKSKLVSDFRKDFQFYKVREINNYHHAHDAYLNAVVGTALIKKYPKLESEFVYGDYKVYDVRKMIAKSEQEIGKATAKYFFYSNIMNFFKTEITLANGEIRKRPLIETNGETGEIVWDKGRDFATVRKVLSMPQVNIVKKTEVQTGGFSKESILPKRNSDKLIARKKDWDPKKYGGFDSPTVAYSVLVVAKVEKGKSKKLKSVKELLGITIMERSSFEKNPIDFLEAKGYKEVKKDLIIKLPKYSLFELENGRKRMLASAGELQKGNELALPSKYVNFLYLASHYEKLKGSPEDNEQKQLFVEQHKHYLDEIIEQISEFSKRVILADANLDKVLSAYNKHRDKPIREQAENIIHLFTLTNLGAPAAFKYFDTTIDRKRYTSTKEVLDATLIHQSITGLYETRIDLSQLGGDGGAEAAAKEAAAKEAAAKEAAAKALEAEAAAKEAAAKEAAAKEAAAKAGGSCQTKNTLNIDEYLLQFPDQLWASLPTDIGRMLVPPITIKIKDNASLPSIRQYPLPKDKTEGLRPLISSLENQGILIKCHSPCNTPIFPIKKAGRDEYRMIHDLRAINNIVAPLTAVVASPTTVLSNLAPSLHWFTVIDLSNAFFSVPIHKDSQYLFAFTFEGHQYTWTVLPQGFIHSPTLFNQALYQSLHKIKFKISSEICIYMDDVLIASKDRDTNLKDTAVMLQHLASEGHKVSKKKLQLCQQEVVYLGQLLTPEGRKILPDRKVTVSQFQQPTTIRQIRAFLGLVGYCRHWIPEFSIHSKFLEKQLKPDTAEPFQLDDQQVEAFNKLKHAITTAPVLVVPDPAKPFQLYTSHSEHASIAVLTQKHAGRTRPIAFLSSKFDAIESGLPPCLKACASIHRSLTQADSFILGAPLIIYTTHAICTLLQRDRSQLVTASRFSKWEADLLRPELTFVACSAVSPAHLYMQSCENNIPPHDCVLLTHTISRPRPDLSDLPIPDPDMTLFSDGSYTTGRGGAAVVMHRPVTDDFIIIHQQPGGASAQTAELLALAAACHLATDKTVNIYTDSRYAYGVVHDFGHLWMHRGFVTSAGTPIKNHKEIEYLLKQIMKPKQVSVIKIEAHTKGVSMEVRGNAAADEAAKNAVFLVQRAGKRTADGSEFEKRTADGSEFESPKKKAKVE

SEQ ID NO: 764 - protein, 2073 aa, synthetic construct
MPAAKRVKLDGGDKKYSIGLDIGTNSVGWAVITDEYKVPSKKFKVLGNTDRHSIKKNLIGALLFDSGETAEATRLKRTARRRYTRRKNRICYLQEIFSNEMAKVDDSFFHRLEESFLVEEDKKHERHPIFGNIVDEVAYHEKYPTIYHLRKKLVDSTDKADLRLIYLALAHMIKFRGHFLIEGDLNPDNSDVDKLFIQLVQTYNQLFEENPINASGVDAKAILSARLSKSRRLENLIAQLPGEKKNGLFGNLIALSLGLTPNFKSNFDLAEDAKLQLSKDTYDDDLDNLLAQIGDQYADLFLAAKNLSDAILLSDILRVNTEITKAPLSASMIKRYDEHHQDLTLLKALVRQQLPEKYKEIFFDQSKNGYAGYIDGGASQEEFYKFIKPILEKMDGTEELLVKLNREDLLRKQRTFDNGSIPHQIHLGELHAILRRQEDFYPFLKDNREKIEKILTFRIPYYVGPLARGNSRFAWMTRKSEETITPWNFEEVVDKGASAQSFIERMTNFDKNLPNEKVLPKHSLLYEYFTVYNELTKVKYVTEGMRKPAFLSGEQKKAIVDLLFKTNRKVTVKQLKEDYFKKIECFDSVEISGVEDRFNASLGTYHDLLKIIKDKDFLDNEENEDILEDIVLTLTLFEDREMIEERLKTYAHLFDDKVMKQLKRRRYTGWGRLSRKLINGIRDKQSGKTILDFLKSDGFANRNFMQLIHDDSLTFKEDIQKAQVSGQGDSLHEHIANLAGSPAIKKGILQTVKVVDELVKVMGRHKPENIVIEMARENQTTQKGQKNSRERMKRIEEGIKELGSQILKEHPVENTQLQNEKLYLYYLQNGRDMYVDQELDINRLSDYDVDHIVPQSFLKDDSIDNKVLTRSDKARGKSDNVPSEEVVKKMKNYWRQLLNAKLITQRKFDNLTKAERGGLSELDKAGFIKRQLVETRQITKHVAQILDSRMNTKYDENDKLIREVKVITLKSKLVSDFRKDFQFYKVREINNYHHAHDAYLNAVVGTALIKKYPKLESEFVYGDYKVYDVRKMIAKSEQEIGKATAKYFFYSNIMNFFKTEITLANGEIRKRPLIETNGETGEIVWDKGRDFATVRKVLSMPQVNIVKKTEVQTGGFSKESILPKRNSDKLIARKKDWDPKKYGGFDSPTVAYSVLVVAKVEKGKSKKLKSVKELLGITIMERSSFEKNPIDFLEAKGYKEVKKDLIIKLPKYSLFELENGRKRMLASAGELQKGNELALPSKYVNFLYLASHYEKLKGSPEDNEQKQLFVEQHKHYLDEIIEQISEFSKRVILADANLDKVLSAYNKHRDKPIREQAENIIHLFTLTNLGAPAAFKYFDTTIDRKRYTSTKEVLDATLIHQSITGLYETRIDLSQLGGDGGGSSGGSGGGGGSCQTKNTLNIDEYLLQFPDQLWASLPTDIGRMLVPPITIKIKDNASLPSIRQYPLPKDKTEGLRPLISSLENQGILIKCHSPCNTPIFPIKKAGRDEYRMIHDLRAINNIVAPLTAVVASPTTVLSNLAPSLHWFTVIDLSNAFFSVPIHKDSQYLFAFTFEGHQYTWTVLPQGFIHSPTLFNQALYQSLHKIKFKISSEICIYMDDVLIASKDRDTNLKDTAVMLQHLASEGHKVSKKKLQLCQQEVVYLGQLLTPEGRKILPDRKVTVSQFQQPTTIRQIRAFLGLVGYCRHWIPEFSIHSKFLEKQLKPDTAEPFQLDDQQVEAFNKLKHAITTAPVLVVPDPAKPFQLYTSHSEHASIAVLTQKHAGRTRPIAFLSSKFDAIESGLPPCLKACASIHRSLTQADSFILGAPLIIYTTHAICTLLQRDRSQLVTASRFSKWEADLLRPELTFVACSAVSPAHLYMQSCENNIPPHDCVLLTHTISRPRPDLSDLPIPDPDMTLFSDGSYTTGRGGAAVVMHRPVTDDFIIIHQQPGGASAQTAELLALAAACHLATDKTVNIYTDSRYAYGVVHDFGHLWMHRGFVTSAGTPIKNHKEIEYLLKQIMKPKQVSVIKIEAHTKGVSMEVRGNAAADEAAKNAVFLVQRAGKRTADGSEFEKRTADGSEFESPKKKAKVE

SEQ ID NO: 765 - protein, 2087 aa, synthetic construct
MPAAKRVKLDGGDKKYSIGLDIGTNSVGWAVITDEYKVPSKKFKVLGNTDRHSIKKNLIGALLFDSGETAEATRLKRTARRRYTRRKNRICYLQEIFSNEMAKVDDSFFHRLEESFLVEEDKKHERHPIFGNIVDEVAYHEKYPTIYHLRKKLVDSTDKADLRLIYLALAHMIKFRGHFLIEGDLNPDNSDVDKLFIQLVQTYNQLFEENPINASGVDAKAILSARLSKSRRLENLIAQLPGEKKNGLFGNLIALSLGLTPNFKSNFDLAEDAKLQLSKDTYDDDLDNLLAQIGDQYADLFLAAKNLSDAILLSDILRVNTEITKAPLSASMIKRYDEHHQDLTLLKALVRQQLPEKYKEIFFDQSKNGYAGYIDGGASQEEFYKFIKPILEKMDGTEELLVKLNREDLLRKQRTFDNGSIPHQIHLGELHAILRRQEDFYPFLKDNREKIEKILTFRIPYYVGPLARGNSRFAWMTRKSEETITPWNFEEVVDKGASAQSFIERMTNFDKNLPNEKVLPKHSLLYEYFTVYNELTKVKYVTEGMRKPAFLSGEQKKAIVDLLFKTNRKVTVKQLKEDYFKKIECFDSVEISGVEDRFNASLGTYHDLLKIIKDKDFLDNEENEDILEDIVLTLTLFEDREMIEERLKTYAHLFDDKVMKQLKRRRYTGWGRLSRKLINGIRDKQSGKTILDFLKSDGFANRNFMQLIHDDSLTFKEDIQKAQVSGQGDSLHEHIANLAGSPAIKKGILQTVKVVDELVKVMGRHKPENIVIEMARENQTTQKGQKNSRERMKRIEEGIKELGSQILKEHPVENTQLQNEKLYLYYLQNGRDMYVDQELDINRLSDYDVDHIVPQSFLKDDSIDNKVLTRSDKARGKSDNVPSEEVVKKMKNYWRQLLNAKLITQRKFDNLTKAERGGLSELDKAGFIKRQLVETRQITKHVAQILDSRMNTKYDENDKLIREVKVITLKSKLVSDFRKDFQFYKVREINNYHHAHDAYLNAVVGTALIKKYPKLESEFVYGDYKVYDVRKMIAKSEQEIGKATAKYFFYSNIMNFFKTEITLANGEIRKRPLIETNGETGEIVWDKGRDFATVRKVLSMPQVNIVKKTEVQTGGFSKESILPKRNSDKLIARKKDWDPKKYGGFDSPTVAYSVLVVAKVEKGKSKKLKSVKELLGITIMERSSFEKNPIDFLEAKGYKEVKKDLIIKLPKYSLFELENGRKRMLASAGELQKGNELALPSKYVNFLYLASHYEKLKGSPEDNEQKQLFVEQHKHYLDEIIEQISEFSKRVILADANLDKVLSAYNKHRDKPIREQAENIIHLFTLTNLGAPAAFKYFDTTIDRKRYTSTKEVLDATLIHQSITGLYETRIDLSQLGGDGGEAAAKGGSPAPGGVPWILKKPLELTIKLDLEEQQGTLLNNSILSKKGKEELKQLFEKYSALWQSWENQVGHRRIRPHKIATGTVKPTPQKQYHINPKAKPDIQIVINDLLKQGVLIQKESTMNTPVYPVPKPNGRWRMVLDYRAVNKVTPLIAVQNQHSYGILGSLFKGRYKTTIDLSNGFWAHPIVPEDYWITAFTWQGKQYCWTVLPQGFLNSPGLFTGDVVDLLQGIPNVEVYVDDVYISHDSEKEHLEYLDILFNRLKEAGYIISLKKSNIANSIVDFLGFQITNEGRGLTDTFKEKLENITAPTTLKQLQSILGLLNFARNFIPDFTELIAPLYALIPKSTKNYVPWQIEHSTTLETLITKLNGAEYLQGRKGDKTLIMKVNASYTTGYIRYYNEGEKKPISYVSIVFSKTELKFTELEKLLTTVHKGLLKALDLSMGQNIHVYSPIVSMQNIQKTPQTAKKALASRWLSWLSYLEDPRIRFFYDPQMPALKDLPAVDTGKDNKKHPSNFQHIFYTDGSAITSPTKEGHLNAGMGIVYFINKDGNLQKQQEWSISLGNHTAQFAEIAAFEFALKKCLPLGGNILVVTDSNYVAKAYNEELDVWASNGFVNNRKKPLKHISKWKSVADLKRLRPDVVVTHEPGHQKLDSSPHAYGNNLADQLATQASFKVHAGKRTADGSEFEKRTADGSEFESPKKKAKVE

SEQ ID NO: 766 - protein, 2085 aa, synthetic construct
MPAAKRVKLDGGDKKYSIGLDIGTNSVGWAVITDEYKVPSKKFKVLGNTDRHSIKKNLIGALLFDSGETAEATRLKRTARRRYTRRKNRICYLQEIFSNEMAKVDDSFFHRLEESFLVEEDKKHERHPIFGNIVDEVAYHEKYPTIYHLRKKLVDSTDKADLRLIYLALAHMIKFRGHFLIEGDLNPDNSDVDKLFIQLVQTYNQLFEENPINASGVDAKAILSARLSKSRRLENLIAQLPGEKKNGLFGNLIALSLGLTPNFKSNFDLAEDAKLQLSKDTYDDDLDNLLAQIGDQYADLFLAAKNLSDAILLSDILRVNTEITKAPLSASMIKRYDEHHQDLTLLKALVRQQLPEKYKEIFFDQSKNGYAGYIDGGASQEEFYKFIKPILEKMDGTEELLVKLNREDLLRKQRTFDNGSIPHQIHLGELHAILRRQEDFYPFLKDNREKIEKILTFRIPYYVGPLARGNSRFAWMTRKSEETITPWNFEEVVDKGASAQSFIERMTNFDKNLPNEKVLPKHSLLYEYFTVYNELTKVKYVTEGMRKPAFLSGEQKKAIVDLLFKTNRKVTVKQLKEDYFKKIECFDSVEISGVEDRFNASLGTYHDLLKIIKDKDFLDNEENEDILEDIVLTLTLFEDREMIEERLKTYAHLFDDKVMKQLKRRRYTGWGRLSRKLINGIRDKQSGKTILDFLKSDGFANRNFMQLIHDDSLTFKEDIQKAQVSGQGDSLHEHIANLAGSPAIKKGILQTVKVVDELVKVMGRHKPENIVIEMARENQTTQKGQKNSRERMKRIEEGIKELGSQILKEHPVENTQLQNEKLYLYYLQNGRDMYVDQELDINRLSDYDVDHIVPQSFLKDDSIDNKVLTRSDKARGKSDNVPSEEVVKKMKNYWRQLLNAKLITQRKFDNLTKAERGGLSELDKAGFIKRQLVETRQITKHVAQILDSRMNTKYDENDKLIREVKVITLKSKLVSDFRKDFQFYKVREINNYHHAHDAYLNAVVGTALIKKYPKLESEFVYGDYKVYDVRKMIAKSEQEIGKATAKYFFYSNIMNFFKTEITLANGEIRKRPLIETNGETGEIVWDKGRDFATVRKVLSMPQVNIVKKTEVQTGGFSKESILPKRNSDKLIARKKDWDPKKYGGFDSPTVAYSVLVVAKVEKGKSKKLKSVKELLGITIMERSSFEKNPIDFLEAKGYKEVKKDLIIKLPKYSLFELENGRKRMLASAGELQKGNELALPSKYVNFLYLASHYEKLKGSPEDNEQKQLFVEQHKHYLDEIIEQISEFSKRVILADANLDKVLSAYNKHRDKPIREQAENIIHLFTLTNLGAPAAFKYFDTTIDRKRYTSTKEVLDATLIHQSITGLYETRIDLSQLGGDGGGSSGGGGGSGGVPWILKKPLELTIKLDLEEQQGTLLNNSILSKKGKEELKQLFEKYSALWQSWENQVGHRRIRPHKIATGTVKPTPQKQYHINPKAKPDIQIVINDLLKQGVLIQKESTMNTPVYPVPKPNGRWRMVLDYRAVNKVTPLIAVQNQHSYGILGSLFKGRYKTTIDLSNGFWAHPIVPEDYWITAFTWQGKQYCWTVLPQGFLNSPGLFTGDVVDLLQGIPNVEVYVDDVYISHDSEKEHLEYLDILFNRLKEAGYIISLKKSNIANSIVDFLGFQITNEGRGLTDTFKEKLENITAPTTLKQLQSILGLLNFARNFIPDFTELIAPLYALIPKSTKNYVPWQIEHSTTLETLITKLNGAEYLQGRKGDKTLIMKVNASYTTGYIRYYNEGEKKPISYVSIVFSKTELKFTELEKLLTTVHKGLLKALDLSMGQNIHVYSPIVSMQNIQKTPQTAKKALASRWLSWLSYLEDPRIRFFYDPQMPALKDLPAVDTGKDNKKHPSNFQHIFYTDGSAITSPTKEGHLNAGMGIVYFINKDGNLQKQQEWSISLGNHTAQFAEIAAFEFALKKCLPLGGNILVVTDSNYVAKAYNEELDVWASNGFVNNRKKPLKHISKWKSVADLKRLRPDVVVTHEPGHQKLDSSPHAYGNNLADQLATQASFKVHAGKRTADGSEFEKRTADGSEFESPKKKAKVE

SEQ ID NO: 767 - protein, 2087 aa, synthetic construct
MPAAKRVKLDGGDKKYSIGLDIGTNSVGWAVITDEYKVPSKKFKVLGNTDRHSIKKNLIGALLFDSGETAEATRLKRTARRRYTRRKNRICYLQEIFSNEMAKVDDSFFHRLEESFLVEEDKKHERHPIFGNIVDEVAYHEKYPTIYHLRKKLVDSTDKADLRLIYLALAHMIKFRGHFLIEGDLNPDNSDVDKLFIQLVQTYNQLFEENPINASGVDAKAILSARLSKSRRLENLIAQLPGEKKNGLFGNLIALSLGLTPNFKSNFDLAEDAKLQLSKDTYDDDLDNLLAQIGDQYADLFLAAKNLSDAILLSDILRVNTEITKAPLSASMIKRYDEHHQDLTLLKALVRQQLPEKYKEIFFDQSKNGYAGYIDGGASQEEFYKFIKPILEKMDGTEELLVKLNREDLLRKQRTFDNGSIPHQIHLGELHAILRRQEDFYPFLKDNREKIEKILTFRIPYYVGPLARGNSRFAWMTRKSEETITPWNFEEVVDKGASAQSFIERMTNFDKNLPNEKVLPKHSLLYEYFTVYNELTKVKYVTEGMRKPAFLSGEQKKAIVDLLFKTNRKVTVKQLKEDYFKKIECFDSVEISGVEDRFNASLGTYHDLLKIIKDKDFLDNEENEDILEDIVLTLTLFEDREMIEERLKTYAHLFDDKVMKQLKRRRYTGWGRLSRKLINGIRDKQSGKTILDFLKSDGFANRNFMQLIHDDSLTFKEDIQKAQVSGQGDSLHEHIANLAGSPAIKKGILQTVKVVDELVKVMGRHKPENIVIEMARENQTTQKGQKNSRERMKRIEEGIKELGSQILKEHPVENTQLQNEKLYLYYLQNGRDMYVDQELDINRLSDYDVDHIVPQSFLKDDSIDNKVLTRSDKARGKSDNVPSEEVVKKMKNYWRQLLNAKLITQRKFDNLTKAERGGLSELDKAGFIKRQLVETRQITKHVAQILDSRMNTKYDENDKLIREVKVITLKSKLVSDFRKDFQFYKVREINNYHHAHDAYLNAVVGTALIKKYPKLESEFVYGDYKVYDVRKMIAKSEQEIGKATAKYFFYSNIMNFFKTEITLANGEIRKRPLIETNGETGEIVWDKGRDFATVRKVLSMPQVNIVKKTEVQTGGFSKESILPKRNSDKLIARKKDWDPKKYGGFDSPTVAYSVLVVAKVEKGKSKKLKSVKELLGITIMERSSFEKNPIDFLEAKGYKEVKKDLIIKLPKYSLFELENGRKRMLASAGELQKGNELALPSKYVNFLYLASHYEKLKGSPEDNEQKQLFVEQHKHYLDEIIEQISEFSKRVILADANLDKVLSAYNKHRDKPIREQAENIIHLFTLTNLGAPAAFKYFDTTIDRKRYTSTKEVLDATLIHQSITGLYETRIDLSQLGGDGGPAPEAAAKGSSGGVPWILKKPLELTIKLDLEEQQGTLLNNSILSKKGKEELKQLFEKYSALWQSWENQVGHRRIRPHKIATGTVKPTPQKQYHINPKAKPDIQIVINDLLKQGVLIQKESTMNTPVYPVPKPNGRWRMVLDYRAVNKVTPLIAVQNQHSYGILGSLFKGRYKTTIDLSNGFWAHPIVPEDYWITAFTWQGKQYCWTVLPQGFLNSPGLFTGDVVDLLQGIPNVEVYVDDVYISHDSEKEHLEYLDILFNRLKEAGYIISLKKSNIANSIVDFLGFQITNEGRGLTDTFKEKLENITAPTTLKQLQSILGLLNFARNFIPDFTELIAPLYALIPKSTKNYVPWQIEHSTTLETLITKLNGAEYLQGRKGDKTLIMKVNASYTTGYIRYYNEGEKKPISYVSIVFSKTELKFTELEKLLTTVHKGLLKALDLSMGQNIHVYSPIVSMQNIQKTPQTAKKALASRWLSWLSYLEDPRIRFFYDPQMPALKDLPAVDTGKDNKKHPSNFQHIFYTDGSAITSPTKEGHLNAGMGIVYFINKDGNLQKQQEWSISLGNHTAQFAEIAAFEFALKKCLPLGGNILVVTDSNYVAKAYNEELDVWASNGFVNNRKKPLKHISKWKSVADLKRLRPDVVVTHEPGHQKLDSSPHAYGNNLADQLATQASFKVHAGKRTADGSEFEKRTADGSEFESPKKKAKVE

SEQ ID NO: 768 - protein, 2091 aa, synthetic construct
MPAAKRVKLDGGDKKYSIGLDIGTNSVGWAVITDEYKVPSKKFKVLGNTDRHSIKKNLIGALLFDSGETAEATRLKRTARRRYTRRKNRICYLQEIFSNEMAKVDDSFFHRLEESFLVEEDKKHERHPIFGNIVDEVAYHEKYPTIYHLRKKLVDSTDKADLRLIYLALAHMIKFRGHFLIEGDLNPDNSDVDKLFIQLVQTYNQLFEENPINASGVDAKAILSARLSKSRRLENLIAQLPGEKKNGLFGNLIALSLGLTPNFKSNFDLAEDAKLQLSKDTYDDDLDNLLAQIGDQYADLFLAAKNLSDAILLSDILRVNTEITKAPLSASMIKRYDEHHQDLTLLKALVRQQLPEKYKEIFFDQSKNGYAGYIDGGASQEEFYKFIKPILEKMDGTEELLVKLNREDLLRKQRTFDNGSIPHQIHLGELHAILRRQEDFYPFLKDNREKIEKILTFRIPYYVGPLARGNSRFAWMTRKSEETITPWNFEEVVDKGASAQSFIERMTNFDKNLPNEKVLPKHSLLYEYFTVYNELTKVKYVTEGMRKPAFLSGEQKKAIVDLLFKTNRKVTVKQLKEDYFKKIECFDSVEISGVEDRFNASLGTYHDLLKIIKDKDFLDNEENEDILEDIVLTLTLFEDREMIEERLKTYAHLFDDKVMKQLKRRRYTGWGRLSRKLINGIRDKQSGKTILDFLKSDGFANRNFMQLIHDDSLTFKEDIQKAQVSGQGDSLHEHIANLAGSPAIKKGILQTVKVVDELVKVMGRHKPENIVIEMARENQTTQKGQKNSRERMKRIEEGIKELGSQILKEHPVENTQLQNEKLYLYYLQNGRDMYVDQELDINRLSDYDVDHIVPQSFLKDDSIDNKVLTRSDKARGKSDNVPSEEVVKKMKNYWRQLLNAKLITQRKFDNLTKAERGGLSELDKAGFIKRQLVETRQITKHVAQILDSRMNTKYDENDKLIREVKVITLKSKLVSDFRKDFQFYKVREINNYHHAHDAYLNAVVGTALIKKYPKLESEFVYGDYKVYDVRKMIAKSEQEIGKATAKYFFYSNIMNFFKTEITLANGEIRKRPLIETNGETGEIVWDKGRDFATVRKVLSMPQVNIVKKTEVQTGGFSKESILPKRNSDKLIARKKDWDPKKYGGFDSPTVAYSVLVVAKVEKGKSKKLKSVKELLGITIMERSSFEKNPIDFLEAKGYKEVKKDLIIKLPKYSLFELENGRKRMLASAGELQKGNELALPSKYVNFLYLASHYEKLKGSPEDNEQKQLFVEQHKHYLDEIIEQISEFSKRVILADANLDKVLSAYNKHRDKPIREQAENIIHLFTLTNLGAPAAFKYFDTTIDRKRYTSTKEVLDATLIHQSITGLYETRIDLSQLGGDGGGGGGSEAAAKGGGGSGGVPWILKKPLELTIKLDLEEQQGTLLNNSILSKKGKEELKQLFEKYSALWQSWENQVGHRRIRPHKIATGTVKPTPQKQYHINPKAKPDIQIVINDLLKQGVLIQKESTMNTPVYPVPKPNGRWRMVLDYRAVNKVTPLIAVQNQHSYGILGSLFKGRYKTTIDLSNGFWAHPIVPEDYWITAFTWQGKQYCWTVLPQGFLNSPGLFTGDVVDLLQGIPNVEVYVDDVYISHDSEKEHLEYLDILFNRLKEAGYIISLKKSNIANSIVDFLGFQITNEGRGLTDTFKEKLENITAPTTLKQLQSILGLLNFARNFIPDFTELIAPLYALIPKSTKNYVPWQIEHSTTLETLITKLNGAEYLQGRKGDKTLIMKVNASYTTGYIRYYNEGEKKPISYVSIVFSKTELKFTELEKLLTTVHKGLLKALDLSMGQNIHVYSPIVSMQNIQKTPQTAKKALASRWLSWLSYLEDPRIRFFYDPQMPALKDLPAVDTGKDNKKHPSNFQHIFYTDGSAITSPTKEGHLNAGMGIVYFINKDGNLQKQQEWSISLGNHTAQFAEIAAFEFALKKCLPLGGNILVVTDSNYVAKAYNEELDVWASNGFVNNRKKPLKHISKWKSVADLKRLRPDVVVTHEPGHQKLDSSPHAYGNNLADQLATQASFKVHAGKRTADGSEFEKRTADGSEFESPKKKAKVE

SEQ ID NO: 769 - protein, 2087 aa, synthetic construct
MPAAKRVKLDGGDKKYSIGLDIGTNSVGWAVITDEYKVPSKKFKVLGNTDRHSIKKNLIGALLFDSGETAEATRLKRTARRRYTRRKNRICYLQEIFSNEMAKVDDSFFHRLEESFLVEEDKKHERHPIFGNIVDEVAYHEKYPTIYHLRKKLVDSTDKADLRLIYLALAHMIKFRGHFLIEGDLNPDNSDVDKLFIQLVQTYNQLFEENPINASGVDAKAILSARLSKSRRLENLIAQLPGEKKNGLFGNLIALSLGLTPNFKSNFDLAEDAKLQLSKDTYDDDLDNLLAQIGDQYADLFLAAKNLSDAILLSDILRVNTEITKAPLSASMIKRYDEHHQDLTLLKALVRQQLPEKYKEIFFDQSKNGYAGYIDGGASQEEFYKFIKPILEKMDGTEELLVKLNREDLLRKQRTFDNGSIPHQIHLGELHAILRRQEDFYPFLKDNREKIEKILTFRIPYYVGPLARGNSRFAWMTRKSEETITPWNFEEVVDKGASAQSFIERMTNFDKNLPNEKVLPKHSLLYEYFTVYNELTKVKYVTEGMRKPAFLSGEQKKAIVDLLFKTNRKVTVKQLKEDYFKKIECFDSVEISGVEDRFNASLGTYHDLLKIIKDKDFLDNEENEDILEDIVLTLTLFEDREMIEERLKTYAHLFDDKVMKQLKRRRYTGWGRLSRKLINGIRDKQSGKTILDFLKSDGFANRNFMQLIHDDSLTFKEDIQKAQVSGQGDSLHEHIANLAGSPAIKKGILQTVKVVDELVKVMGRHKPENIVIEMARENQTTQKGQKNSRERMKRIEEGIKELGSQILKEHPVENTQLQNEKLYLYYLQNGRDMYVDQELDINRLSDYDVDHIVPQSFLKDDSIDNKVLTRSDKARGKSDNVPSEEVVKKMKNYWRQLLNAKLITQRKFDNLTKAERGGLSELDKAGFIKRQLVETRQITKHVAQILDSRMNTKYDENDKLIREVKVITLKSKLVSDFRKDFQFYKVREINNYHHAHDAYLNAVVGTALIKKYPKLESEFVYGDYKVYDVRKMIAKSEQEIGKATAKYFFYSNIMNFFKTEITLANGEIRKRPLIETNGETGEIVWDKGRDFATVRKVLSMPQVNIVKKTEVQTGGFSKESILPKRNSDKLIARKKDWDPKKYGGFDSPTVAYSVLVVAKVEKGKSKKLKSVKELLGITIMERSSFEKNPIDFLEAKGYKEVKKDLIIKLPKYSLFELENGRKRMLASAGELQKGNELALPSKYVNFLYLASHYEKLKGSPEDNEQKQLFVEQHKHYLDEIIEQISEFSKRVILADANLDKVLSAYNKHRDKPIREQAENIIHLFTLTNLGAPAAFKYFDTTIDRKRYTSTKEVLDATLIHQSITGLYETRIDLSQLGGDGGGGGGSSEAAAKGGVPWILKKPLELTIKLDLEEQQGTLLNNSILSKKGKEELKQLFEKYSALWQSWENQVGHRRIRPHKIATGTVKPTPQKQYHINPKAKPDIQIVINDLLKQGVLIQKESTMNTPVYPVPKPNGRWRMVLDYRAVNKVTPLIAVQNQHSYGILGSLFKGRYKTTIDLSNGFWAHPIVPEDYWITAFTWQGKQYCWTVLPQGFLNSPGLFTGDVVDLLQGIPNVEVYVDDVYISHDSEKEHLEYLDILFNRLKEAGYIISLKKSNIANSIVDFLGFQITNEGRGLTDTFKEKLENITAPTTLKQLQSILGLLNFARNFIPDFTELIAPLYALIPKSTKNYVPWQIEHSTTLETLITKLNGAEYLQGRKGDKTLIMKVNASYTTGYIRYYNEGEKKPISYVSIVFSKTELKFTELEKLLTTVHKGLLKALDLSMGQNIHVYSPIVSMQNIQKTPQTAKKALASRWLSWLSYLEDPRIRFFYDPQMPALKDLPAVDTGKDNKKHPSNFQHIFYTDGSAITSPTKEGHLNAGMGIVYFINKDGNLQKQQEWSISLGNHTAQFAEIAAFEFALKKCLPLGGNILVVTDSNYVAKAYNEELDVWASNGFVNNRKKPLKHISKWKSVADLKRLRPDVVVTHEPGHQKLDSSPHAYGNNLADQLATQASFKVHAGKRTADGSEFEKRTADGSEFESPKKKAKVE

SEQ ID NO: 770 - protein, 2087 aa, synthetic construct
MPAAKRVKLDGGDKKYSIGLDIGTNSVGWAVITDEYKVPSKKFKVLGNTDRHSIKKNLIGALLFDSGETAEATRLKRTARRRYTRRKNRICYLQEIFSNEMAKVDDSFFHRLEESFLVEEDKKHERHPIFGNIVDEVAYHEKYPTIYHLRKKLVDSTDKADLRLIYLALAHMIKFRGHFLIEGDLNPDNSDVDKLFIQLVQTYNQLFEENPINASGVDAKAILSARLSKSRRLENLIAQLPGEKKNGLFGNLIALSLGLTPNFKSNFDLAEDAKLQLSKDTYDDDLDNLLAQIGDQYADLFLAAKNLSDAILLSDILRVNTEITKAPLSASMIKRYDEHHQDLTLLKALVRQQLPEKYKEIFFDQSKNGYAGYIDGGASQEEFYKFIKPILEKMDGTEELLVKLNREDLLRKQRTFDNGSIPHQIHLGELHAILRRQEDFYPFLKDNREKIEKILTFRIPYYVGPLARGNSRFAWMTRKSEETITPWNFEEVVDKGASAQSFIERMTNFDKNLPNEKVLPKHSLLYEYFTVYNELTKVKYVTEGMRKPAFLSGEQKKAIVDLLFKTNRKVTVKQLKEDYFKKIECFDSVEISGVEDRFNASLGTYHDLLKIIKDKDFLDNEENEDILEDIVLTLTLFEDREMIEERLKTYAHLFDDKVMKQLKRRRYTGWGRLSRKLINGIRDKQSGKTILDFLKSDGFANRNFMQLIHDDSLTFKEDIQKAQVSGQGDSLHEHIANLAGSPAIKKGILQTVKVVDELVKVMGRHKPENIVIEMARENQTTQKGQKNSRERMKRIEEGIKELGSQILKEHPVENTQLQNEKLYLYYLQNGRDMYVDQELDINRLSDYDVDHIVPQSFLKDDSIDNKVLTRSDKARGKSDNVPSEEVVKKMKNYWRQLLNAKLITQRKFDNLTKAERGGLSELDKAGFIKRQLVETRQITKHVAQILDSRMNTKYDENDKLIREVKVITLKSKLVSDFRKDFQFYKVREINNYHHAHDAYLNAVVGTALIKKYPKLESEFVYGDYKVYDVRKMIAKSEQEIGKATAKYFFYSNIMNFFKTEITLANGEIRKRPLIETNGETGEIVWDKGRDFATVRKVLSMPQVNIVKKTEVQTGGFSKESILPKRNSDKLIARKKDWDPKKYGGFDSPTVAYSVLVVAKVEKGKSKKLKSVKELLGITIMERSSFEKNPIDFLEAKGYKEVKKDLIIKLPKYSLFELENGRKRMLASAGELQKGNELALPSKYVNFLYLASHYEKLKGSPEDNEQKQLFVEQHKHYLDEIIEQISEFSKRVILADANLDKVLSAYNKHRDKPIREQAENIIHLFTLTNLGAPAAFKYFDTTIDRKRYTSTKEVLDATLIHQSITGLYETRIDLSQLGGDGGGGGEAAAKGSSGGVPWILKKPLELTIKLDLEEQQGTLLNNSILSKKGKEELKQLFEKYSALWQSWENQVGHRRIRPHKIATGTVKPTPQKQYHINPKAKPDIQIVINDLLKQGVLIQKESTMNTPVYPVPKPNGRWRMVLDYRAVNKVTPLIAVQNQHSYGILGSLFKGRYKTTIDLSNGFWAHPIVPEDYWITAFTWQGKQYCWTVLPQGFLNSPGLFTGDVVDLLQGIPNVEVYVDDVYISHDSEKEHLEYLDILFNRLKEAGYIISLKKSNIANSIVDFLGFQITNEGRGLTDTFKEKLENITAPTTLKQLQSILGLLNFARNFIPDFTELIAPLYALIPKSTKNYVPWQIEHSTTLETLITKLNGAEYLQGRKGDKTLIMKVNASYTTGYIRYYNEGEKKPISYVSIVFSKTELKFTELEKLLTTVHKGLLKALDLSMGQNIHVYSPIVSMQNIQKTPQTAKKALASRWLSWLSYLEDPRIRFFYDPQMPALKDLPAVDTGKDNKKHPSNFQHIFYTDGSAITSPTKEGHLNAGMGIVYFINKDGNLQKQQEWSISLGNHTAQFAEIAAFEFALKKCLPLGGNILVVTDSNYVAKAYNEELDVWASNGFVNNRKKPLKHISKWKSVADLKRLRPDVVVTHEPGHQKLDSSPHAYGNNLADQLATQASFKVHAGKRTADGSEFEKRTADGSEFESPKKKAKVE

SEQ ID NO: 771 - protein, 2082 aa, synthetic construct
MPAAKRVKLDGGDKKYSIGLDIGTNSVGWAVITDEYKVPSKKFKVLGNTDRHSIKKNLIGALLFDSGETAEATRLKRTARRRYTRRKNRICYLQEIFSNEMAKVDDSFFHRLEESFLVEEDKKHERHPIFGNIVDEVAYHEKYPTIYHLRKKLVDSTDKADLRLIYLALAHMIKFRGHFLIEGDLNPDNSDVDKLFIQLVQTYNQLFEENPINASGVDAKAILSARLSKSRRLENLIAQLPGEKKNGLFGNLIALSLGLTPNFKSNFDLAEDAKLQLSKDTYDDDLDNLLAQIGDQYADLFLAAKNLSDAILLSDILRVNTEITKAPLSASMIKRYDEHHQDLTLLKALVRQQLPEKYKEIFFDQSKNGYAGYIDGGASQEEFYKFIKPILEKMDGTEELLVKLNREDLLRKQRTFDNGSIPHQIHLGELHAILRRQEDFYPFLKDNREKIEKILTFRIPYYVGPLARGNSRFAWMTRKSEETITPWNFEEVVDKGASAQSFIERMTNFDKNLPNEKVLPKHSLLYEYFTVYNELTKVKYVTEGMRKPAFLSGEQKKAIVDLLFKTNRKVTVKQLKEDYFKKIECFDSVEISGVEDRFNASLGTYHDLLKIIKDKDFLDNEENEDILEDIVLTLTLFEDREMIEERLKTYAHLFDDKVMKQLKRRRYTGWGRLSRKLINGIRDKQSGKTILDFLKSDGFANRNFMQLIHDDSLTFKEDIQKAQVSGQGDSLHEHIANLAGSPAIKKGILQTVKVVDELVKVMGRHKPENIVIEMARENQTTQKGQKNSRERMKRIEEGIKELGSQILKEHPVENTQLQNEKLYLYYLQNGRDMYVDQELDINRLSDYDVDHIVPQSFLKDDSIDNKVLTRSDKARGKSDNVPSEEVVKKMKNYWRQLLNAKLITQRKFDNLTKAERGGLSELDKAGFIKRQLVETRQITKHVAQILDSRMNTKYDENDKLIREVKVITLKSKLVSDFRKDFQFYKVREINNYHHAHDAYLNAVVGTALIKKYPKLESEFVYGDYKVYDVRKMIAKSEQEIGKATAKYFFYSNIMNFFKTEITLANGEIRKRPLIETNGETGEIVWDKGRDFATVRKVLSMPQVNIVKKTEVQTGGFSKESILPKRNSDKLIARKKDWDPKKYGGFDSPTVAYSVLVVAKVEKGKSKKLKSVKELLGITIMERSSFEKNPIDFLEAKGYKEVKKDLIIKLPKYSLFELENGRKRMLASAGELQKGNELALPSKYVNFLYLASHYEKLKGSPEDNEQKQLFVEQHKHYLDEIIEQISEFSKRVILADANLDKVLSAYNKHRDKPIREQAENIIHLFTLTNLGAPAAFKYFDTTIDRKRYTSTKEVLDATLIHQSITGLYETRIDLSQLGGDGGGSSGGGGGVPWILKKPLELTIKLDLEEQQGTLLNNSILSKKGKEELKQLFEKYSALWQSWENQVGHRRIRPHKIATGTVKPTPQKQYHINPKAKPDIQIVINDLLKQGVLIQKESTMNTPVYPVPKPNGRWRMVLDYRAVNKVTPLIAVQNQHSYGILGSLFKGRYKTTIDLSNGFWAHPIVPEDYWITAFTWQGKQYCWTVLPQGFLNSPGLFTGDVVDLLQGIPNVEVYVDDVYISHDSEKEHLEYLDILFNRLKEAGYIISLKKSNIANSIVDFLGFQITNEGRGLTDTFKEKLENITAPTTLKQLQSILGLLNFARNFIPDFTELIAPLYALIPKSTKNYVPWQIEHSTTLETLITKLNGAEYLQGRKGDKTLIMKVNASYTTGYIRYYNEGEKKPISYVSIVFSKTELKFTELEKLLTTVHKGLLKALDLSMGQNIHVYSPIVSMQNIQKTPQTAKKALASRWLSWLSYLEDPRIRFFYDPQMPALKDLPAVDTGKDNKKHPSNFQHIFYTDGSAITSPTKEGHLNAGMGIVYFINKDGNLQKQQEWSISLGNHTAQFAEIAAFEFALKKCLPLGGNILVVTDSNYVAKAYNEELDVWASNGFVNNRKKPLKHISKWKSVADLKRLRPDVVVTHEPGHQKLDSSPHAYGNNLADQLATQASFKVHAGKRTADGSEFEKRTADGSEFESPKKKAKVE

SEQ ID NO: 772 - protein, 2087 aa, synthetic construct
MPAAKRVKLDGGDKKYSIGLDIGTNSVGWAVITDEYKVPSKKFKVLGNTDRHSIKKNLIGALLFDSGETAEATRLKRTARRRYTRRKNRICYLQEIFSNEMAKVDDSFFHRLEESFLVEEDKKHERHPIFGNIVDEVAYHEKYPTIYHLRKKLVDSTDKADLRLIYLALAHMIKFRGHFLIEGDLNPDNSDVDKLFIQLVQTYNQLFEENPINASGVDAKAILSARLSKSRRLENLIAQLPGEKKNGLFGNLIALSLGLTPNFKSNFDLAEDAKLQLSKDTYDDDLDNLLAQIGDQYADLFLAAKNLSDAILLSDILRVNTEITKAPLSASMIKRYDEHHQDLTLLKALVRQQLPEKYKEIFFDQSKNGYAGYIDGGASQEEFYKFIKPILEKMDGTEELLVKLNREDLLRKQRTFDNGSIPHQIHLGELHAILRRQEDFYPFLKDNREKIEKILTFRIPYYVGPLARGNSRFAWMTRKSEETITPWNFEEVVDKGASAQSFIERMTNFDKNLPNEKVLPKHSLLYEYFTVYNELTKVKYVTEGMRKPAFLSGEQKKAIVDLLFKTNRKVTVKQLKEDYFKKIECFDSVEISGVEDRFNASLGTYHDLLKIIKDKDFLDNEENEDILEDIVLTLTLFEDREMIEERLKTYAHLFDDKVMKQLKRRRYTGWGRLSRKLINGIRDKQSGKTILDFLKSDGFANRNFMQLIHDDSLTFKEDIQKAQVSGQGDSLHEHIANLAGSPAIKKGILQTVKVVDELVKVMGRHKPENIVIEMARENQTTQKGQKNSRERMKRIEEGIKELGSQILKEHPVENTQLQNEKLYLYYLQNGRDMYVDQELDINRLSDYDVDHIVPQSFLKDDSIDNKVLTRSDKARGKSDNVPSEEVVKKMKNYWRQLLNAKLITQRKFDNLTKAERGGLSELDKAGFIKRQLVETRQITKHVAQILDSRMNTKYDENDKLIREVKVITLKSKLVSDFRKDFQFYKVREINNYHHAHDAYLNAVVGTALIKKYPKLESEFVYGDYKVYDVRKMIAKSEQEIGKATAKYFFYSNIMNFFKTEITLANGEIRKRPLIETNGETGEIVWDKGRDFATVRKVLSMPQVNIVKKTEVQTGGFSKESILPKRNSDKLIARKKDWDPKKYGGFDSPTVAYSVLVVAKVEKGKSKKLKSVKELLGITIMERSSFEKNPIDFLEAKGYKEVKKDLIIKLPKYSLFELENGRKRMLASAGELQKGNELALPSKYVNFLYLASHYEKLKGSPEDNEQKQLFVEQHKHYLDEIIEQISEFSKRVILADANLDKVLSAYNKHRDKPIREQAENIIHLFTLTNLGAPAAFKYFDTTIDRKRYTSTKEVLDATLIHQSITGLYETRIDLSQLGGDGGEAAAKPAPGGSGGVPWILKKPLELTIKLDLEEQQGTLLNNSILSKKGKEELKQLFEKYSALWQSWENQVGHRRIRPHKIATGTVKPTPQKQYHINPKAKPDIQIVINDLLKQGVLIQKESTMNTPVYPVPKPNGRWRMVLDYRAVNKVTPLIAVQNQHSYGILGSLFKGRYKTTIDLSNGFWAHPIVPEDYWITAFTWQGKQYCWTVLPQGFLNSPGLFTGDVVDLLQGIPNVEVYVDDVYISHDSEKEHLEYLDILFNRLKEAGYIISLKKSNIANSIVDFLGFQITNEGRGLTDTFKEKLENITAPTTLKQLQSILGLLNFARNFIPDFTELIAPLYALIPKSTKNYVPWQIEHSTTLETLITKLNGAEYLQGRKGDKTLIMKVNASYTTGYIRYYNEGEKKPISYVSIVFSKTELKFTELEKLLTTVHKGLLKALDLSMGQNIHVYSPIVSMQNIQKTPQTAKKALASRWLSWLSYLEDPRIRFFYDPQMPALKDLPAVDTGKDNKKHPSNFQHIFYTDGSAITSPTKEGHLNAGMGIVYFINKDGNLQKQQEWSISLGNHTAQFAEIAAFEFALKKCLPLGGNILVVTDSNYVAKAYNEELDVWASNGFVNNRKKPLKHISKWKSVADLKRLRPDVVVTHEPGHQKLDSSPHAYGNNLADQLATQASFKVHAGKRTADGSEFEKRTADGSEFESPKKKAKVE

SEQ ID NO: 773 - protein, 2088 aa, synthetic construct
MPAAKRVKLDGGDKKYSIGLDIGTNSVGWAVITDEYKVPSKKFKVLGNTDRHSIKKNLIGALLFDSGETAEATRLKRTARRRYTRRKNRICYLQEIFSNEMAKVDDSFFHRLEESFLVEEDKKHERHPIFGNIVDEVAYHEKYPTIYHLRKKLVDSTDKADLRLIYLALAHMIKFRGHFLIEGDLNPDNSDVDKLFIQLVQTYNQLFEENPINASGVDAKAILSARLSKSRRLENLIAQLPGEKKNGLFGNLIALSLGLTPNFKSNFDLAEDAKLQLSKDTYDDDLDNLLAQIGDQYADLFLAAKNLSDAILLSDILRVNTEITKAPLSASMIKRYDEHHQDLTLLKALVRQQLPEKYKEIFFDQSKNGYAGYIDGGASQEEFYKFIKPILEKMDGTEELLVKLNREDLLRKQRTFDNGSIPHQIHLGELHAILRRQEDFYPFLKDNREKIEKILTFRIPYYVGPLARGNSRFAWMTRKSEETITPWNFEEVVDKGASAQSFIERMTNFDKNLPNEKVLPKHSLLYEYFTVYNELTKVKYVTEGMRKPAFLSGEQKKAIVDLLFKTNRKVTVKQLKEDYFKKIECFDSVEISGVEDRFNASLGTYHDLLKIIKDKDFLDNEENEDILEDIVLTLTLFEDREMIEERLKTYAHLFDDKVMKQLKRRRYTGWGRLSRKLINGIRDKQSGKTILDFLKSDGFANRNFMQLIHDDSLTFKEDIQKAQVSGQGDSLHEHIANLAGSPAIKKGILQTVKVVDELVKVMGRHKPENIVIEMARENQTTQKGQKNSRERMKRIEEGIKELGSQILKEHPVENTQLQNEKLYLYYLQNGRDMYVDQELDINRLSDYDVDHIVPQSFLKDDSIDNKVLTRSDKARGKSDNVPSEEVVKKMKNYWRQLLNAKLITQRKFDNLTKAERGGLSELDKAGFIKRQLVETRQITKHVAQILDSRMNTKYDENDKLIREVKVITLKSKLVSDFRKDFQFYKVREINNYHHAHDAYLNAVVGTALIKKYPKLESEFVYGDYKVYDVRKMIAKSEQEIGKATAKYFFYSNIMNFFKTEITLANGEIRKRPLIETNGETGEIVWDKGRDFATVRKVLSMPQVNIVKKTEVQTGGFSKESILPKRNSDKLIARKKDWDPKKYGGFDSPTVAYSVLVVAKVEKGKSKKLKSVKELLGITIMERSSFEKNPIDFLEAKGYKEVKKDLIIKLPKYSLFELENGRKRMLASAGELQKGNELALPSKYVNFLYLASHYEKLKGSPEDNEQKQLFVEQHKHYLDEIIEQISEFSKRVILADANLDKVLSAYNKHRDKPIREQAENIIHLFTLTNLGAPAAFKYFDTTIDRKRYTSTKEVLDATLIHQSITGLYETRIDLSQLGGDGGGSSGSSGSSGSSGGVPWILKKPLELTIKLDLEEQQGTLLNNSILSKKGKEELKQLFEKYSALWQSWENQVGHRRIRPHKIATGTVKPTPQKQYHINPKAKPDIQIVINDLLKQGVLIQKESTMNTPVYPVPKPNGRWRMVLDYRAVNKVTPLIAVQNQHSYGILGSLFKGRYKTTIDLSNGFWAHPIVPEDYWITAFTWQGKQYCWTVLPQGFLNSPGLFTGDVVDLLQGIPNVEVYVDDVYISHDSEKEHLEYLDILFNRLKEAGYIISLKKSNIANSIVDFLGFQITNEGRGLTDTFKEKLENITAPTTLKQLQSILGLLNFARNFIPDFTELIAPLYALIPKSTKNYVPWQIEHSTTLETLITKLNGAEYLQGRKGDKTLIMKVNASYTTGYIRYYNEGEKKPISYVSIVFSKTELKFTELEKLLTTVHKGLLKALDLSMGQNIHVYSPIVSMQNIQKTPQTAKKALASRWLSWLSYLEDPRIRFFYDPQMPALKDLPAVDTGKDNKKHPSNFQHIFYTDGSAITSPTKEGHLNAGMGIVYFINKDGNLQKQQEWSISLGNHTAQFAEIAAFEFALKKCLPLGGNILVVTDSNYVAKAYNEELDVWASNGFVNNRKKPLKHISKWKSVADLKRLRPDVVVTHEPGHQKLDSSPHAYGNNLADQLATQASFKVHAGKRTADGSEFEKRTADGSEFESPKKKAKVE

SEQ ID NO: 774 - protein, 2085 aa, synthetic construct
MPAAKRVKLDGGDKKYSIGLDIGTNSVGWAVITDEYKVPSKKFKVLGNTDRHSIKKNLIGALLFDSGETAEATRLKRTARRRYTRRKNRICYLQEIFSNEMAKVDDSFFHRLEESFLVEEDKKHERHPIFGNIVDEVAYHEKYPTIYHLRKKLVDSTDKADLRLIYLALAHMIKFRGHFLIEGDLNPDNSDVDKLFIQLVQTYNQLFEENPINASGVDAKAILSARLSKSRRLENLIAQLPGEKKNGLFGNLIALSLGLTPNFKSNFDLAEDAKLQLSKDTYDDDLDNLLAQIGDQYADLFLAAKNLSDAILLSDILRVNTEITKAPLSASMIKRYDEHHQDLTLLKALVRQQLPEKYKEIFFDQSKNGYAGYIDGGASQEEFYKFIKPILEKMDGTEELLVKLNREDLLRKQRTFDNGSIPHQIHLGELHAILRRQEDFYPFLKDNREKIEKILTFRIPYYVGPLARGNSRFAWMTRKSEETITPWNFEEVVDKGASAQSFIERMTNFDKNLPNEKVLPKHSLLYEYFTVYNELTKVKYVTEGMRKPAFLSGEQKKAIVDLLFKTNRKVTVKQLKEDYFKKIECFDSVEISGVEDRFNASLGTYHDLLKIIKDKDFLDNEENEDILEDIVLTLTLFEDREMIEERLKTYAHLFDDKVMKQLKRRRYTGWGRLSRKLINGIRDKQSGKTILDFLKSDGFANRNFMQLIHDDSLTFKEDIQKAQVSGQGDSLHEHIANLAGSPAIKKGILQTVKVVDELVKVMGRHKPENIVIEMARENQTTQKGQKNSRERMKRIEEGIKELGSQILKEHPVENTQLQNEKLYLYYLQNGRDMYVDQELDINRLSDYDVDHIVPQSFLKDDSIDNKVLTRSDKARGKSDNVPSEEVVKKMKNYWRQLLNAKLITQRKFDNLTKAERGGLSELDKAGFIKRQLVETRQITKHVAQILDSRMNTKYDENDKLIREVKVITLKSKLVSDFRKDFQFYKVREINNYHHAHDAYLNAVVGTALIKKYPKLESEFVYGDYKVYDVRKMIAKSEQEIGKATAKYFFYSNIMNFFKTEITLANGEIRKRPLIETNGETGEIVWDKGRDFATVRKVLSMPQVNIVKKTEVQTGGFSKESILPKRNSDKLIARKKDWDPKKYGGFDSPTVAYSVLVVAKVEKGKSKKLKSVKELLGITIMERSSFEKNPIDFLEAKGYKEVKKDLIIKLPKYSLFELENGRKRMLASAGELQKGNELALPSKYVNFLYLASHYEKLKGSPEDNEQKQLFVEQHKHYLDEIIEQISEFSKRVILADANLDKVLSAYNKHRDKPIREQAENIIHLFTLTNLGAPAAFKYFDTTIDRKRYTSTKEVLDATLIHQSITGLYETRIDLSQLGGDGGGGGGGSGSSGGVPWILKKPLELTIKLDLEEQQGTLLNNSILSKKGKEELKQLFEKYSALWQSWENQVGHRRIRPHKIATGTVKPTPQKQYHINPKAKPDIQIVINDLLKQGVLIQKESTMNTPVYPVPKPNGRWRMVLDYRAVNKVTPLIAVQNQHSYGILGSLFKGRYKTTIDLSNGFWAHPIVPEDYWITAFTWQGKQYCWTVLPQGFLNSPGLFTGDVVDLLQGIPNVEVYVDDVYISHDSEKEHLEYLDILFNRLKEAGYIISLKKSNIANSIVDFLGFQITNEGRGLTDTFKEKLENITAPTTLKQLQSILGLLNFARNFIPDFTELIAPLYALIPKSTKNYVPWQIEHSTTLETLITKLNGAEYLQGRKGDKTLIMKVNASYTTGYIRYYNEGEKKPISYVSIVFSKTELKFTELEKLLTTVHKGLLKALDLSMGQNIHVYSPIVSMQNIQKTPQTAKKALASRWLSWLSYLEDPRIRFFYDPQMPALKDLPAVDTGKDNKKHPSNFQHIFYTDGSAITSPTKEGHLNAGMGIVYFINKDGNLQKQQEWSISLGNHTAQFAEIAAFEFALKKCLPLGGNILVVTDSNYVAKAYNEELDVWASNGFVNNRKKPLKHISKWKSVADLKRLRPDVVVTHEPGHQKLDSSPHAYGNNLADQLATQASFKVHAGKRTADGSEFEKRTADGSEFESPKKKAKVE

SEQ ID NO: 775 - protein, 2085 aa, synthetic construct
MPAAKRVKLDGGDKKYSIGLDIGTNSVGWAVITDEYKVPSKKFKVLGNTDRHSIKKNLIGALLFDSGETAEATRLKRTARRRYTRRKNRICYLQEIFSNEMAKVDDSFFHRLEESFLVEEDKKHERHPIFGNIVDEVAYHEKYPTIYHLRKKLVDSTDKADLRLIYLALAHMIKFRGHFLIEGDLNPDNSDVDKLFIQLVQTYNQLFEENPINASGVDAKAILSARLSKSRRLENLIAQLPGEKKNGLFGNLIALSLGLTPNFKSNFDLAEDAKLQLSKDTYDDDLDNLLAQIGDQYADLFLAAKNLSDAILLSDILRVNTEITKAPLSASMIKRYDEHHQDLTLLKALVRQQLPEKYKEIFFDQSKNGYAGYIDGGASQEEFYKFIKPILEKMDGTEELLVKLNREDLLRKQRTFDNGSIPHQIHLGELHAILRRQEDFYPFLKDNREKIEKILTFRIPYYVGPLARGNSRFAWMTRKSEETITPWNFEEVVDKGASAQSFIERMTNFDKNLPNEKVLPKHSLLYEYFTVYNELTKVKYVTEGMRKPAFLSGEQKKAIVDLLFKTNRKVTVKQLKEDYFKKIECFDSVEISGVEDRFNASLGTYHDLLKIIKDKDFLDNEENEDILEDIVLTLTLFEDREMIEERLKTYAHLFDDKVMKQLKRRRYTGWGRLSRKLINGIRDKQSGKTILDFLKSDGFANRNFMQLIHDDSLTFKEDIQKAQVSGQGDSLHEHIANLAGSPAIKKGILQTVKVVDELVKVMGRHKPENIVIEMARENQTTQKGQKNSRERMKRIEEGIKELGSQILKEHPVENTQLQNEKLYLYYLQNGRDMYVDQELDINRLSDYDVDHIVPQSFLKDDSIDNKVLTRSDKARGKSDNVPSEEVVKKMKNYWRQLLNAKLITQRKFDNLTKAERGGLSELDKAGFIKRQLVETRQITKHVAQILDSRMNTKYDENDKLIREVKVITLKSKLVSDFRKDFQFYKVREINNYHHAHDAYLNAVVGTALIKKYPKLESEFVYGDYKVYDVRKMIAKSEQEIGKATAKYFFYSNIMNFFKTEITLANGEIRKRPLIETNGETGEIVWDKGRDFATVRKVLSMPQVNIVKKTEVQTGGFSKESILPKRNSDKLIARKKDWDPKKYGGFDSPTVAYSVLVVAKVEKGKSKKLKSVKELLGITIMERSSFEKNPIDFLEAKGYKEVKKDLIIKLPKYSLFELENGRKRMLASAGELQKGNELALPSKYVNFLYLASHYEKLKGSPEDNEQKQLFVEQHKHYLDEIIEQISEFSKRVILADANLDKVLSAYNKHRDKPIREQAENIIHLFTLTNLGAPAAFKYFDTTIDRKRYTSTKEVLDATLIHQSITGLYETRIDLSQLGGDGGGSSGGSPAPGGVPWILKKPLELTIKLDLEEQQGTLLNNSILSKKGKEELKQLFEKYSALWQSWENQVGHRRIRPHKIATGTVKPTPQKQYHINPKAKPDIQIVINDLLKQGVLIQKESTMNTPVYPVPKPNGRWRMVLDYRAVNKVTPLIAVQNQHSYGILGSLFKGRYKTTIDLSNGFWAHPIVPEDYWITAFTWQGKQYCWTVLPQGFLNSPGLFTGDVVDLLQGIPNVEVYVDDVYISHDSEKEHLEYLDILFNRLKEAGYIISLKKSNIANSIVDFLGFQITNEGRGLTDTFKEKLENITAPTTLKQLQSILGLLNFARNFIPDFTELIAPLYALIPKSTKNYVPWQIEHSTTLETLITKLNGAEYLQGRKGDKTLIMKVNASYTTGYIRYYNEGEKKPISYVSIVFSKTELKFTELEKLLTTVHKGLLKALDLSMGQNIHVYSPIVSMQNIQKTPQTAKKALASRWLSWLSYLEDPRIRFFYDPQMPALKDLPAVDTGKDNKKHPSNFQHIFYTDGSAITSPTKEGHLNAGMGIVYFINKDGNLQKQQEWSISLGNHTAQFAEIAAFEFALKKCLPLGGNILVVTDSNYVAKAYNEELDVWASNGFVNNRKKPLKHISKWKSVADLKRLRPDVVVTHEPGHQKLDSSPHAYGNNLADQLATQASFKVHAGKRTADGSEFEKRTADGSEFESPKKKAKVE

SEQ ID NO: 776 - protein, 2084 aa, synthetic construct
MPAAKRVKLDGGDKKYSIGLDIGTNSVGWAVITDEYKVPSKKFKVLGNTDRHSIKKNLIGALLFDSGETAEATRLKRTARRRYTRRKNRICYLQEIFSNEMAKVDDSFFHRLEESFLVEEDKKHERHPIFGNIVDEVAYHEKYPTIYHLRKKLVDSTDKADLRLIYLALAHMIKFRGHFLIEGDLNPDNSDVDKLFIQLVQTYNQLFEENPINASGVDAKAILSARLSKSRRLENLIAQLPGEKKNGLFGNLIALSLGLTPNFKSNFDLAEDAKLQLSKDTYDDDLDNLLAQIGDQYADLFLAAKNLSDAILLSDILRVNTEITKAPLSASMIKRYDEHHQDLTLLKALVRQQLPEKYKEIFFDQSKNGYAGYIDGGASQEEFYKFIKPILEKMDGTEELLVKLNREDLLRKQRTFDNGSIPHQIHLGELHAILRRQEDFYPFLKDNREKIEKILTFRIPYYVGPLARGNSRFAWMTRKSEETITPWNFEEVVDKGASAQSFIERMTNFDKNLPNEKVLPKHSLLYEYFTVYNELTKVKYVTEGMRKPAFLSGEQKKAIVDLLFKTNRKVTVKQLKEDYFKKIECFDSVEISGVEDRFNASLGTYHDLLKIIKDKDFLDNEENEDILEDIVLTLTLFEDREMIEERLKTYAHLFDDKVMKQLKRRRYTGWGRLSRKLINGIRDKQSGKTILDFLKSDGFANRNFMQLIHDDSLTFKEDIQKAQVSGQGDSLHEHIANLAGSPAIKKGILQTVKVVDELVKVMGRHKPENIVIEMARENQTTQKGQKNSRERMKRIEEGIKELGSQILKEHPVENTQLQNEKLYLYYLQNGRDMYVDQELDINRLSDYDVDHIVPQSFLKDDSIDNKVLTRSDKARGKSDNVPSEEVVKKMKNYWRQLLNAKLITQRKFDNLTKAERGGLSELDKAGFIKRQLVETRQITKHVAQILDSRMNTKYDENDKLIREVKVITLKSKLVSDFRKDFQFYKVREINNYHHAHDAYLNAVVGTALIKKYPKLESEFVYGDYKVYDVRKMIAKSEQEIGKATAKYFFYSNIMNFFKTEITLANGEIRKRPLIETNGETGEIVWDKGRDFATVRKVLSMPQVNIVKKTEVQTGGFSKESILPKRNSDKLIARKKDWDPKKYGGFDSPTVAYSVLVVAKVEKGKSKKLKSVKELLGITIMERSSFEKNPIDFLEAKGYKEVKKDLIIKLPKYSLFELENGRKRMLASAGELQKGNELALPSKYVNFLYLASHYEKLKGSPEDNEQKQLFVEQHKHYLDEIIEQISEFSKRVILADANLDKVLSAYNKHRDKPIREQAENIIHLFTLTNLGAPAAFKYFDTTIDRKRYTSTKEVLDATLIHQSITGLYETRIDLSQLGGDGGGGSEAAAKGGVPWILKKPLELTIKLDLEEQQGTLLNNSILSKKGKEELKQLFEKYSALWQSWENQVGHRRIRPHKIATGTVKPTPQKQYHINPKAKPDIQIVINDLLKQGVLIQKESTMNTPVYPVPKPNGRWRMVLDYRAVNKVTPLIAVQNQHSYGILGSLFKGRYKTTIDLSNGFWAHPIVPEDYWITAFTWQGKQYCWTVLPQGFLNSPGLFTGDVVDLLQGIPNVEVYVDDVYISHDSEKEHLEYLDILFNRLKEAGYIISLKKSNIANSIVDFLGFQITNEGRGLTDTFKEKLENITAPTTLKQLQSILGLLNFARNFIPDFTELIAPLYALIPKSTKNYVPWQIEHSTTLETLITKLNGAEYLQGRKGDKTLIMKVNASYTTGYIRYYNEGEKKPISYVSIVFSKTELKFTELEKLLTTVHKGLLKALDLSMGQNIHVYSPIVSMQNIQKTPQTAKKALASRWLSWLSYLEDPRIRFFYDPQMPALKDLPAVDTGKDNKKHPSNFQHIFYTDGSAITSPTKEGHLNAGMGIVYFINKDGNLQKQQEWSISLGNHTAQFAEIAAFEFALKKCLPLGGNILVVTDSNYVAKAYNEELDVWASNGFVNNRKKPLKHISKWKSVADLKRLRPDVVVTHEPGHQKLDSSPHAYGNNLADQLATQASFKVHAGKRTADGSEFEKRTADGSEFESPKKKAKVE

SEQ ID NO: 777 - protein, 2085 aa, synthetic construct
MPAAKRVKLDGGDKKYSIGLDIGTNSVGWAVITDEYKVPSKKFKVLGNTDRHSIKKNLIGALLFDSGETAEATRLKRTARRRYTRRKNRICYLQEIFSNEMAKVDDSFFHRLEESFLVEEDKKHERHPIFGNIVDEVAYHEKYPTIYHLRKKLVDSTDKADLRLIYLALAHMIKFRGHFLIEGDLNPDNSDVDKLFIQLVQTYNQLFEENPINASGVDAKAILSARLSKSRRLENLIAQLPGEKKNGLFGNLIALSLGLTPNFKSNFDLAEDAKLQLSKDTYDDDLDNLLAQIGDQYADLFLAAKNLSDAILLSDILRVNTEITKAPLSASMIKRYDEHHQDLTLLKALVRQQLPEKYKEIFFDQSKNGYAGYIDGGASQEEFYKFIKPILEKMDGTEELLVKLNREDLLRKQRTFDNGSIPHQIHLGELHAILRRQEDFYPFLKDNREKIEKILTFRIPYYVGPLARGNSRFAWMTRKSEETITPWNFEEVVDKGASAQSFIERMTNFDKNLPNEKVLPKHSLLYEYFTVYNELTKVKYVTEGMRKPAFLSGEQKKAIVDLLFKTNRKVTVKQLKEDYFKKIECFDSVEISGVEDRFNASLGTYHDLLKIIKDKDFLDNEENEDILEDIVLTLTLFEDREMIEERLKTYAHLFDDKVMKQLKRRRYTGWGRLSRKLINGIRDKQSGKTILDFLKSDGFANRNFMQLIHDDSLTFKEDIQKAQVSGQGDSLHEHIANLAGSPAIKKGILQTVKVVDELVKVMGRHKPENIVIEMARENQTTQKGQKNSRERMKRIEEGIKELGSQILKEHPVENTQLQNEKLYLYYLQNGRDMYVDQELDINRLSDYDVDHIVPQSFLKDDSIDNKVLTRSDKARGKSDNVPSEEVVKKMKNYWRQLLNAKLITQRKFDNLTKAERGGLSELDKAGFIKRQLVETRQITKHVAQILDSRMNTKYDENDKLIREVKVITLKSKLVSDFRKDFQFYKVREINNYHHAHDAYLNAVVGTALIKKYPKLESEFVYGDYKVYDVRKMIAKSEQEIGKATAKYFFYSNIMNFFKTEITLANGEIRKRPLIETNGETGEIVWDKGRDFATVRKVLSMPQVNIVKKTEVQTGGFSKESILPKRNSDKLIARKKDWDPKKYGGFDSPTVAYSVLVVAKVEKGKSKKLKSVKELLGITIMERSSFEKNPIDFLEAKGYKEVKKDLIIKLPKYSLFELENGRKRMLASAGELQKGNELALPSKYVNFLYLASHYEKLKGSPEDNEQKQLFVEQHKHYLDEIIEQISEFSKRVILADANLDKVLSAYNKHRDKPIREQAENIIHLFTLTNLGAPAAFKYFDTTIDRKRYTSTKEVLDATLIHQSITGLYETRIDLSQLGGDGGGGGGSSPAPGGVPWILKKPLELTIKLDLEEQQGTLLNNSILSKKGKEELKQLFEKYSALWQSWENQVGHRRIRPHKIATGTVKPTPQKQYHINPKAKPDIQIVINDLLKQGVLIQKESTMNTPVYPVPKPNGRWRMVLDYRAVNKVTPLIAVQNQHSYGILGSLFKGRYKTTIDLSNGFWAHPIVPEDYWITAFTWQGKQYCWTVLPQGFLNSPGLFTGDVVDLLQGIPNVEVYVDDVYISHDSEKEHLEYLDILFNRLKEAGYIISLKKSNIANSIVDFLGFQITNEGRGLTDTFKEKLENITAPTTLKQLQSILGLLNFARNFIPDFTELIAPLYALIPKSTKNYVPWQIEHSTTLETLITKLNGAEYLQGRKGDKTLIMKVNASYTTGYIRYYNEGEKKPISYVSIVFSKTELKFTELEKLLTTVHKGLLKALDLSMGQNIHVYSPIVSMQNIQKTPQTAKKALASRWLSWLSYLEDPRIRFFYDPQMPALKDLPAVDTGKDNKKHPSNFQHIFYTDGSAITSPTKEGHLNAGMGIVYFINKDGNLQKQQEWSISLGNHTAQFAEIAAFEFALKKCLPLGGNILVVTDSNYVAKAYNEELDVWASNGFVNNRKKPLKHISKWKSVADLKRLRPDVVVTHEPGHQKLDSSPHAYGNNLADQLATQASFKVHAGKRTADGSEFEKRTADGSEFESPKKKAKVE

SEQ ID NO: 778 - protein, 2091 aa, synthetic construct
MPAAKRVKLDGGDKKYSIGLDIGTNSVGWAVITDEYKVPSKKFKVLGNTDRHSIKKNLIGALLFDSGETAEATRLKRTARRRYTRRKNRICYLQEIFSNEMAKVDDSFFHRLEESFLVEEDKKHERHPIFGNIVDEVAYHEKYPTIYHLRKKLVDSTDKADLRLIYLALAHMIKFRGHFLIEGDLNPDNSDVDKLFIQLVQTYNQLFEENPINASGVDAKAILSARLSKSRRLENLIAQLPGEKKNGLFGNLIALSLGLTPNFKSNFDLAEDAKLQLSKDTYDDDLDNLLAQIGDQYADLFLAAKNLSDAILLSDILRVNTEITKAPLSASMIKRYDEHHQDLTLLKALVRQQLPEKYKEIFFDQSKNGYAGYIDGGASQEEFYKFIKPILEKMDGTEELLVKLNREDLLRKQRTFDNGSIPHQIHLGELHAILRRQEDFYPFLKDNREKIEKILTFRIPYYVGPLARGNSRFAWMTRKSEETITPWNFEEVVDKGASAQSFIERMTNFDKNLPNEKVLPKHSLLYEYFTVYNELTKVKYVTEGMRKPAFLSGEQKKAIVDLLFKTNRKVTVKQLKEDYFKKIECFDSVEISGVEDRFNASLGTYHDLLKIIKDKDFLDNEENEDILEDIVLTLTLFEDREMIEERLKTYAHLFDDKVMKQLKRRRYTGWGRLSRKLINGIRDKQSGKTILDFLKSDGFANRNFMQLIHDDSLTFKEDIQKAQVSGQGDSLHEHIANLAGSPAIKKGILQTVKVVDELVKVMGRHKPENIVIEMARENQTTQKGQKNSRERMKRIEEGIKELGSQILKEHPVENTQLQNEKLYLYYLQNGRDMYVDQELDINRLSDYDVDHIVPQSFLKDDSIDNKVLTRSDKARGKSDNVPSEEVVKKMKNYWRQLLNAKLITQRKFDNLTKAERGGLSELDKAGFIKRQLVETRQITKHVAQILDSRMNTKYDENDKLIREVKVITLKSKLVSDFRKDFQFYKVREINNYHHAHDAYLNAVVGTALIKKYPKLESEFVYGDYKVYDVRKMIAKSEQEIGKATAKYFFYSNIMNFFKTEITLANGEIRKRPLIETNGETGEIVWDKGRDFATVRKVLSMPQVNIVKKTEVQTGGFSKESILPKRNSDKLIARKKDWDPKKYGGFDSPTVAYSVLVVAKVEKGKSKKLKSVKELLGITIMERSSFEKNPIDFLEAKGYKEVKKDLIIKLPKYSLFELENGRKRMLASAGELQKGNELALPSKYVNFLYLASHYEKLKGSPEDNEQKQLFVEQHKHYLDEIIEQISEFSKRVILADANLDKVLSAYNKHRDKPIREQAENIIHLFTLTNLGAPAAFKYFDTTIDRKRYTSTKEVLDATLIHQSITGLYETRIDLSQLGGDGGEAAAKGGGGSEAAAKGGVPWILKKPLELTIKLDLEEQQGTLLNNSILSKKGKEELKQLFEKYSALWQSWENQVGHRRIRPHKIATGTVKPTPQKQYHINPKAKPDIQIVINDLLKQGVLIQKESTMNTPVYPVPKPNGRWRMVLDYRAVNKVTPLIAVQNQHSYGILGSLFKGRYKTTIDLSNGFWAHPIVPEDYWITAFTWQGKQYCWTVLPQGFLNSPGLFTGDVVDLLQGIPNVEVYVDDVYISHDSEKEHLEYLDILFNRLKEAGYIISLKKSNIANSIVDFLGFQITNEGRGLTDTFKEKLENITAPTTLKQLQSILGLLNFARNFIPDFTELIAPLYALIPKSTKNYVPWQIEHSTTLETLITKLNGAEYLQGRKGDKTLIMKVNASYTTGYIRYYNEGEKKPISYVSIVFSKTELKFTELEKLLTTVHKGLLKALDLSMGQNIHVYSPIVSMQNIQKTPQTAKKALASRWLSWLSYLEDPRIRFFYDPQMPALKDLPAVDTGKDNKKHPSNFQHIFYTDGSAITSPTKEGHLNAGMGIVYFINKDGNLQKQQEWSISLGNHTAQFAEIAAFEFALKKCLPLGGNILVVTDSNYVAKAYNEELDVWASNGFVNNRKKPLKHISKWKSVADLKRLRPDVVVTHEPGHQKLDSSPHAYGNNLADQLATQASFKVHAGKRTADGSEFEKRTADGSEFESPKKKAKVE

SEQ ID NO: 779 - protein, 2087 aa, synthetic construct
MPAAKRVKLDGGDKKYSIGLDIGTNSVGWAVITDEYKVPSKKFKVLGNTDRHSIKKNLIGALLFDSGETAEATRLKRTARRRYTRRKNRICYLQEIFSNEMAKVDDSFFHRLEESFLVEEDKKHERHPIFGNIVDEVAYHEKYPTIYHLRKKLVDSTDKADLRLIYLALAHMIKFRGHFLIEGDLNPDNSDVDKLFIQLVQTYNQLFEENPINASGVDAKAILSARLSKSRRLENLIAQLPGEKKNGLFGNLIALSLGLTPNFKSNFDLAEDAKLQLSKDTYDDDLDNLLAQIGDQYADLFLAAKNLSDAILLSDILRVNTEITKAPLSASMIKRYDEHHQDLTLLKALVRQQLPEKYKEIFFDQSKNGYAGYIDGGASQEEFYKFIKPILEKMDGTEELLVKLNREDLLRKQRTFDNGSIPHQIHLGELHAILRRQEDFYPFLKDNREKIEKILTFRIPYYVGPLARGNSRFAWMTRKSEETITPWNFEEVVDKGASAQSFIERMTNFDKNLPNEKVLPKHSLLYEYFTVYNELTKVKYVTEGMRKPAFLSGEQKKAIVDLLFKTNRKVTVKQLKEDYFKKIECFDSVEISGVEDRFNASLGTYHDLLKIIKDKDFLDNEENEDILEDIVLTLTLFEDREMIEERLKTYAHLFDDKVMKQLKRRRYTGWGRLSRKLINGIRDKQSGKTILDFLKSDGFANRNFMQLIHDDSLTFKEDIQKAQVSGQGDSLHEHIANLAGSPAIKKGILQTVKVVDELVKVMGRHKPENIVIEMARENQTTQKGQKNSRERMKRIEEGIKELGSQILKEHPVENTQLQNEKLYLYYLQNGRDMYVDQELDINRLSDYDVDHIVPQSFLKDDSIDNKVLTRSDKARGKSDNVPSEEVVKKMKNYWRQLLNAKLITQRKFDNLTKAERGGLSELDKAGFIKRQLVETRQITKHVAQILDSRMNTKYDENDKLIREVKVITLKSKLVSDFRKDFQFYKVREINNYHHAHDAYLNAVVGTALIKKYPKLESEFVYGDYKVYDVRKMIAKSEQEIGKATAKYFFYSNIMNFFKTEITLANGEIRKRPLIETNGETGEIVWDKGRDFATVRKVLSMPQVNIVKKTEVQTGGFSKESILPKRNSDKLIARKKDWDPKKYGGFDSPTVAYSVLVVAKVEKGKSKKLKSVKELLGITIMERSSFEKNPIDFLEAKGYKEVKKDLIIKLPKYSLFELENGRKRMLASAGELQKGNELALPSKYVNFLYLASHYEKLKGSPEDNEQKQLFVEQHKHYLDEIIEQISEFSKRVILADANLDKVLSAYNKHRDKPIREQAENIIHLFTLTNLGAPAAFKYFDTTIDRKRYTSTKEVLDATLIHQSITGLYETRIDLSQLGGDGGEAAAKGGSGSSGGVPWILKKPLELTIKLDLEEQQGTLLNNSILSKKGKEELKQLFEKYSALWQSWENQVGHRRIRPHKIATGTVKPTPQKQYHINPKAKPDIQIVINDLLKQGVLIQKESTMNTPVYPVPKPNGRWRMVLDYRAVNKVTPLIAVQNQHSYGILGSLFKGRYKTTIDLSNGFWAHPIVPEDYWITAFTWQGKQYCWTVLPQGFLNSPGLFTGDVVDLLQGIPNVEVYVDDVYISHDSEKEHLEYLDILFNRLKEAGYIISLKKSNIANSIVDFLGFQITNEGRGLTDTFKEKLENITAPTTLKQLQSILGLLNFARNFIPDFTELIAPLYALIPKSTKNYVPWQIEHSTTLETLITKLNGAEYLQGRKGDKTLIMKVNASYTTGYIRYYNEGEKKPISYVSIVFSKTELKFTELEKLLTTVHKGLLKALDLSMGQNIHVYSPIVSMQNIQKTPQTAKKALASRWLSWLSYLEDPRIRFFYDPQMPALKDLPAVDTGKDNKKHPSNFQHIFYTDGSAITSPTKEGHLNAGMGIVYFINKDGNLQKQQEWSISLGNHTAQFAEIAAFEFALKKCLPLGGNILVVTDSNYVAKAYNEELDVWASNGFVNNRKKPLKHISKWKSVADLKRLRPDVVVTHEPGHQKLDSSPHAYGNNLADQLATQASFKVHAGKRTADGSEFEKRTADGSEFESPKKKAKVE

SEQ ID NO: 780 - protein, 2085 aa, synthetic construct
MPAAKRVKLDGGDKKYSIGLDIGTNSVGWAVITDEYKVPSKKFKVLGNTDRHSIKKNLIGALLFDSGETAEATRLKRTARRRYTRRKNRICYLQEIFSNEMAKVDDSFFHRLEESFLVEEDKKHERHPIFGNIVDEVAYHEKYPTIYHLRKKLVDSTDKADLRLIYLALAHMIKFRGHFLIEGDLNPDNSDVDKLFIQLVQTYNQLFEENPINASGVDAKAILSARLSKSRRLENLIAQLPGEKKNGLFGNLIALSLGLTPNFKSNFDLAEDAKLQLSKDTYDDDLDNLLAQIGDQYADLFLAAKNLSDAILLSDILRVNTEITKAPLSASMIKRYDEHHQDLTLLKALVRQQLPEKYKEIFFDQSKNGYAGYIDGGASQEEFYKFIKPILEKMDGTEELLVKLNREDLLRKQRTFDNGSIPHQIHLGELHAILRRQEDFYPFLKDNREKIEKILTFRIPYYVGPLARGNSRFAWMTRKSEETITPWNFEEVVDKGASAQSFIERMTNFDKNLPNEKVLPKHSLLYEYFTVYNELTKVKYVTEGMRKPAFLSGEQKKAIVDLLFKTNRKVTVKQLKEDYFKKIECFDSVEISGVEDRFNASLGTYHDLLKIIKDKDFLDNEENEDILEDIVLTLTLFEDREMIEERLKTYAHLFDDKVMKQLKRRRYTGWGRLSRKLINGIRDKQSGKTILDFLKSDGFANRNFMQLIHDDSLTFKEDIQKAQVSGQGDSLHEHIANLAGSPAIKKGILQTVKVVDELVKVMGRHKPENIVIEMARENQTTQKGQKNSRERMKRIEEGIKELGSQILKEHPVENTQLQNEKLYLYYLQNGRDMYVDQELDINRLSDYDVDHIVPQSFLKDDSIDNKVLTRSDKARGKSDNVPSEEVVKKMKNYWRQLLNAKLITQRKFDNLTKAERGGLSELDKAGFIKRQLVETRQITKHVAQILDSRMNTKYDENDKLIREVKVITLKSKLVSDFRKDFQFYKVREINNYHHAHDAYLNAVVGTALIKKYPKLESEFVYGDYKVYDVRKMIAKSEQEIGKATAKYFFYSNIMNFFKTEITLANGEIRKRPLIETNGETGEIVWDKGRDFATVRKVLSMPQVNIVKKTEVQTGGFSKESILPKRNSDKLIARKKDWDPKKYGGFDSPTVAYSVLVVAKVEKGKSKKLKSVKELLGITIMERSSFEKNPIDFLEAKGYKEVKKDLIIKLPKYSLFELENGRKRMLASAGELQKGNELALPSKYVNFLYLASHYEKLKGSPEDNEQKQLFVEQHKHYLDEIIEQISEFSKRVILADANLDKVLSAYNKHRDKPIREQAENIIHLFTLTNLGAPAAFKYFDTTIDRKRYTSTKEVLDATLIHQSITGLYETRIDLSQLGGDGGGGSGGGPAPGGVPWILKKPLELTIKLDLEEQQGTLLNNSILSKKGKEELKQLFEKYSALWQSWENQVGHRRIRPHKIATGTVKPTPQKQYHINPKAKPDIQIVINDLLKQGVLIQKESTMNTPVYPVPKPNGRWRMVLDYRAVNKVTPLIAVQNQHSYGILGSLFKGRYKTTIDLSNGFWAHPIVPEDYWITAFTWQGKQYCWTVLPQGFLNSPGLFTGDVVDLLQGIPNVEVYVDDVYISHDSEKEHLEYLDILFNRLKEAGYIISLKKSNIANSIVDFLGFQITNEGRGLTDTFKEKLENITAPTTLKQLQSILGLLNFARNFIPDFTELIAPLYALIPKSTKNYVPWQIEHSTTLETLITKLNGAEYLQGRKGDKTLIMKVNASYTTGYIRYYNEGEKKPISYVSIVFSKTELKFTELEKLLTTVHKGLLKALDLSMGQNIHVYSPIVSMQNIQKTPQTAKKALASRWLSWLSYLEDPRIRFFYDPQMPALKDLPAVDTGKDNKKHPSNFQHIFYTDGSAITSPTKEGHLNAGMGIVYFINKDGNLQKQQEWSISLGNHTAQFAEIAAFEFALKKCLPLGGNILVVTDSNYVAKAYNEELDVWASNGFVNNRKKPLKHISKWKSVADLKRLRPDVVVTHEPGHQKLDSSPHAYGNNLADQLATQASFKVHAGKRTADGSEFEKRTADGSEFESPKKKAKVE

SEQ ID NO: 781 - protein, 2086 aa, synthetic construct
MPAAKRVKLDGGDKKYSIGLDIGTNSVGWAVITDEYKVPSKKFKVLGNTDRHSIKKNLIGALLFDSGETAEATRLKRTARRRYTRRKNRICYLQEIFSNEMAKVDDSFFHRLEESFLVEEDKKHERHPIFGNIVDEVAYHEKYPTIYHLRKKLVDSTDKADLRLIYLALAHMIKFRGHFLIEGDLNPDNSDVDKLFIQLVQTYNQLFEENPINASGVDAKAILSARLSKSRRLENLIAQLPGEKKNGLFGNLIALSLGLTPNFKSNFDLAEDAKLQLSKDTYDDDLDNLLAQIGDQYADLFLAAKNLSDAILLSDILRVNTEITKAPLSASMIKRYDEHHQDLTLLKALVRQQLPEKYKEIFFDQSKNGYAGYIDGGASQEEFYKFIKPILEKMDGTEELLVKLNREDLLRKQRTFDNGSIPHQIHLGELHAILRRQEDFYPFLKDNREKIEKILTFRIPYYVGPLARGNSRFAWMTRKSEETITPWNFEEVVDKGASAQSFIERMTNFDKNLPNEKVLPKHSLLYEYFTVYNELTKVKYVTEGMRKPAFLSGEQKKAIVDLLFKTNRKVTVKQLKEDYFKKIECFDSVEISGVEDRFNASLGTYHDLLKIIKDKDFLDNEENEDILEDIVLTLTLFEDREMIEERLKTYAHLFDDKVMKQLKRRRYTGWGRLSRKLINGIRDKQSGKTILDFLKSDGFANRNFMQLIHDDSLTFKEDIQKAQVSGQGDSLHEHIANLAGSPAIKKGILQTVKVVDELVKVMGRHKPENIVIEMARENQTTQKGQKNSRERMKRIEEGIKELGSQILKEHPVENTQLQNEKLYLYYLQNGRDMYVDQELDINRLSDYDVDHIVPQSFLKDDSIDNKVLTRSDKARGKSDNVPSEEVVKKMKNYWRQLLNAKLITQRKFDNLTKAERGGLSELDKAGFIKRQLVETRQITKHVAQILDSRMNTKYDENDKLIREVKVITLKSKLVSDFRKDFQFYKVREINNYHHAHDAYLNAVVGTALIKKYPKLESEFVYGDYKVYDVRKMIAKSEQEIGKATAKYFFYSNIMNFFKTEITLANGEIRKRPLIETNGETGEIVWDKGRDFATVRKVLSMPQVNIVKKTEVQTGGFSKESILPKRNSDKLIARKKDWDPKKYGGFDSPTVAYSVLVVAKVEKGKSKKLKSVKELLGITIMERSSFEKNPIDFLEAKGYKEVKKDLIIKLPKYSLFELENGRKRMLASAGELQKGNELALPSKYVNFLYLASHYEKLKGSPEDNEQKQLFVEQHKHYLDEIIEQISEFSKRVILADANLDKVLSAYNKHRDKPIREQAENIIHLFTLTNLGAPAAFKYFDTTIDRKRYTSTKEVLDATLIHQSITGLYETRIDLSQLGGDGGGGGGSGGGGSGGVPWILKKPLELTIKLDLEEQQGTLLNNSILSKKGKEELKQLFEKYSALWQSWENQVGHRRIRPHKIATGTVKPTPQKQYHINPKAKPDIQIVINDLLKQGVLIQKESTMNTPVYPVPKPNGRWRMVLDYRAVNKVTPLIAVQNQHSYGILGSLFKGRYKTTIDLSNGFWAHPIVPEDYWITAFTWQGKQYCWTVLPQGFLNSPGLFTGDVVDLLQGIPNVEVYVDDVYISHDSEKEHLEYLDILFNRLKEAGYIISLKKSNIANSIVDFLGFQITNEGRGLTDTFKEKLENITAPTTLKQLQSILGLLNFARNFIPDFTELIAPLYALIPKSTKNYVPWQIEHSTTLETLITKLNGAEYLQGRKGDKTLIMKVNASYTTGYIRYYNEGEKKPISYVSIVFSKTELKFTELEKLLTTVHKGLLKALDLSMGQNIHVYSPIVSMQNIQKTPQTAKKALASRWLSWLSYLEDPRIRFFYDPQMPALKDLPAVDTGKDNKKHPSNFQHIFYTDGSAITSPTKEGHLNAGMGIVYFINKDGNLQKQQEWSISLGNHTAQFAEIAAFEFALKKCLPLGGNILVVTDSNYVAKAYNEELDVWASNGFVNNRKKPLKHISKWKSVADLKRLRPDVVVTHEPGHQKLDSSPHAYGNNLADQLATQASFKVHAGKRTADGSEFEKRTADGSEFESPKKKAKVE

SEQ ID NO: 782 - protein, 2085 aa, synthetic construct
MPAAKRVKLDGGDKKYSIGLDIGTNSVGWAVITDEYKVPSKKFKVLGNTDRHSIKKNLIGALLFDSGETAEATRLKRTARRRYTRRKNRICYLQEIFSNEMAKVDDSFFHRLEESFLVEEDKKHERHPIFGNIVDEVAYHEKYPTIYHLRKKLVDSTDKADLRLIYLALAHMIKFRGHFLIEGDLNPDNSDVDKLFIQLVQTYNQLFEENPINASGVDAKAILSARLSKSRRLENLIAQLPGEKKNGLFGNLIALSLGLTPNFKSNFDLAEDAKLQLSKDTYDDDLDNLLAQIGDQYADLFLAAKNLSDAILLSDILRVNTEITKAPLSASMIKRYDEHHQDLTLLKALVRQQLPEKYKEIFFDQSKNGYAGYIDGGASQEEFYKFIKPILEKMDGTEELLVKLNREDLLRKQRTFDNGSIPHQIHLGELHAILRRQEDFYPFLKDNREKIEKILTFRIPYYVGPLARGNSRFAWMTRKSEETITPWNFEEVVDKGASAQSFIERMTNFDKNLPNEKVLPKHSLLYEYFTVYNELTKVKYVTEGMRKPAFLSGEQKKAIVDLLFKTNRKVTVKQLKEDYFKKIECFDSVEISGVEDRFNASLGTYHDLLKIIKDKDFLDNEENEDILEDIVLTLTLFEDREMIEERLKTYAHLFDDKVMKQLKRRRYTGWGRLSRKLINGIRDKQSGKTILDFLKSDGFANRNFMQLIHDDSLTFKEDIQKAQVSGQGDSLHEHIANLAGSPAIKKGILQTVKVVDELVKVMGRHKPENIVIEMARENQTTQKGQKNSRERMKRIEEGIKELGSQILKEHPVENTQLQNEKLYLYYLQNGRDMYVDQELDINRLSDYDVDHIVPQSFLKDDSIDNKVLTRSDKARGKSDNVPSEEVVKKMKNYWRQLLNAKLITQRKFDNLTKAERGGLSELDKAGFIKRQLVETRQITKHVAQILDSRMNTKYDENDKLIREVKVITLKSKLVSDFRKDFQFYKVREINNYHHAHDAYLNAVVGTALIKKYPKLESEFVYGDYKVYDVRKMIAKSEQEIGKATAKYFFYSNIMNFFKTEITLANGEIRKRPLIETNGETGEIVWDKGRDFATVRKVLSMPQVNIVKKTEVQTGGFSKESILPKRNSDKLIARKKDWDPKKYGGFDSPTVAYSVLVVAKVEKGKSKKLKSVKELLGITIMERSSFEKNPIDFLEAKGYKEVKKDLIIKLPKYSLFELENGRKRMLASAGELQKGNELALPSKYVNFLYLASHYEKLKGSPEDNEQKQLFVEQHKHYLDEIIEQISEFSKRVILADANLDKVLSAYNKHRDKPIREQAENIIHLFTLTNLGAPAAFKYFDTTIDRKRYTSTKEVLDATLIHQSITGLYETRIDLSQLGGDGGPAPAPAPAPGGVPWILKKPLELTIKLDLEEQQGTLLNNSILSKKGKEELKQLFEKYSALWQSWENQVGHRRIRPHKIATGTVKPTPQKQYHINPKAKPDIQIVINDLLKQGVLIQKESTMNTPVYPVPKPNGRWRMVLDYRAVNKVTPLIAVQNQHSYGILGSLFKGRYKTTIDLSNGFWAHPIVPEDYWITAFTWQGKQYCWTVLPQGFLNSPGLFTGDVVDLLQGIPNVEVYVDDVYISHDSEKEHLEYLDILFNRLKEAGYIISLKKSNIANSIVDFLGFQITNEGRGLTDTFKEKLENITAPTTLKQLQSILGLLNFARNFIPDFTELIAPLYALIPKSTKNYVPWQIEHSTTLETLITKLNGAEYLQGRKGDKTLIMKVNASYTTGYIRYYNEGEKKPISYVSIVFSKTELKFTELEKLLTTVHKGLLKALDLSMGQNIHVYSPIVSMQNIQKTPQTAKKALASRWLSWLSYLEDPRIRFFYDPQMPALKDLPAVDTGKDNKKHPSNFQHIFYTDGSAITSPTKEGHLNAGMGIVYFINKDGNLQKQQEWSISLGNHTAQFAEIAAFEFALKKCLPLGGNILVVTDSNYVAKAYNEELDVWASNGFVNNRKKPLKHISKWKSVADLKRLRPDVVVTHEPGHQKLDSSPHAYGNNLADQLATQASFKVHAGKRTADGSEFEKRTADGSEFESPKKKAKVE

SEQ ID NO: 783 - protein, 2091 aa, synthetic construct
MPAAKRVKLDGGDKKYSIGLDIGTNSVGWAVITDEYKVPSKKFKVLGNTDRHSIKKNLIGALLFDSGETAEATRLKRTARRRYTRRKNRICYLQEIFSNEMAKVDDSFFHRLEESFLVEEDKKHERHPIFGNIVDEVAYHEKYPTIYHLRKKLVDSTDKADLRLIYLALAHMIKFRGHFLIEGDLNPDNSDVDKLFIQLVQTYNQLFEENPINASGVDAKAILSARLSKSRRLENLIAQLPGEKKNGLFGNLIALSLGLTPNFKSNFDLAEDAKLQLSKDTYDDDLDNLLAQIGDQYADLFLAAKNLSDAILLSDILRVNTEITKAPLSASMIKRYDEHHQDLTLLKALVRQQLPEKYKEIFFDQSKNGYAGYIDGGASQEEFYKFIKPILEKMDGTEELLVKLNREDLLRKQRTFDNGSIPHQIHLGELHAILRRQEDFYPFLKDNREKIEKILTFRIPYYVGPLARGNSRFAWMTRKSEETITPWNFEEVVDKGASAQSFIERMTNFDKNLPNEKVLPKHSLLYEYFTVYNELTKVKYVTEGMRKPAFLSGEQKKAIVDLLFKTNRKVTVKQLKEDYFKKIECFDSVEISGVEDRFNASLGTYHDLLKIIKDKDFLDNEENEDILEDIVLTLTLFEDREMIEERLKTYAHLFDDKVMKQLKRRRYTGWGRLSRKLINGIRDKQSGKTILDFLKSDGFANRNFMQLIHDDSLTFKEDIQKAQVSGQGDSLHEHIANLAGSPAIKKGILQTVKVVDELVKVMGRHKPENIVIEMARENQTTQKGQKNSRERMKRIEEGIKELGSQILKEHPVENTQLQNEKLYLYYLQNGRDMYVDQELDINRLSDYDVDHIVPQSFLKDDSIDNKVLTRSDKARGKSDNVPSEEVVKKMKNYWRQLLNAKLITQRKFDNLTKAERGGLSELDKAGFIKRQLVETRQITKHVAQILDSRMNTKYDENDKLIREVKVITLKSKLVSDFRKDFQFYKVREINNYHHAHDAYLNAVVGTALIKKYPKLESEFVYGDYKVYDVRKMIAKSEQEIGKATAKYFFYSNIMNFFKTEITLANGEIRKRPLIETNGETGEIVWDKGRDFATVRKVLSMPQVNIVKKTEVQTGGFSKESILPKRNSDKLIARKKDWDPKKYGGFDSPTVAYSVLVVAKVEKGKSKKLKSVKELLGITIMERSSFEKNPIDFLEAKGYKEVKKDLIIKLPKYSLFELENGRKRMLASAGELQKGNELALPSKYVNFLYLASHYEKLKGSPEDNEQKQLFVEQHKHYLDEIIEQISEFSKRVILADANLDKVLSAYNKHRDKPIREQAENIIHLFTLTNLGAPAAFKYFDTTIDRKRYTSTKEVLDATLIHQSITGLYETRIDLSQLGGDGGGGSGGSGGSGGSGGSGGVPWILKKPLELTIKLDLEEQQGTLLNNSILSKKGKEELKQLFEKYSALWQSWENQVGHRRIRPHKIATGTVKPTPQKQYHINPKAKPDIQIVINDLLKQGVLIQKESTMNTPVYPVPKPNGRWRMVLDYRAVNKVTPLIAVQNQHSYGILGSLFKGRYKTTIDLSNGFWAHPIVPEDYWITAFTWQGKQYCWTVLPQGFLNSPGLFTGDVVDLLQGIPNVEVYVDDVYISHDSEKEHLEYLDILFNRLKEAGYIISLKKSNIANSIVDFLGFQITNEGRGLTDTFKEKLENITAPTTLKQLQSILGLLNFARNFIPDFTELIAPLYALIPKSTKNYVPWQIEHSTTLETLITKLNGAEYLQGRKGDKTLIMKVNASYTTGYIRYYNEGEKKPISYVSIVFSKTELKFTELEKLLTTVHKGLLKALDLSMGQNIHVYSPIVSMQNIQKTPQTAKKALASRWLSWLSYLEDPRIRFFYDPQMPALKDLPAVDTGKDNKKHPSNFQHIFYTDGSAITSPTKEGHLNAGMGIVYFINKDGNLQKQQEWSISLGNHTAQFAEIAAFEFALKKCLPLGGNILVVTDSNYVAKAYNEELDVWASNGFVNNRKKPLKHISKWKSVADLKRLRPDVVVTHEPGHQKLDSSPHAYGNNLADQLATQASFKVHAGKRTADGSEFEKRTADGSEFESPKKKAKVE

SEQ ID NO: 784 - protein, 2084 aa, synthetic construct
MPAAKRVKLDGGDKKYSIGLDIGTNSVGWAVITDEYKVPSKKFKVLGNTDRHSIKKNLIGALLFDSGETAEATRLKRTARRRYTRRKNRICYLQEIFSNEMAKVDDSFFHRLEESFLVEEDKKHERHPIFGNIVDEVAYHEKYPTIYHLRKKLVDSTDKADLRLIYLALAHMIKFRGHFLIEGDLNPDNSDVDKLFIQLVQTYNQLFEENPINASGVDAKAILSARLSKSRRLENLIAQLPGEKKNGLFGNLIALSLGLTPNFKSNFDLAEDAKLQLSKDTYDDDLDNLLAQIGDQYADLFLAAKNLSDAILLSDILRVNTEITKAPLSASMIKRYDEHHQDLTLLKALVRQQLPEKYKEIFFDQSKNGYAGYIDGGASQEEFYKFIKPILEKMDGTEELLVKLNREDLLRKQRTFDNGSIPHQIHLGELHAILRRQEDFYPFLKDNREKIEKILTFRIPYYVGPLARGNSRFAWMTRKSEETITPWNFEEVVDKGASAQSFIERMTNFDKNLPNEKVLPKHSLLYEYFTVYNELTKVKYVTEGMRKPAFLSGEQKKAIVDLLFKTNRKVTVKQLKEDYFKKIECFDSVEISGVEDRFNASLGTYHDLLKIIKDKDFLDNEENEDILEDIVLTLTLFEDREMIEERLKTYAHLFDDKVMKQLKRRRYTGWGRLSRKLINGIRDKQSGKTILDFLKSDGFANRNFMQLIHDDSLTFKEDIQKAQVSGQGDSLHEHIANLAGSPAIKKGILQTVKVVDELVKVMGRHKPENIVIEMARENQTTQKGQKNSRERMKRIEEGIKELGSQILKEHPVENTQLQNEKLYLYYLQNGRDMYVDQELDINRLSDYDVDHIVPQSFLKDDSIDNKVLTRSDKARGKSDNVPSEEVVKKMKNYWRQLLNAKLITQRKFDNLTKAERGGLSELDKAGFIKRQLVETRQITKHVAQILDSRMNTKYDENDKLIREVKVITLKSKLVSDFRKDFQFYKVREINNYHHAHDAYLNAVVGTALIKKYPKLESEFVYGDYKVYDVRKMIAKSEQEIGKATAKYFFYSNIMNFFKTEITLANGEIRKRPLIETNGETGEIVWDKGRDFATVRKVLSMPQVNIVKKTEVQTGGFSKESILPKRNSDKLIARKKDWDPKKYGGFDSPTVAYSVLVVAKVEKGKSKKLKSVKELLGITIMERSSFEKNPIDFLEAKGYKEVKKDLIIKLPKYSLFELENGRKRMLASAGELQKGNELALPSKYVNFLYLASHYEKLKGSPEDNEQKQLFVEQHKHYLDEIIEQISEFSKRVILADANLDKVLSAYNKHRDKPIREQAENIIHLFTLTNLGAPAAFKYFDTTIDRKRYTSTKEVLDATLIHQSITGLYETRIDLSQLGGDGGEAAAKGGGGGVPWILKKPLELTIKLDLEEQQGTLLNNSILSKKGKEELKQLFEKYSALWQSWENQVGHRRIRPHKIATGTVKPTPQKQYHINPKAKPDIQIVINDLLKQGVLIQKESTMNTPVYPVPKPNGRWRMVLDYRAVNKVTPLIAVQNQHSYGILGSLFKGRYKTTIDLSNGFWAHPIVPEDYWITAFTWQGKQYCWTVLPQGFLNSPGLFTGDVVDLLQGIPNVEVYVDDVYISHDSEKEHLEYLDILFNRLKEAGYIISLKKSNIANSIVDFLGFQITNEGRGLTDTFKEKLENITAPTTLKQLQSILGLLNFARNFIPDFTELIAPLYALIPKSTKNYVPWQIEHSTTLETLITKLNGAEYLQGRKGDKTLIMKVNASYTTGYIRYYNEGEKKPISYVSIVFSKTELKFTELEKLLTTVHKGLLKALDLSMGQNIHVYSPIVSMQNIQKTPQTAKKALASRWLSWLSYLEDPRIRFFYDPQMPALKDLPAVDTGKDNKKHPSNFQHIFYTDGSAITSPTKEGHLNAGMGIVYFINKDGNLQKQQEWSISLGNHTAQFAEIAAFEFALKKCLPLGGNILVVTDSNYVAKAYNEELDVWASNGFVNNRKKPLKHISKWKSVADLKRLRPDVVVTHEPGHQKLDSSPHAYGNNLADQLATQASFKVHAGKRTADGSEFEKRTADGSEFESPKKKAKVE

SEQ ID NO: 785 - protein, 2087 aa, synthetic construct
MPAAKRVKLDGGDKKYSIGLDIGTNSVGWAVITDEYKVPSKKFKVLGNTDRHSIKKNLIGALLFDSGETAEATRLKRTARRRYTRRKNRICYLQEIFSNEMAKVDDSFFHRLEESFLVEEDKKHERHPIFGNIVDEVAYHEKYPTIYHLRKKLVDSTDKADLRLIYLALAHMIKFRGHFLIEGDLNPDNSDVDKLFIQLVQTYNQLFEENPINASGVDAKAILSARLSKSRRLENLIAQLPGEKKNGLFGNLIALSLGLTPNFKSNFDLAEDAKLQLSKDTYDDDLDNLLAQIGDQYADLFLAAKNLSDAILLSDILRVNTEITKAPLSASMIKRYDEHHQDLTLLKALVRQQLPEKYKEIFFDQSKNGYAGYIDGGASQEEFYKFIKPILEKMDGTEELLVKLNREDLLRKQRTFDNGSIPHQIHLGELHAILRRQEDFYPFLKDNREKIEKILTFRIPYYVGPLARGNSRFAWMTRKSEETITPWNFEEVVDKGASAQSFIERMTNFDKNLPNEKVLPKHSLLYEYFTVYNELTKVKYVTEGMRKPAFLSGEQKKAIVDLLFKTNRKVTVKQLKEDYFKKIECFDSVEISGVEDRFNASLGTYHDLLKIIKDKDFLDNEENEDILEDIVLTLTLFEDREMIEERLKTYAHLFDDKVMKQLKRRRYTGWGRLSRKLINGIRDKQSGKTILDFLKSDGFANRNFMQLIHDDSLTFKEDIQKAQVSGQGDSLHEHIANLAGSPAIKKGILQTVKVVDELVKVMGRHKPENIVIEMARENQTTQKGQKNSRERMKRIEEGIKELGSQILKEHPVENTQLQNEKLYLYYLQNGRDMYVDQELDINRLSDYDVDHIVPQSFLKDDSIDNKVLTRSDKARGKSDNVPSEEVVKKMKNYWRQLLNAKLITQRKFDNLTKAERGGLSELDKAGFIKRQLVETRQITKHVAQILDSRMNTKYDENDKLIREVKVITLKSKLVSDFRKDFQFYKVREINNYHHAHDAYLNAVVGTALIKKYPKLESEFVYGDYKVYDVRKMIAKSEQEIGKATAKYFFYSNIMNFFKTEITLANGEIRKRPLIETNGETGEIVWDKGRDFATVRKVLSMPQVNIVKKTEVQTGGFSKESILPKRNSDKLIARKKDWDPKKYGGFDSPTVAYSVLVVAKVEKGKSKKLKSVKELLGITIMERSSFEKNPIDFLEAKGYKEVKKDLIIKLPKYSLFELENGRKRMLASAGELQKGNELALPSKYVNFLYLASHYEKLKGSPEDNEQKQLFVEQHKHYLDEIIEQISEFSKRVILADANLDKVLSAYNKHRDKPIREQAENIIHLFTLTNLGAPAAFKYFDTTIDRKRYTSTKEVLDATLIHQSITGLYETRIDLSQLGGDGGPAPAPAPAPAPGGVPWILKKPLELTIKLDLEEQQGTLLNNSILSKKGKEELKQLFEKYSALWQSWENQVGHRRIRPHKIATGTVKPTPQKQYHINPKAKPDIQIVINDLLKQGVLIQKESTMNTPVYPVPKPNGRWRMVLDYRAVNKVTPLIAVQNQHSYGILGSLFKGRYKTTIDLSNGFWAHPIVPEDYWITAFTWQGKQYCWTVLPQGFLNSPGLFTGDVVDLLQGIPNVEVYVDDVYISHDSEKEHLEYLDILFNRLKEAGYIISLKKSNIANSIVDFLGFQITNEGRGLTDTFKEKLENITAPTTLKQLQSILGLLNFARNFIPDFTELIAPLYALIPKSTKNYVPWQIEHSTTLETLITKLNGAEYLQGRKGDKTLIMKVNASYTTGYIRYYNEGEKKPISYVSIVFSKTELKFTELEKLLTTVHKGLLKALDLSMGQNIHVYSPIVSMQNIQKTPQTAKKALASRWLSWLSYLEDPRIRFFYDPQMPALKDLPAVDTGKDNKKHPSNFQHIFYTDGSAITSPTKEGHLNAGMGIVYFINKDGNLQKQQEWSISLGNHTAQFAEIAAFEFALKKCLPLGGNILVVTDSNYVAKAYNEELDVWASNGFVNNRKKPLKHISKWKSVADLKRLRPDVVVTHEPGHQKLDSSPHAYGNNLADQLATQASFKVHAGKRTADGSEFEKRTADGSEFESPKKKAKVE

SEQ ID NO: 786 - protein, 2085 aa, synthetic construct
MPAAKRVKLDGGDKKYSIGLDIGTNSVGWAVITDEYKVPSKKFKVLGNTDRHSIKKNLIGALLFDSGETAEATRLKRTARRRYTRRKNRICYLQEIFSNEMAKVDDSFFHRLEESFLVEEDKKHERHPIFGNIVDEVAYHEKYPTIYHLRKKLVDSTDKADLRLIYLALAHMIKFRGHFLIEGDLNPDNSDVDKLFIQLVQTYNQLFEENPINASGVDAKAILSARLSKSRRLENLIAQLPGEKKNGLFGNLIALSLGLTPNFKSNFDLAEDAKLQLSKDTYDDDLDNLLAQIGDQYADLFLAAKNLSDAILLSDILRVNTEITKAPLSASMIKRYDEHHQDLTLLKALVRQQLPEKYKEIFFDQSKNGYAGYIDGGASQEEFYKFIKPILEKMDGTEELLVKLNREDLLRKQRTFDNGSIPHQIHLGELHAILRRQEDFYPFLKDNREKIEKILTFRIPYYVGPLARGNSRFAWMTRKSEETITPWNFEEVVDKGASAQSFIERMTNFDKNLPNEKVLPKHSLLYEYFTVYNELTKVKYVTEGMRKPAFLSGEQKKAIVDLLFKTNRKVTVKQLKEDYFKKIECFDSVEISGVEDRFNASLGTYHDLLKIIKDKDFLDNEENEDILEDIVLTLTLFEDREMIEERLKTYAHLFDDKVMKQLKRRRYTGWGRLSRKLINGIRDKQSGKTILDFLKSDGFANRNFMQLIHDDSLTFKEDIQKAQVSGQGDSLHEHIANLAGSPAIKKGILQTVKVVDELVKVMGRHKPENIVIEMARENQTTQKGQKNSRERMKRIEEGIKELGSQILKEHPVENTQLQNEKLYLYYLQNGRDMYVDQELDINRLSDYDVDHIVPQSFLKDDSIDNKVLTRSDKARGKSDNVPSEEVVKKMKNYWRQLLNAKLITQRKFDNLTKAERGGLSELDKAGFIKRQLVETRQITKHVAQILDSRMNTKYDENDKLIREVKVITLKSKLVSDFRKDFQFYKVREINNYHHAHDAYLNAVVGTALIKKYPKLESEFVYGDYKVYDVRKMIAKSEQEIGKATAKYFFYSNIMNFFKTEITLANGEIRKRPLIETNGETGEIVWDKGRDFATVRKVLSMPQVNIVKKTEVQTGGFSKESILPKRNSDKLIARKKDWDPKKYGGFDSPTVAYSVLVVAKVEKGKSKKLKSVKELLGITIMERSSFEKNPIDFLEAKGYKEVKKDLIIKLPKYSLFELENGRKRMLASAGELQKGNELALPSKYVNFLYLASHYEKLKGSPEDNEQKQLFVEQHKHYLDEIIEQISEFSKRVILADANLDKVLSAYNKHRDKPIREQAENIIHLFTLTNLGAPAAFKYFDTTIDRKRYTSTKEVLDATLIHQSITGLYETRIDLSQLGGDGGGGSGGSGGSGGVPWILKKPLELTIKLDLEEQQGTLLNNSILSKKGKEELKQLFEKYSALWQSWENQVGHRRIRPHKIATGTVKPTPQKQYHINPKAKPDIQIVINDLLKQGVLIQKESTMNTPVYPVPKPNGRWRMVLDYRAVNKVTPLIAVQNQHSYGILGSLFKGRYKTTIDLSNGFWAHPIVPEDYWITAFTWQGKQYCWTVLPQGFLNSPGLFTGDVVDLLQGIPNVEVYVDDVYISHDSEKEHLEYLDILFNRLKEAGYIISLKKSNIANSIVDFLGFQITNEGRGLTDTFKEKLENITAPTTLKQLQSILGLLNFARNFIPDFTELIAPLYALIPKSTKNYVPWQIEHSTTLETLITKLNGAEYLQGRKGDKTLIMKVNASYTTGYIRYYNEGEKKPISYVSIVFSKTELKFTELEKLLTTVHKGLLKALDLSMGQNIHVYSPIVSMQNIQKTPQTAKKALASRWLSWLSYLEDPRIRFFYDPQMPALKDLPAVDTGKDNKKHPSNFQHIFYTDGSAITSPTKEGHLNAGMGIVYFINKDGNLQKQQEWSISLGNHTAQFAEIAAFEFALKKCLPLGGNILVVTDSNYVAKAYNEELDVWASNGFVNNRKKPLKHISKWKSVADLKRLRPDVVVTHEPGHQKLDSSPHAYGNNLADQLATQASFKVHAGKRTADGSEFEKRTADGSEFESPKKKAKVE

SEQ ID NO: 787 - protein, 2085 aa, synthetic construct
MPAAKRVKLDGGDKKYSIGLDIGTNSVGWAVITDEYKVPSKKFKVLGNTDRHSIKKNLIGALLFDSGETAEATRLKRTARRRYTRRKNRICYLQEIFSNEMAKVDDSFFHRLEESFLVEEDKKHERHPIFGNIVDEVAYHEKYPTIYHLRKKLVDSTDKADLRLIYLALAHMIKFRGHFLIEGDLNPDNSDVDKLFIQLVQTYNQLFEENPINASGVDAKAILSARLSKSRRLENLIAQLPGEKKNGLFGNLIALSLGLTPNFKSNFDLAEDAKLQLSKDTYDDDLDNLLAQIGDQYADLFLAAKNLSDAILLSDILRVNTEITKAPLSASMIKRYDEHHQDLTLLKALVRQQLPEKYKEIFFDQSKNGYAGYIDGGASQEEFYKFIKPILEKMDGTEELLVKLNREDLLRKQRTFDNGSIPHQIHLGELHAILRRQEDFYPFLKDNREKIEKILTFRIPYYVGPLARGNSRFAWMTRKSEETITPWNFEEVVDKGASAQSFIERMTNFDKNLPNEKVLPKHSLLYEYFTVYNELTKVKYVTEGMRKPAFLSGEQKKAIVDLLFKTNRKVTVKQLKEDYFKKIECFDSVEISGVEDRFNASLGTYHDLLKIIKDKDFLDNEENEDILEDIVLTLTLFEDREMIEERLKTYAHLFDDKVMKQLKRRRYTGWGRLSRKLINGIRDKQSGKTILDFLKSDGFANRNFMQLIHDDSLTFKEDIQKAQVSGQGDSLHEHIANLAGSPAIKKGILQTVKVVDELVKVMGRHKPENIVIEMARENQTTQKGQKNSRERMKRIEEGIKELGSQILKEHPVENTQLQNEKLYLYYLQNGRDMYVDQELDINRLSDYDVDHIVPQSFLKDDSIDNKVLTRSDKARGKSDNVPSEEVVKKMKNYWRQLLNAKLITQRKFDNLTKAERGGLSELDKAGFIKRQLVETRQITKHVAQILDSRMNTKYDENDKLIREVKVITLKSKLVSDFRKDFQFYKVREINNYHHAHDAYLNAVVGTALIKKYPKLESEFVYGDYKVYDVRKMIAKSEQEIGKATAKYFFYSNIMNFFKTEITLANGEIRKRPLIETNGETGEIVWDKGRDFATVRKVLSMPQVNIVKKTEVQTGGFSKESILPKRNSDKLIARKKDWDPKKYGGFDSPTVAYSVLVVAKVEKGKSKKLKSVKELLGITIMERSSFEKNPIDFLEAKGYKEVKKDLIIKLPKYSLFELENGRKRMLASAGELQKGNELALPSKYVNFLYLASHYEKLKGSPEDNEQKQLFVEQHKHYLDEIIEQISEFSKRVILADANLDKVLSAYNKHRDKPIREQAENIIHLFTLTNLGAPAAFKYFDTTIDRKRYTSTKEVLDATLIHQSITGLYETRIDLSQLGGDGGGSSGGSGGGGGVPWILKKPLELTIKLDLEEQQGTLLNNSILSKKGKEELKQLFEKYSALWQSWENQVGHRRIRPHKIATGTVKPTPQKQYHINPKAKPDIQIVINDLLKQGVLIQKESTMNTPVYPVPKPNGRWRMVLDYRAVNKVTPLIAVQNQHSYGILGSLFKGRYKTTIDLSNGFWAHPIVPEDYWITAFTWQGKQYCWTVLPQGFLNSPGLFTGDVVDLLQGIPNVEVYVDDVYISHDSEKEHLEYLDILFNRLKEAGYIISLKKSNIANSIVDFLGFQITNEGRGLTDTFKEKLENITAPTTLKQLQSILGLLNFARNFIPDFTELIAPLYALIPKSTKNYVPWQIEHSTTLETLITKLNGAEYLQGRKGDKTLIMKVNASYTTGYIRYYNEGEKKPISYVSIVFSKTELKFTELEKLLTTVHKGLLKALDLSMGQNIHVYSPIVSMQNIQKTPQTAKKALASRWLSWLSYLEDPRIRFFYDPQMPALKDLPAVDTGKDNKKHPSNFQHIFYTDGSAITSPTKEGHLNAGMGIVYFINKDGNLQKQQEWSISLGNHTAQFAEIAAFEFALKKCLPLGGNILVVTDSNYVAKAYNEELDVWASNGFVNNRKKPLKHISKWKSVADLKRLRPDVVVTHEPGHQKLDSSPHAYGNNLADQLATQASFKVHAGKRTADGSEFEKRTADGSEFESPKKKAKVE

SEQ ID NO: 788 - protein, 2082 aa, synthetic construct
MPAAKRVKLDGGDKKYSIGLDIGTNSVGWAVITDEYKVPSKKFKVLGNTDRHSIKKNLIGALLFDSGETAEATRLKRTARRRYTRRKNRICYLQEIFSNEMAKVDDSFFHRLEESFLVEEDKKHERHPIFGNIVDEVAYHEKYPTIYHLRKKLVDSTDKADLRLIYLALAHMIKFRGHFLIEGDLNPDNSDVDKLFIQLVQTYNQLFEENPINASGVDAKAILSARLSKSRRLENLIAQLPGEKKNGLFGNLIALSLGLTPNFKSNFDLAEDAKLQLSKDTYDDDLDNLLAQIGDQYADLFLAAKNLSDAILLSDILRVNTEITKAPLSASMIKRYDEHHQDLTLLKALVRQQLPEKYKEIFFDQSKNGYAGYIDGGASQEEFYKFIKPILEKMDGTEELLVKLNREDLLRKQRTFDNGSIPHQIHLGELHAILRRQEDFYPFLKDNREKIEKILTFRIPYYVGPLARGNSRFAWMTRKSEETITPWNFEEVVDKGASAQSFIERMTNFDKNLPNEKVLPKHSLLYEYFTVYNELTKVKYVTEGMRKPAFLSGEQKKAIVDLLFKTNRKVTVKQLKEDYFKKIECFDSVEISGVEDRFNASLGTYHDLLKIIKDKDFLDNEENEDILEDIVLTLTLFEDREMIEERLKTYAHLFDDKVMKQLKRRRYTGWGRLSRKLINGIRDKQSGKTILDFLKSDGFANRNFMQLIHDDSLTFKEDIQKAQVSGQGDSLHEHIANLAGSPAIKKGILQTVKVVDELVKVMGRHKPENIVIEMARENQTTQKGQKNSRERMKRIEEGIKELGSQILKEHPVENTQLQNEKLYLYYLQNGRDMYVDQELDINRLSDYDVDHIVPQSFLKDDSIDNKVLTRSDKARGKSDNVPSEEVVKKMKNYWRQLLNAKLITQRKFDNLTKAERGGLSELDKAGFIKRQLVETRQITKHVAQILDSRMNTKYDENDKLIREVKVITLKSKLVSDFRKDFQFYKVREINNYHHAHDAYLNAVVGTALIKKYPKLESEFVYGDYKVYDVRKMIAKSEQEIGKATAKYFFYSNIMNFFKTEITLANGEIRKRPLIETNGETGEIVWDKGRDFATVRKVLSMPQVNIVKKTEVQTGGFSKESILPKRNSDKLIARKKDWDPKKYGGFDSPTVAYSVLVVAKVEKGKSKKLKSVKELLGITIMERSSFEKNPIDFLEAKGYKEVKKDLIIKLPKYSLFELENGRKRMLASAGELQKGNELALPSKYVNFLYLASHYEKLKGSPEDNEQKQLFVEQHKHYLDEIIEQISEFSKRVILADANLDKVLSAYNKHRDKPIREQAENIIHLFTLTNLGAPAAFKYFDTTIDRKRYTSTKEVLDATLIHQSITGLYETRIDLSQLGGDGGGGSGGSGGVPWILKKPLELTIKLDLEEQQGTLLNNSILSKKGKEELKQLFEKYSALWQSWENQVGHRRIRPHKIATGTVKPTPQKQYHINPKAKPDIQIVINDLLKQGVLIQKESTMNTPVYPVPKPNGRWRMVLDYRAVNKVTPLIAVQNQHSYGILGSLFKGRYKTTIDLSNGFWAHPIVPEDYWITAFTWQGKQYCWTVLPQGFLNSPGLFTGDVVDLLQGIPNVEVYVDDVYISHDSEKEHLEYLDILFNRLKEAGYIISLKKSNIANSIVDFLGFQITNEGRGLTDTFKEKLENITAPTTLKQLQSILGLLNFARNFIPDFTELIAPLYALIPKSTKNYVPWQIEHSTTLETLITKLNGAEYLQGRKGDKTLIMKVNASYTTGYIRYYNEGEKKPISYVSIVFSKTELKFTELEKLLTTVHKGLLKALDLSMGQNIHVYSPIVSMQNIQKTPQTAKKALASRWLSWLSYLEDPRIRFFYDPQMPALKDLPAVDTGKDNKKHPSNFQHIFYTDGSAITSPTKEGHLNAGMGIVYFINKDGNLQKQQEWSISLGNHTAQFAEIAAFEFALKKCLPLGGNILVVTDSNYVAKAYNEELDVWASNGFVNNRKKPLKHISKWKSVADLKRLRPDVVVTHEPGHQKLDSSPHAYGNNLADQLATQASFKVHAGKRTADGSEFEKRTADGSEFESPKKKAKVE

SEQ ID NO: 789 - protein, 2073 aa, synthetic construct
MPAAKRVKLDGGDKKYSIGLDIGTNSVGWAVITDEYKVPSKKFKVLGNTDRHSIKKNLIGALLFDSGETAEATRLKRTARRRYTRRKNRICYLQEIFSNEMAKVDDSFFHRLEESFLVEEDKKHERHPIFGNIVDEVAYHEKYPTIYHLRKKLVDSTDKADLRLIYLALAHMIKFRGHFLIEGDLNPDNSDVDKLFIQLVQTYNQLFEENPINASGVDAKAILSARLSKSRRLENLIAQLPGEKKNGLFGNLIALSLGLTPNFKSNFDLAEDAKLQLSKDTYDDDLDNLLAQIGDQYADLFLAAKNLSDAILLSDILRVNTEITKAPLSASMIKRYDEHHQDLTLLKALVRQQLPEKYKEIFFDQSKNGYAGYIDGGASQEEFYKFIKPILEKMDGTEELLVKLNREDLLRKQRTFDNGSIPHQIHLGELHAILRRQEDFYPFLKDNREKIEKILTFRIPYYVGPLARGNSRFAWMTRKSEETITPWNFEEVVDKGASAQSFIERMTNFDKNLPNEKVLPKHSLLYEYFTVYNELTKVKYVTEGMRKPAFLSGEQKKAIVDLLFKTNRKVTVKQLKEDYFKKIECFDSVEISGVEDRFNASLGTYHDLLKIIKDKDFLDNEENEDILEDIVLTLTLFEDREMIEERLKTYAHLFDDKVMKQLKRRRYTGWGRLSRKLINGIRDKQSGKTILDFLKSDGFANRNFMQLIHDDSLTFKEDIQKAQVSGQGDSLHEHIANLAGSPAIKKGILQTVKVVDELVKVMGRHKPENIVIEMARENQTTQKGQKNSRERMKRIEEGIKELGSQILKEHPVENTQLQNEKLYLYYLQNGRDMYVDQELDINRLSDYDVDHIVPQSFLKDDSIDNKVLTRSDKARGKSDNVPSEEVVKKMKNYWRQLLNAKLITQRKFDNLTKAERGGLSELDKAGFIKRQLVETRQITKHVAQILDSRMNTKYDENDKLIREVKVITLKSKLVSDFRKDFQFYKVREINNYHHAHDAYLNAVVGTALIKKYPKLESEFVYGDYKVYDVRKMIAKSEQEIGKATAKYFFYSNIMNFFKTEITLANGEIRKRPLIETNGETGEIVWDKGRDFATVRKVLSMPQVNIVKKTEVQTGGFSKESILPKRNSDKLIARKKDWDPKKYGGFDSPTVAYSVLVVAKVEKGKSKKLKSVKELLGITIMERSSFEKNPIDFLEAKGYKEVKKDLIIKLPKYSLFELENGRKRMLASAGELQKGNELALPSKYVNFLYLASHYEKLKGSPEDNEQKQLFVEQHKHYLDEIIEQISEFSKRVILADANLDKVLSAYNKHRDKPIREQAENIIHLFTLTNLGAPAAFKYFDTTIDRKRYTSTKEVLDATLIHQSITGLYETRIDLSQLGGDGGPAPGGGGSSGGSCQTKNTLNIDEYLLQFPDQLWASLPTDIGRMLVPPITIKIKDNASLPSIRQYPLPKDKTEGLRPLISSLENQGILIKCHSPCNTPIFPIKKAGRDEYRMIHDLRAINNIVAPLTAVVASPTTVLSNLAPSLHWFTVIDLSNAFFSVPIHKDSQYLFAFTFEGHQYTWTVLPQGFIHSPTLFNQALYQSLHKIKFKISSEICIYMDDVLIASKDRDTNLKDTAVMLQHLASEGHKVSKKKLQLCQQEVVYLGQLLTPEGRKILPDRKVTVSQFQQPTTIRQIRAFLGKVGYCRHFIPEFSIHSKFLEKQLKPDTAEPFQLDDQQVEAFNKLKHAITTAPVLVVPDPAKPFQLYTSHSEHASIAVLTQKHAGRTRPIAFLSSKFDAIESGLPPCLKACASIHRSLTQADSFILGAPLIIYTTHAICTLLQRDRSQLVTASRFSKWEADLLRPELTFVACSAVSPAHLYMQSCENNIPPHDCVLLTHTISRPRPDLSDLPIPDPDMTLFSDGSYTTGRGGAAVVMHRPVTDDFIIIHQQPGGASAQTAELLALAAACHLATDKTVNIYTDSRYAYGVVHDFGHLWMHRGFVTSAGTPIKNHKEIEYLLKQIMKPKQVSVIKIEAHTKGVSMEVRGNAAADEAAKNAVFLVQRAGKRTADGSEFEKRTADGSEFESPKKKAKVE

SEQ ID NO: 790 - protein, 2094 aa, synthetic construct
MPAAKRVKLDGGDKKYSIGLDIGTNSVGWAVITDEYKVPSKKFKVLGNTDRHSIKKNLIGALLFDSGETAEATRLKRTARRRYTRRKNRICYLQEIFSNEMAKVDDSFFHRLEESFLVEEDKKHERHPIFGNIVDEVAYHEKYPTIYHLRKKLVDSTDKADLRLIYLALAHMIKFRGHFLIEGDLNPDNSDVDKLFIQLVQTYNQLFEENPINASGVDAKAILSARLSKSRRLENLIAQLPGEKKNGLFGNLIALSLGLTPNFKSNFDLAEDAKLQLSKDTYDDDLDNLLAQIGDQYADLFLAAKNLSDAILLSDILRVNTEITKAPLSASMIKRYDEHHQDLTLLKALVRQQLPEKYKEIFFDQSKNGYAGYIDGGASQEEFYKFIKPILEKMDGTEELLVKLNREDLLRKQRTFDNGSIPHQIHLGELHAILRRQEDFYPFLKDNREKIEKILTFRIPYYVGPLARGNSRFAWMTRKSEETITPWNFEEVVDKGASAQSFIERMTNFDKNLPNEKVLPKHSLLYEYFTVYNELTKVKYVTEGMRKPAFLSGEQKKAIVDLLFKTNRKVTVKQLKEDYFKKIECFDSVEISGVEDRFNASLGTYHDLLKIIKDKDFLDNEENEDILEDIVLTLTLFEDREMIEERLKTYAHLFDDKVMKQLKRRRYTGWGRLSRKLINGIRDKQSGKTILDFLKSDGFANRNFMQLIHDDSLTFKEDIQKAQVSGQGDSLHEHIANLAGSPAIKKGILQTVKVVDELVKVMGRHKPENIVIEMARENQTTQKGQKNSRERMKRIEEGIKELGSQILKEHPVENTQLQNEKLYLYYLQNGRDMYVDQELDINRLSDYDVDHIVPQSFLKDDSIDNKVLTRSDKARGKSDNVPSEEVVKKMKNYWRQLLNAKLITQRKFDNLTKAERGGLSELDKAGFIKRQLVETRQITKHVAQILDSRMNTKYDENDKLIREVKVITLKSKLVSDFRKDFQFYKVREINNYHHAHDAYLNAVVGTALIKKYPKLESEFVYGDYKVYDVRKMIAKSEQEIGKATAKYFFYSNIMNFFKTEITLANGEIRKRPLIETNGETGEIVWDKGRDFATVRKVLSMPQVNIVKKTEVQTGGFSKESILPKRNSDKLIARKKDWDPKKYGGFDSPTVAYSVLVVAKVEKGKSKKLKSVKELLGITIMERSSFEKNPIDFLEAKGYKEVKKDLIIKLPKYSLFELENGRKRMLASAGELQKGNELALPSKYVNFLYLASHYEKLKGSPEDNEQKQLFVEQHKHYLDEIIEQISEFSKRVILADANLDKVLSAYNKHRDKPIREQAENIIHLFTLTNLGAPAAFKYFDTTIDRKRYTSTKEVLDATLIHQSITGLYETRIDLSQLGGDGGGGGEAAAKPAPGGVLNLEEEYRLHEKPVPSSIDPSWLQLFPTVWAERAGMGLANQVPPVVVELRSGASPVAVRQYPMSKEAREGIRPHIQRFLDLGVLVPCQSPWNTPLLPVKKPGTNDYRPVQDLREINKRVQDIHPTVPNPYNLLSSLPPSHTWYSVLDLKDAFFCLKLHPNSQPLFAFEWRDPEKGNTGQLTWTRLPQGFKNSPTLFDEALHRDLAPFRALNPQVVLLQYVDDLLVAAPTYRDCKEGTQKLLQELSKLGYRVSAKKAQLCQKEVTYLGYLLKEGKRWLTPARKATVMKIPPPTTPRQVREFLGTAGFCRLWIPGFASLAAPLYPLTKESIPFIWTEEHQKAFDRIKEALLSAPALALPDLTKPFTLYVDERAGVARGVLTQTLGPWRRPVAYLSKKLDPVASGWPTCLKAVAAVALLLKDADKLTLGQNVTVIASHSLESIVRQPPDRWMTNARMTHYQSLLLNERVSFAPPAVLNPATLLPVESEATPVHRCSEILAEETGTRRDLKDQPLPGVPAWYTDGSSFIAEGKRRAGAAIVDGKRTVWASSLPEGTSAQKAELVALTQALRLAEGKDINIYTDSRYAFATAHIHGAIYKQRGLLTSAGKDIKNKEEILALLEAIHLPKRVAIIHCPGHQKGNDPVATGNRRADEAAKQAALSTRVLAETTKPAGKRTADGSEFEKRTADGSEFESPKKKAKVE

SEQ ID NO: 791 - protein, 2094 aa, synthetic construct
MPAAKRVKLDGGDKKYSIGLDIGTNSVGWAVITDEYKVPSKKFKVLGNTDRHSIKKNLIGALLFDSGETAEATRLKRTARRRYTRRKNRICYLQEIFSNEMAKVDDSFFHRLEESFLVEEDKKHERHPIFGNIVDEVAYHEKYPTIYHLRKKLVDSTDKADLRLIYLALAHMIKFRGHFLIEGDLNPDNSDVDKLFIQLVQTYNQLFEENPINASGVDAKAILSARLSKSRRLENLIAQLPGEKKNGLFGNLIALSLGLTPNFKSNFDLAEDAKLQLSKDTYDDDLDNLLAQIGDQYADLFLAAKNLSDAILLSDILRVNTEITKAPLSASMIKRYDEHHQDLTLLKALVRQQLPEKYKEIFFDQSKNGYAGYIDGGASQEEFYKFIKPILEKMDGTEELLVKLNREDLLRKQRTFDNGSIPHQIHLGELHAILRRQEDFYPFLKDNREKIEKILTFRIPYYVGPLARGNSRFAWMTRKSEETITPWNFEEVVDKGASAQSFIERMTNFDKNLPNEKVLPKHSLLYEYFTVYNELTKVKYVTEGMRKPAFLSGEQKKAIVDLLFKTNRKVTVKQLKEDYFKKIECFDSVEISGVEDRFNASLGTYHDLLKIIKDKDFLDNEENEDILEDIVLTLTLFEDREMIEERLKTYAHLFDDKVMKQLKRRRYTGWGRLSRKLINGIRDKQSGKTILDFLKSDGFANRNFMQLIHDDSLTFKEDIQKAQVSGQGDSLHEHIANLAGSPAIKKGILQTVKVVDELVKVMGRHKPENIVIEMARENQTTQKGQKNSRERMKRIEEGIKELGSQILKEHPVENTQLQNEKLYLYYLQNGRDMYVDQELDINRLSDYDVDHIVPQSFLKDDSIDNKVLTRSDKARGKSDNVPSEEVVKKMKNYWRQLLNAKLITQRKFDNLTKAERGGLSELDKAGFIKRQLVETRQITKHVAQILDSRMNTKYDENDKLIREVKVITLKSKLVSDFRKDFQFYKVREINNYHHAHDAYLNAVVGTALIKKYPKLESEFVYGDYKVYDVRKMIAKSEQEIGKATAKYFFYSNIMNFFKTEITLANGEIRKRPLIETNGETGEIVWDKGRDFATVRKVLSMPQVNIVKKTEVQTGGFSKESILPKRNSDKLIARKKDWDPKKYGGFDSPTVAYSVLVVAKVEKGKSKKLKSVKELLGITIMERSSFEKNPIDFLEAKGYKEVKKDLIIKLPKYSLFELENGRKRMLASAGELQKGNELALPSKYVNFLYLASHYEKLKGSPEDNEQKQLFVEQHKHYLDEIIEQISEFSKRVILADANLDKVLSAYNKHRDKPIREQAENIIHLFTLTNLGAPAAFKYFDTTIDRKRYTSTKEVLDATLIHQSITGLYETRIDLSQLGGDGGGSSGGGEAAAKGGVLNLEEEYRLHEKPVPSSIDPSWLQLFPTVWAERAGMGLANQVPPVVVELRSGASPVAVRQYPMSKEAREGIRPHIQRFLDLGVLVPCQSPWNTPLLPVKKPGTNDYRPVQDLREINKRVQDIHPTVPNPYNLLSSLPPSHTWYSVLDLKDAFFCLKLHPNSQPLFAFEWRDPEKGNTGQLTWTRLPQGFKNSPTLFDEALHRDLAPFRALNPQVVLLQYVDDLLVAAPTYRDCKEGTQKLLQELSKLGYRVSAKKAQLCQKEVTYLGYLLKEGKRWLTPARKATVMKIPPPTTPRQVREFLGTAGFCRLWIPGFASLAAPLYPLTKESIPFIWTEEHQKAFDRIKEALLSAPALALPDLTKPFTLYVDERAGVARGVLTQTLGPWRRPVAYLSKKLDPVASGWPTCLKAVAAVALLLKDADKLTLGQNVTVIASHSLESIVRQPPDRWMTNARMTHYQSLLLNERVSFAPPAVLNPATLLPVESEATPVHRCSEILAEETGTRRDLKDQPLPGVPAWYTDGSSFIAEGKRRAGAAIVDGKRTVWASSLPEGTSAQKAELVALTQALRLAEGKDINIYTDSRYAFATAHIHGAIYKQRGLLTSAGKDIKNKEEILALLEAIHLPKRVAIIHCPGHQKGNDPVATGNRRADEAAKQAALSTRVLAETTKPAGKRTADGSEFEKRTADGSEFESPKKKAKVE

SEQ ID NO: 792 - protein, 2092 aa, synthetic construct
MPAAKRVKLDGGDKKYSIGLDIGTNSVGWAVITDEYKVPSKKFKVLGNTDRHSIKKNLIGALLFDSGETAEATRLKRTARRRYTRRKNRICYLQEIFSNEMAKVDDSFFHRLEESFLVEEDKKHERHPIFGNIVDEVAYHEKYPTIYHLRKKLVDSTDKADLRLIYLALAHMIKFRGHFLIEGDLNPDNSDVDKLFIQLVQTYNQLFEENPINASGVDAKAILSARLSKSRRLENLIAQLPGEKKNGLFGNLIALSLGLTPNFKSNFDLAEDAKLQLSKDTYDDDLDNLLAQIGDQYADLFLAAKNLSDAILLSDILRVNTEITKAPLSASMIKRYDEHHQDLTLLKALVRQQLPEKYKEIFFDQSKNGYAGYIDGGASQEEFYKFIKPILEKMDGTEELLVKLNREDLLRKQRTFDNGSIPHQIHLGELHAILRRQEDFYPFLKDNREKIEKILTFRIPYYVGPLARGNSRFAWMTRKSEETITPWNFEEVVDKGASAQSFIERMTNFDKNLPNEKVLPKHSLLYEYFTVYNELTKVKYVTEGMRKPAFLSGEQKKAIVDLLFKTNRKVTVKQLKEDYFKKIECFDSVEISGVEDRFNASLGTYHDLLKIIKDKDFLDNEENEDILEDIVLTLTLFEDREMIEERLKTYAHLFDDKVMKQLKRRRYTGWGRLSRKLINGIRDKQSGKTILDFLKSDGFANRNFMQLIHDDSLTFKEDIQKAQVSGQGDSLHEHIANLAGSPAIKKGILQTVKVVDELVKVMGRHKPENIVIEMARENQTTQKGQKNSRERMKRIEEGIKELGSQILKEHPVENTQLQNEKLYLYYLQNGRDMYVDQELDINRLSDYDVDHIVPQSFLKDDSIDNKVLTRSDKARGKSDNVPSEEVVKKMKNYWRQLLNAKLITQRKFDNLTKAERGGLSELDKAGFIKRQLVETRQITKHVAQILDSRMNTKYDENDKLIREVKVITLKSKLVSDFRKDFQFYKVREINNYHHAHDAYLNAVVGTALIKKYPKLESEFVYGDYKVYDVRKMIAKSEQEIGKATAKYFFYSNIMNFFKTEITLANGEIRKRPLIETNGETGEIVWDKGRDFATVRKVLSMPQVNIVKKTEVQTGGFSKESILPKRNSDKLIARKKDWDPKKYGGFDSPTVAYSVLVVAKVEKGKSKKLKSVKELLGITIMERSSFEKNPIDFLEAKGYKEVKKDLIIKLPKYSLFELENGRKRMLASAGELQKGNELALPSKYVNFLYLASHYEKLKGSPEDNEQKQLFVEQHKHYLDEIIEQISEFSKRVILADANLDKVLSAYNKHRDKPIREQAENIIHLFTLTNLGAPAAFKYFDTTIDRKRYTSTKEVLDATLIHQSITGLYETRIDLSQLGGDGGGGSGGGGSSGGVLNLEEEYRLHEKPVPSSIDPSWLQLFPTVWAERAGMGLANQVPPVVVELRSGASPVAVRQYPMSKEAREGIRPHIQRFLDLGVLVPCQSPWNTPLLPVKKPGTNDYRPVQDLREINKRVQDIHPTVPNPYNLLSSLPPSHTWYSVLDLKDAFFCLKLHPNSQPLFAFEWRDPEKGNTGQLTWTRLPQGFKNSPTLFDEALHRDLAPFRALNPQVVLLQYVDDLLVAAPTYRDCKEGTQKLLQELSKLGYRVSAKKAQLCQKEVTYLGYLLKEGKRWLTPARKATVMKIPPPTTPRQVREFLGTAGFCRLWIPGFASLAAPLYPLTKESIPFIWTEEHQKAFDRIKEALLSAPALALPDLTKPFTLYVDERAGVARGVLTQTLGPWRRPVAYLSKKLDPVASGWPTCLKAVAAVALLLKDADKLTLGQNVTVIASHSLESIVRQPPDRWMTNARMTHYQSLLLNERVSFAPPAVLNPATLLPVESEATPVHRCSEILAEETGTRRDLKDQPLPGVPAWYTDGSSFIAEGKRRAGAAIVDGKRTVWASSLPEGTSAQKAELVALTQALRLAEGKDINIYTDSRYAFATAHIHGAIYKQRGLLTSAGKDIKNKEEILALLEAIHLPKRVAIIHCPGHQKGNDPVATGNRRADEAAKQAALSTRVLAETTKPAGKRTADGSEFEKRTADGSEFESPKKKAKVE

SEQ ID NO: 793 - protein, 2094 aa, synthetic construct
MPAAKRVKLDGGDKKYSIGLDIGTNSVGWAVITDEYKVPSKKFKVLGNTDRHSIKKNLIGALLFDSGETAEATRLKRTARRRYTRRKNRICYLQEIFSNEMAKVDDSFFHRLEESFLVEEDKKHERHPIFGNIVDEVAYHEKYPTIYHLRKKLVDSTDKADLRLIYLALAHMIKFRGHFLIEGDLNPDNSDVDKLFIQLVQTYNQLFEENPINASGVDAKAILSARLSKSRRLENLIAQLPGEKKNGLFGNLIALSLGLTPNFKSNFDLAEDAKLQLSKDTYDDDLDNLLAQIGDQYADLFLAAKNLSDAILLSDILRVNTEITKAPLSASMIKRYDEHHQDLTLLKALVRQQLPEKYKEIFFDQSKNGYAGYIDGGASQEEFYKFIKPILEKMDGTEELLVKLNREDLLRKQRTFDNGSIPHQIHLGELHAILRRQEDFYPFLKDNREKIEKILTFRIPYYVGPLARGNSRFAWMTRKSEETITPWNFEEVVDKGASAQSFIERMTNFDKNLPNEKVLPKHSLLYEYFTVYNELTKVKYVTEGMRKPAFLSGEQKKAIVDLLFKTNRKVTVKQLKEDYFKKIECFDSVEISGVEDRFNASLGTYHDLLKIIKDKDFLDNEENEDILEDIVLTLTLFEDREMIEERLKTYAHLFDDKVMKQLKRRRYTGWGRLSRKLINGIRDKQSGKTILDFLKSDGFANRNFMQLIHDDSLTFKEDIQKAQVSGQGDSLHEHIANLAGSPAIKKGILQTVKVVDELVKVMGRHKPENIVIEMARENQTTQKGQKNSRERMKRIEEGIKELGSQILKEHPVENTQLQNEKLYLYYLQNGRDMYVDQELDINRLSDYDVDHIVPQSFLKDDSIDNKVLTRSDKARGKSDNVPSEEVVKKMKNYWRQLLNAKLITQRKFDNLTKAERGGLSELDKAGFIKRQLVETRQITKHVAQILDSRMNTKYDENDKLIREVKVITLKSKLVSDFRKDFQFYKVREINNYHHAHDAYLNAVVGTALIKKYPKLESEFVYGDYKVYDVRKMIAKSEQEIGKATAKYFFYSNIMNFFKTEITLANGEIRKRPLIETNGETGEIVWDKGRDFATVRKVLSMPQVNIVKKTEVQTGGFSKESILPKRNSDKLIARKKDWDPKKYGGFDSPTVAYSVLVVAKVEKGKSKKLKSVKELLGITIMERSSFEKNPIDFLEAKGYKEVKKDLIIKLPKYSLFELENGRKRMLASAGELQKGNELALPSKYVNFLYLASHYEKLKGSPEDNEQKQLFVEQHKHYLDEIIEQISEFSKRVILADANLDKVLSAYNKHRDKPIREQAENIIHLFTLTNLGAPAAFKYFDTTIDRKRYTSTKEVLDATLIHQSITGLYETRIDLSQLGGDGGPAPGSSEAAAKGGVLNLEEEYRLHEKPVPSSIDPSWLQLFPTVWAERAGMGLANQVPPVVVELRSGASPVAVRQYPMSKEAREGIRPHIQRFLDLGVLVPCQSPWNTPLLPVKKPGTNDYRPVQDLREINKRVQDIHPTVPNPYNLLSSLPPSHTWYSVLDLKDAFFCLKLHPNSQPLFAFEWRDPEKGNTGQLTWTRLPQGFKNSPTLFDEALHRDLAPFRALNPQVVLLQYVDDLLVAAPTYRDCKEGTQKLLQELSKLGYRVSAKKAQLCQKEVTYLGYLLKEGKRWLTPARKATVMKIPPPTTPRQVREFLGTAGFCRLWIPGFASLAAPLYPLTKESIPFIWTEEHQKAFDRIKEALLSAPALALPDLTKPFTLYVDERAGVARGVLTQTLGPWRRPVAYLSKKLDPVASGWPTCLKAVAAVALLLKDADKLTLGQNVTVIASHSLESIVRQPPDRWMTNARMTHYQSLLLNERVSFAPPAVLNPATLLPVESEATPVHRCSEILAEETGTRRDLKDQPLPGVPAWYTDGSSFIAEGKRRAGAAIVDGKRTVWASSLPEGTSAQKAELVALTQALRLAEGKDINIYTDSRYAFATAHIHGAIYKQRGLLTSAGKDIKNKEEILALLEAIHLPKRVAIIHCPGHQKGNDPVATGNRRADEAAKQAALSTRVLAETTKPAGKRTADGSEFEKRTADGSEFESPKKKAKVE

SEQ ID NO: 794 - protein, 2092 aa, synthetic construct
MPAAKRVKLDGGDKKYSIGLDIGTNSVGWAVITDEYKVPSKKFKVLGNTDRHSIKKNLIGALLFDSGETAEATRLKRTARRRYTRRKNRICYLQEIFSNEMAKVDDSFFHRLEESFLVEEDKKHERHPIFGNIVDEVAYHEKYPTIYHLRKKLVDSTDKADLRLIYLALAHMIKFRGHFLIEGDLNPDNSDVDKLFIQLVQTYNQLFEENPINASGVDAKAILSARLSKSRRLENLIAQLPGEKKNGLFGNLIALSLGLTPNFKSNFDLAEDAKLQLSKDTYDDDLDNLLAQIGDQYADLFLAAKNLSDAILLSDILRVNTEITKAPLSASMIKRYDEHHQDLTLLKALVRQQLPEKYKEIFFDQSKNGYAGYIDGGASQEEFYKFIKPILEKMDGTEELLVKLNREDLLRKQRTFDNGSIPHQIHLGELHAILRRQEDFYPFLKDNREKIEKILTFRIPYYVGPLARGNSRFAWMTRKSEETITPWNFEEVVDKGASAQSFIERMTNFDKNLPNEKVLPKHSLLYEYFTVYNELTKVKYVTEGMRKPAFLSGEQKKAIVDLLFKTNRKVTVKQLKEDYFKKIECFDSVEISGVEDRFNASLGTYHDLLKIIKDKDFLDNEENEDILEDIVLTLTLFEDREMIEERLKTYAHLFDDKVMKQLKRRRYTGWGRLSRKLINGIRDKQSGKTILDFLKSDGFANRNFMQLIHDDSLTFKEDIQKAQVSGQGDSLHEHIANLAGSPAIKKGILQTVKVVDELVKVMGRHKPENIVIEMARENQTTQKGQKNSRERMKRIEEGIKELGSQILKEHPVENTQLQNEKLYLYYLQNGRDMYVDQELDINRLSDYDVDHIVPQSFLKDDSIDNKVLTRSDKARGKSDNVPSEEVVKKMKNYWRQLLNAKLITQRKFDNLTKAERGGLSELDKAGFIKRQLVETRQITKHVAQILDSRMNTKYDENDKLIREVKVITLKSKLVSDFRKDFQFYKVREINNYHHAHDAYLNAVVGTALIKKYPKLESEFVYGDYKVYDVRKMIAKSEQEIGKATAKYFFYSNIMNFFKTEITLANGEIRKRPLIETNGETGEIVWDKGRDFATVRKVLSMPQVNIVKKTEVQTGGFSKESILPKRNSDKLIARKKDWDPKKYGGFDSPTVAYSVLVVAKVEKGKSKKLKSVKELLGITIMERSSFEKNPIDFLEAKGYKEVKKDLIIKLPKYSLFELENGRKRMLASAGELQKGNELALPSKYVNFLYLASHYEKLKGSPEDNEQKQLFVEQHKHYLDEIIEQISEFSKRVILADANLDKVLSAYNKHRDKPIREQAENIIHLFTLTNLGAPAAFKYFDTTIDRKRYTSTKEVLDATLIHQSITGLYETRIDLSQLGGDGGGGSGSSPAPGGVLNLEEEYRLHEKPVPSSIDPSWLQLFPTVWAERAGMGLANQVPPVVVELRSGASPVAVRQYPMSKEAREGIRPHIQRFLDLGVLVPCQSPWNTPLLPVKKPGTNDYRPVQDLREINKRVQDIHPTVPNPYNLLSSLPPSHTWYSVLDLKDAFFCLKLHPNSQPLFAFEWRDPEKGNTGQLTWTRLPQGFKNSPTLFDEALHRDLAPFRALNPQVVLLQYVDDLLVAAPTYRDCKEGTQKLLQELSKLGYRVSAKKAQLCQKEVTYLGYLLKEGKRWLTPARKATVMKIPPPTTPRQVREFLGTAGFCRLWIPGFASLAAPLYPLTKESIPFIWTEEHQKAFDRIKEALLSAPALALPDLTKPFTLYVDERAGVARGVLTQTLGPWRRPVAYLSKKLDPVASGWPTCLKAVAAVALLLKDADKLTLGQNVTVIASHSLESIVRQPPDRWMTNARMTHYQSLLLNERVSFAPPAVLNPATLLPVESEATPVHRCSEILAEETGTRRDLKDQPLPGVPAWYTDGSSFIAEGKRRAGAAIVDGKRTVWASSLPEGTSAQKAELVALTQALRLAEGKDINIYTDSRYAFATAHIHGAIYKQRGLLTSAGKDIKNKEEILALLEAIHLPKRVAIIHCPGHQKGNDPVATGNRRADEAAKQAALSTRVLAETTKPAGKRTADGSEFEKRTADGSEFESPKKKAKVE

SEQ ID NO: 795 - protein, 2096 aa, synthetic construct
MPAAKRVKLDGGDKKYSIGLDIGTNSVGWAVITDEYKVPSKKFKVLGNTDRHSIKKNLIGALLFDSGETAEATRLKRTARRRYTRRKNRICYLQEIFSNEMAKVDDSFFHRLEESFLVEEDKKHERHPIFGNIVDEVAYHEKYPTIYHLRKKLVDSTDKADLRLIYLALAHMIKFRGHFLIEGDLNPDNSDVDKLFIQLVQTYNQLFEENPINASGVDAKAILSARLSKSRRLENLIAQLPGEKKNGLFGNLIALSLGLTPNFKSNFDLAEDAKLQLSKDTYDDDLDNLLAQIGDQYADLFLAAKNLSDAILLSDILRVNTEITKAPLSASMIKRYDEHHQDLTLLKALVRQQLPEKYKEIFFDQSKNGYAGYIDGGASQEEFYKFIKPILEKMDGTEELLVKLNREDLLRKQRTFDNGSIPHQIHLGELHAILRRQEDFYPFLKDNREKIEKILTFRIPYYVGPLARGNSRFAWMTRKSEETITPWNFEEVVDKGASAQSFIERMTNFDKNLPNEKVLPKHSLLYEYFTVYNELTKVKYVTEGMRKPAFLSGEQKKAIVDLLFKTNRKVTVKQLKEDYFKKIECFDSVEISGVEDRFNASLGTYHDLLKIIKDKDFLDNEENEDILEDIVLTLTLFEDREMIEERLKTYAHLFDDKVMKQLKRRRYTGWGRLSRKLINGIRDKQSGKTILDFLKSDGFANRNFMQLIHDDSLTFKEDIQKAQVSGQGDSLHEHIANLAGSPAIKKGILQTVKVVDELVKVMGRHKPENIVIEMARENQTTQKGQKNSRERMKRIEEGIKELGSQILKEHPVENTQLQNEKLYLYYLQNGRDMYVDQELDINRLSDYDVDHIVPQSFLKDDSIDNKVLTRSDKARGKSDNVPSEEVVKKMKNYWRQLLNAKLITQRKFDNLTKAERGGLSELDKAGFIKRQLVETRQITKHVAQILDSRMNTKYDENDKLIREVKVITLKSKLVSDFRKDFQFYKVREINNYHHAHDAYLNAVVGTALIKKYPKLESEFVYGDYKVYDVRKMIAKSEQEIGKATAKYFFYSNIMNFFKTEITLANGEIRKRPLIETNGETGEIVWDKGRDFATVRKVLSMPQVNIVKKTEVQTGGFSKESILPKRNSDKLIARKKDWDPKKYGGFDSPTVAYSVLVVAKVEKGKSKKLKSVKELLGITIMERSSFEKNPIDFLEAKGYKEVKKDLIIKLPKYSLFELENGRKRMLASAGELQKGNELALPSKYVNFLYLASHYEKLKGSPEDNEQKQLFVEQHKHYLDEIIEQISEFSKRVILADANLDKVLSAYNKHRDKPIREQAENIIHLFTLTNLGAPAAFKYFDTTIDRKRYTSTKEVLDATLIHQSITGLYETRIDLSQLGGDGGPAPAPAPAPAPAPGGVLNLEEEYRLHEKPVPSSIDPSWLQLFPTVWAERAGMGLANQVPPVVVELRSGASPVAVRQYPMSKEAREGIRPHIQRFLDLGVLVPCQSPWNTPLLPVKKPGTNDYRPVQDLREINKRVQDIHPTVPNPYNLLSSLPPSHTWYSVLDLKDAFFCLKLHPNSQPLFAFEWRDPEKGNTGQLTWTRLPQGFKNSPTLFDEALHRDLAPFRALNPQVVLLQYVDDLLVAAPTYRDCKEGTQKLLQELSKLGYRVSAKKAQLCQKEVTYLGYLLKEGKRWLTPARKATVMKIPPPTTPRQVREFLGTAGFCRLWIPGFASLAAPLYPLTKESIPFIWTEEHQKAFDRIKEALLSAPALALPDLTKPFTLYVDERAGVARGVLTQTLGPWRRPVAYLSKKLDPVASGWPTCLKAVAAVALLLKDADKLTLGQNVTVIASHSLESIVRQPPDRWMTNARMTHYQSLLLNERVSFAPPAVLNPATLLPVESEATPVHRCSEILAEETGTRRDLKDQPLPGVPAWYTDGSSFIAEGKRRAGAAIVDGKRTVWASSLPEGTSAQKAELVALTQALRLAEGKDINIYTDSRYAFATAHIHGAIYKQRGLLTSAGKDIKNKEEILALLEAIHLPKRVAIIHCPGHQKGNDPVATGNRRADEAAKQAALSTRVLAETTKPAGKRTADGSEFEKRTADGSEFESPKKKAKVE

SEQ ID NO: 796 - protein, 2094 aa, synthetic construct
MPAAKRVKLDGGDKKYSIGLDIGTNSVGWAVITDEYKVPSKKFKVLGNTDRHSIKKNLIGALLFDSGETAEATRLKRTARRRYTRRKNRICYLQEIFSNEMAKVDDSFFHRLEESFLVEEDKKHERHPIFGNIVDEVAYHEKYPTIYHLRKKLVDSTDKADLRLIYLALAHMIKFRGHFLIEGDLNPDNSDVDKLFIQLVQTYNQLFEENPINASGVDAKAILSARLSKSRRLENLIAQLPGEKKNGLFGNLIALSLGLTPNFKSNFDLAEDAKLQLSKDTYDDDLDNLLAQIGDQYADLFLAAKNLSDAILLSDILRVNTEITKAPLSASMIKRYDEHHQDLTLLKALVRQQLPEKYKEIFFDQSKNGYAGYIDGGASQEEFYKFIKPILEKMDGTEELLVKLNREDLLRKQRTFDNGSIPHQIHLGELHAILRRQEDFYPFLKDNREKIEKILTFRIPYYVGPLARGNSRFAWMTRKSEETITPWNFEEVVDKGASAQSFIERMTNFDKNLPNEKVLPKHSLLYEYFTVYNELTKVKYVTEGMRKPAFLSGEQKKAIVDLLFKTNRKVTVKQLKEDYFKKIECFDSVEISGVEDRFNASLGTYHDLLKIIKDKDFLDNEENEDILEDIVLTLTLFEDREMIEERLKTYAHLFDDKVMKQLKRRRYTGWGRLSRKLINGIRDKQSGKTILDFLKSDGFANRNFMQLIHDDSLTFKEDIQKAQVSGQGDSLHEHIANLAGSPAIKKGILQTVKVVDELVKVMGRHKPENIVIEMARENQTTQKGQKNSRERMKRIEEGIKELGSQILKEHPVENTQLQNEKLYLYYLQNGRDMYVDQELDINRLSDYDVDHIVPQSFLKDDSIDNKVLTRSDKARGKSDNVPSEEVVKKMKNYWRQLLNAKLITQRKFDNLTKAERGGLSELDKAGFIKRQLVETRQITKHVAQILDSRMNTKYDENDKLIREVKVITLKSKLVSDFRKDFQFYKVREINNYHHAHDAYLNAVVGTALIKKYPKLESEFVYGDYKVYDVRKMIAKSEQEIGKATAKYFFYSNIMNFFKTEITLANGEIRKRPLIETNGETGEIVWDKGRDFATVRKVLSMPQVNIVKKTEVQTGGFSKESILPKRNSDKLIARKKDWDPKKYGGFDSPTVAYSVLVVAKVEKGKSKKLKSVKELLGITIMERSSFEKNPIDFLEAKGYKEVKKDLIIKLPKYSLFELENGRKRMLASAGELQKGNELALPSKYVNFLYLASHYEKLKGSPEDNEQKQLFVEQHKHYLDEIIEQISEFSKRVILADANLDKVLSAYNKHRDKPIREQAENIIHLFTLTNLGAPAAFKYFDTTIDRKRYTSTKEVLDATLIHQSITGLYETRIDLSQLGGDGGGGSGGGEAAAKGGVLNLEEEYRLHEKPVPSSIDPSWLQLFPTVWAERAGMGLANQVPPVVVELRSGASPVAVRQYPMSKEAREGIRPHIQRFLDLGVLVPCQSPWNTPLLPVKKPGTNDYRPVQDLREINKRVQDIHPTVPNPYNLLSSLPPSHTWYSVLDLKDAFFCLKLHPNSQPLFAFEWRDPEKGNTGQLTWTRLPQGFKNSPTLFDEALHRDLAPFRALNPQVVLLQYVDDLLVAAPTYRDCKEGTQKLLQELSKLGYRVSAKKAQLCQKEVTYLGYLLKEGKRWLTPARKATVMKIPPPTTPRQVREFLGTAGFCRLWIPGFASLAAPLYPLTKESIPFIWTEEHQKAFDRIKEALLSAPALALPDLTKPFTLYVDERAGVARGVLTQTLGPWRRPVAYLSKKLDPVASGWPTCLKAVAAVALLLKDADKLTLGQNVTVIASHSLESIVRQPPDRWMTNARMTHYQSLLLNERVSFAPPAVLNPATLLPVESEATPVHRCSEILAEETGTRRDLKDQPLPGVPAWYTDGSSFIAEGKRRAGAAIVDGKRTVWASSLPEGTSAQKAELVALTQALRLAEGKDINIYTDSRYAFATAHIHGAIYKQRGLLTSAGKDIKNKEEILALLEAIHLPKRVAIIHCPGHQKGNDPVATGNRRADEAAKQAALSTRVLAETTKPAGKRTADGSEFEKRTADGSEFESPKKKAKVE

SEQ ID NO: 797 - protein, 2092 aa, synthetic construct
MPAAKRVKLDGGDKKYSIGLDIGTNSVGWAVITDEYKVPSKKFKVLGNTDRHSIKKNLIGALLFDSGETAEATRLKRTARRRYTRRKNRICYLQEIFSNEMAKVDDSFFHRLEESFLVEEDKKHERHPIFGNIVDEVAYHEKYPTIYHLRKKLVDSTDKADLRLIYLALAHMIKFRGHFLIEGDLNPDNSDVDKLFIQLVQTYNQLFEENPINASGVDAKAILSARLSKSRRLENLIAQLPGEKKNGLFGNLIALSLGLTPNFKSNFDLAEDAKLQLSKDTYDDDLDNLLAQIGDQYADLFLAAKNLSDAILLSDILRVNTEITKAPLSASMIKRYDEHHQDLTLLKALVRQQLPEKYKEIFFDQSKNGYAGYIDGGASQEEFYKFIKPILEKMDGTEELLVKLNREDLLRKQRTFDNGSIPHQIHLGELHAILRRQEDFYPFLKDNREKIEKILTFRIPYYVGPLARGNSRFAWMTRKSEETITPWNFEEVVDKGASAQSFIERMTNFDKNLPNEKVLPKHSLLYEYFTVYNELTKVKYVTEGMRKPAFLSGEQKKAIVDLLFKTNRKVTVKQLKEDYFKKIECFDSVEISGVEDRFNASLGTYHDLLKIIKDKDFLDNEENEDILEDIVLTLTLFEDREMIEERLKTYAHLFDDKVMKQLKRRRYTGWGRLSRKLINGIRDKQSGKTILDFLKSDGFANRNFMQLIHDDSLTFKEDIQKAQVSGQGDSLHEHIANLAGSPAIKKGILQTVKVVDELVKVMGRHKPENIVIEMARENQTTQKGQKNSRERMKRIEEGIKELGSQILKEHPVENTQLQNEKLYLYYLQNGRDMYVDQELDINRLSDYDVDHIVPQSFLKDDSIDNKVLTRSDKARGKSDNVPSEEVVKKMKNYWRQLLNAKLITQRKFDNLTKAERGGLSELDKAGFIKRQLVETRQITKHVAQILDSRMNTKYDENDKLIREVKVITLKSKLVSDFRKDFQFYKVREINNYHHAHDAYLNAVVGTALIKKYPKLESEFVYGDYKVYDVRKMIAKSEQEIGKATAKYFFYSNIMNFFKTEITLANGEIRKRPLIETNGETGEIVWDKGRDFATVRKVLSMPQVNIVKKTEVQTGGFSKESILPKRNSDKLIARKKDWDPKKYGGFDSPTVAYSVLVVAKVEKGKSKKLKSVKELLGITIMERSSFEKNPIDFLEAKGYKEVKKDLIIKLPKYSLFELENGRKRMLASAGELQKGNELALPSKYVNFLYLASHYEKLKGSPEDNEQKQLFVEQHKHYLDEIIEQISEFSKRVILADANLDKVLSAYNKHRDKPIREQAENIIHLFTLTNLGAPAAFKYFDTTIDRKRYTSTKEVLDATLIHQSITGLYETRIDLSQLGGDGGGGGPAPGSSGGVLNLEEEYRLHEKPVPSSIDPSWLQLFPTVWAERAGMGLANQVPPVVVELRSGASPVAVRQYPMSKEAREGIRPHIQRFLDLGVLVPCQSPWNTPLLPVKKPGTNDYRPVQDLREINKRVQDIHPTVPNPYNLLSSLPPSHTWYSVLDLKDAFFCLKLHPNSQPLFAFEWRDPEKGNTGQLTWTRLPQGFKNSPTLFDEALHRDLAPFRALNPQVVLLQYVDDLLVAAPTYRDCKEGTQKLLQELSKLGYRVSAKKAQLCQKEVTYLGYLLKEGKRWLTPARKATVMKIPPPTTPRQVREFLGTAGFCRLWIPGFASLAAPLYPLTKESIPFIWTEEHQKAFDRIKEALLSAPALALPDLTKPFTLYVDERAGVARGVLTQTLGPWRRPVAYLSKKLDPVASGWPTCLKAVAAVALLLKDADKLTLGQNVTVIASHSLESIVRQPPDRWMTNARMTHYQSLLLNERVSFAPPAVLNPATLLPVESEATPVHRCSEILAEETGTRRDLKDQPLPGVPAWYTDGSSFIAEGKRRAGAAIVDGKRTVWASSLPEGTSAQKAELVALTQALRLAEGKDINIYTDSRYAFATAHIHGAIYKQRGLLTSAGKDIKNKEEILALLEAIHLPKRVAIIHCPGHQKGNDPVATGNRRADEAAKQAALSTRVLAETTKPAGKRTADGSEFEKRTADGSEFESPKKKAKVE

SEQ ID NO: 798 - protein, 2094 aa, synthetic construct
MPAAKRVKLDGGDKKYSIGLDIGTNSVGWAVITDEYKVPSKKFKVLGNTDRHSIKKNLIGALLFDSGETAEATRLKRTARRRYTRRKNRICYLQEIFSNEMAKVDDSFFHRLEESFLVEEDKKHERHPIFGNIVDEVAYHEKYPTIYHLRKKLVDSTDKADLRLIYLALAHMIKFRGHFLIEGDLNPDNSDVDKLFIQLVQTYNQLFEENPINASGVDAKAILSARLSKSRRLENLIAQLPGEKKNGLFGNLIALSLGLTPNFKSNFDLAEDAKLQLSKDTYDDDLDNLLAQIGDQYADLFLAAKNLSDAILLSDILRVNTEITKAPLSASMIKRYDEHHQDLTLLKALVRQQLPEKYKEIFFDQSKNGYAGYIDGGASQEEFYKFIKPILEKMDGTEELLVKLNREDLLRKQRTFDNGSIPHQIHLGELHAILRRQEDFYPFLKDNREKIEKILTFRIPYYVGPLARGNSRFAWMTRKSEETITPWNFEEVVDKGASAQSFIERMTNFDKNLPNEKVLPKHSLLYEYFTVYNELTKVKYVTEGMRKPAFLSGEQKKAIVDLLFKTNRKVTVKQLKEDYFKKIECFDSVEISGVEDRFNASLGTYHDLLKIIKDKDFLDNEENEDILEDIVLTLTLFEDREMIEERLKTYAHLFDDKVMKQLKRRRYTGWGRLSRKLINGIRDKQSGKTILDFLKSDGFANRNFMQLIHDDSLTFKEDIQKAQVSGQGDSLHEHIANLAGSPAIKKGILQTVKVVDELVKVMGRHKPENIVIEMARENQTTQKGQKNSRERMKRIEEGIKELGSQILKEHPVENTQLQNEKLYLYYLQNGRDMYVDQELDINRLSDYDVDHIVPQSFLKDDSIDNKVLTRSDKARGKSDNVPSEEVVKKMKNYWRQLLNAKLITQRKFDNLTKAERGGLSELDKAGFIKRQLVETRQITKHVAQILDSRMNTKYDENDKLIREVKVITLKSKLVSDFRKDFQFYKVREINNYHHAHDAYLNAVVGTALIKKYPKLESEFVYGDYKVYDVRKMIAKSEQEIGKATAKYFFYSNIMNFFKTEITLANGEIRKRPLIETNGETGEIVWDKGRDFATVRKVLSMPQVNIVKKTEVQTGGFSKESILPKRNSDKLIARKKDWDPKKYGGFDSPTVAYSVLVVAKVEKGKSKKLKSVKELLGITIMERSSFEKNPIDFLEAKGYKEVKKDLIIKLPKYSLFELENGRKRMLASAGELQKGNELALPSKYVNFLYLASHYEKLKGSPEDNEQKQLFVEQHKHYLDEIIEQISEFSKRVILADANLDKVLSAYNKHRDKPIREQAENIIHLFTLTNLGAPAAFKYFDTTIDRKRYTSTKEVLDATLIHQSITGLYETRIDLSQLGGDGGGGGGGSEAAAKGGVLNLEEEYRLHEKPVPSSIDPSWLQLFPTVWAERAGMGLANQVPPVVVELRSGASPVAVRQYPMSKEAREGIRPHIQRFLDLGVLVPCQSPWNTPLLPVKKPGTNDYRPVQDLREINKRVQDIHPTVPNPYNLLSSLPPSHTWYSVLDLKDAFFCLKLHPNSQPLFAFEWRDPEKGNTGQLTWTRLPQGFKNSPTLFDEALHRDLAPFRALNPQVVLLQYVDDLLVAAPTYRDCKEGTQKLLQELSKLGYRVSAKKAQLCQKEVTYLGYLLKEGKRWLTPARKATVMKIPPPTTPRQVREFLGTAGFCRLWIPGFASLAAPLYPLTKESIPFIWTEEHQKAFDRIKEALLSAPALALPDLTKPFTLYVDERAGVARGVLTQTLGPWRRPVAYLSKKLDPVASGWPTCLKAVAAVALLLKDADKLTLGQNVTVIASHSLESIVRQPPDRWMTNARMTHYQSLLLNERVSFAPPAVLNPATLLPVESEATPVHRCSEILAEETGTRRDLKDQPLPGVPAWYTDGSSFIAEGKRRAGAAIVDGKRTVWASSLPEGTSAQKAELVALTQALRLAEGKDINIYTDSRYAFATAHIHGAIYKQRGLLTSAGKDIKNKEEILALLEAIHLPKRVAIIHCPGHQKGNDPVATGNRRADEAAKQAALSTRVLAETTKPAGKRTADGSEFEKRTADGSEFESPKKKAKVE

SEQ ID NO: 799 - protein, 2108 aa, synthetic construct
MPAAKRVKLDGGDKKYSIGLDIGTNSVGWAVITDEYKVPSKKFKVLGNTDRHSIKKNLIGALLFDSGETAEATRLKRTARRRYTRRKNRICYLQEIFSNEMAKVDDSFFHRLEESFLVEEDKKHERHPIFGNIVDEVAYHEKYPTIYHLRKKLVDSTDKADLRLIYLALAHMIKFRGHFLIEGDLNPDNSDVDKLFIQLVQTYNQLFEENPINASGVDAKAILSARLSKSRRLENLIAQLPGEKKNGLFGNLIALSLGLTPNFKSNFDLAEDAKLQLSKDTYDDDLDNLLAQIGDQYADLFLAAKNLSDAILLSDILRVNTEITKAPLSASMIKRYDEHHQDLTLLKALVRQQLPEKYKEIFFDQSKNGYAGYIDGGASQEEFYKFIKPILEKMDGTEELLVKLNREDLLRKQRTFDNGSIPHQIHLGELHAILRRQEDFYPFLKDNREKIEKILTFRIPYYVGPLARGNSRFAWMTRKSEETITPWNFEEVVDKGASAQSFIERMTNFDKNLPNEKVLPKHSLLYEYFTVYNELTKVKYVTEGMRKPAFLSGEQKKAIVDLLFKTNRKVTVKQLKEDYFKKIECFDSVEISGVEDRFNASLGTYHDLLKIIKDKDFLDNEENEDILEDIVLTLTLFEDREMIEERLKTYAHLFDDKVMKQLKRRRYTGWGRLSRKLINGIRDKQSGKTILDFLKSDGFANRNFMQLIHDDSLTFKEDIQKAQVSGQGDSLHEHIANLAGSPAIKKGILQTVKVVDELVKVMGRHKPENIVIEMARENQTTQKGQKNSRERMKRIEEGIKELGSQILKEHPVENTQLQNEKLYLYYLQNGRDMYVDQELDINRLSDYDVDHIVPQSFLKDDSIDNKVLTRSDKARGKSDNVPSEEVVKKMKNYWRQLLNAKLITQRKFDNLTKAERGGLSELDKAGFIKRQLVETRQITKHVAQILDSRMNTKYDENDKLIREVKVITLKSKLVSDFRKDFQFYKVREINNYHHAHDAYLNAVVGTALIKKYPKLESEFVYGDYKVYDVRKMIAKSEQEIGKATAKYFFYSNIMNFFKTEITLANGEIRKRPLIETNGETGEIVWDKGRDFATVRKVLSMPQVNIVKKTEVQTGGFSKESILPKRNSDKLIARKKDWDPKKYGGFDSPTVAYSVLVVAKVEKGKSKKLKSVKELLGITIMERSSFEKNPIDFLEAKGYKEVKKDLIIKLPKYSLFELENGRKRMLASAGELQKGNELALPSKYVNFLYLASHYEKLKGSPEDNEQKQLFVEQHKHYLDEIIEQISEFSKRVILADANLDKVLSAYNKHRDKPIREQAENIIHLFTLTNLGAPAAFKYFDTTIDRKRYTSTKEVLDATLIHQSITGLYETRIDLSQLGGDGGEAAAKEAAAKEAAAKEAAAKEAAAKGGVLNLEEEYRLHEKPVPSSIDPSWLQLFPTVWAERAGMGLANQVPPVVVELRSGASPVAVRQYPMSKEAREGIRPHIQRFLDLGVLVPCQSPWNTPLLPVKKPGTNDYRPVQDLREINKRVQDIHPTVPNPYNLLSSLPPSHTWYSVLDLKDAFFCLKLHPNSQPLFAFEWRDPEKGNTGQLTWTRLPQGFKNSPTLFNEALHRDLAPFRALNPQVVLLQYVDDLLVAAPTYRDCKEGTQKLLQELSKLGYRVSAKKAQLCQKEVTYLGYLLKEGKRWLTPARKATVMKIPPPTTPRQVREFLGTAGFCRLWIPGFASLAAPLYPLTKPSIPFIWTEEHQKAFDRIKEALLSAPALALPDLTKPFTLYVDERAGVARGVLTQTLGPWRRPVAYLSKKLDPVASGWPTCLKAVAAVALLLKDADKLTLGQNVTVIASHSLESIVRQPPDRWMTNARMTHYQSLLLNERVSFAPPAVLNPATLLPVESEATPVHRCSEILAEETGTRRDLKDQPLPGVPAWYTDGSSFIAEGKRRAGAAIVDGKRTVWASSLPEGTSAQKAELVALTQALRLAEGKDINIYTDSRYAFATAHIHGAIYKQRGWLTSAGKDIKNKEEILALLEAIHLPKRVAIIHCPGHQKGNDPVATGNRRADEAAKQAALSTRVLAETTKPAGKRTADGSEFEKRTADGSEFESPKKKAKVE

SEQ ID NO: 800 - protein, 2094 aa, synthetic construct
MPAAKRVKLDGGDKKYSIGLDIGTNSVGWAVITDEYKVPSKKFKVLGNTDRHSIKKNLIGALLFDSGETAEATRLKRTARRRYTRRKNRICYLQEIFSNEMAKVDDSFFHRLEESFLVEEDKKHERHPIFGNIVDEVAYHEKYPTIYHLRKKLVDSTDKADLRLIYLALAHMIKFRGHFLIEGDLNPDNSDVDKLFIQLVQTYNQLFEENPINASGVDAKAILSARLSKSRRLENLIAQLPGEKKNGLFGNLIALSLGLTPNFKSNFDLAEDAKLQLSKDTYDDDLDNLLAQIGDQYADLFLAAKNLSDAILLSDILRVNTEITKAPLSASMIKRYDEHHQDLTLLKALVRQQLPEKYKEIFFDQSKNGYAGYIDGGASQEEFYKFIKPILEKMDGTEELLVKLNREDLLRKQRTFDNGSIPHQIHLGELHAILRRQEDFYPFLKDNREKIEKILTFRIPYYVGPLARGNSRFAWMTRKSEETITPWNFEEVVDKGASAQSFIERMTNFDKNLPNEKVLPKHSLLYEYFTVYNELTKVKYVTEGMRKPAFLSGEQKKAIVDLLFKTNRKVTVKQLKEDYFKKIECFDSVEISGVEDRFNASLGTYHDLLKIIKDKDFLDNEENEDILEDIVLTLTLFEDREMIEERLKTYAHLFDDKVMKQLKRRRYTGWGRLSRKLINGIRDKQSGKTILDFLKSDGFANRNFMQLIHDDSLTFKEDIQKAQVSGQGDSLHEHIANLAGSPAIKKGILQTVKVVDELVKVMGRHKPENIVIEMARENQTTQKGQKNSRERMKRIEEGIKELGSQILKEHPVENTQLQNEKLYLYYLQNGRDMYVDQELDINRLSDYDVDHIVPQSFLKDDSIDNKVLTRSDKARGKSDNVPSEEVVKKMKNYWRQLLNAKLITQRKFDNLTKAERGGLSELDKAGFIKRQLVETRQITKHVAQILDSRMNTKYDENDKLIREVKVITLKSKLVSDFRKDFQFYKVREINNYHHAHDAYLNAVVGTALIKKYPKLESEFVYGDYKVYDVRKMIAKSEQEIGKATAKYFFYSNIMNFFKTEITLANGEIRKRPLIETNGETGEIVWDKGRDFATVRKVLSMPQVNIVKKTEVQTGGFSKESILPKRNSDKLIARKKDWDPKKYGGFDSPTVAYSVLVVAKVEKGKSKKLKSVKELLGITIMERSSFEKNPIDFLEAKGYKEVKKDLIIKLPKYSLFELENGRKRMLASAGELQKGNELALPSKYVNFLYLASHYEKLKGSPEDNEQKQLFVEQHKHYLDEIIEQISEFSKRVILADANLDKVLSAYNKHRDKPIREQAENIIHLFTLTNLGAPAAFKYFDTTIDRKRYTSTKEVLDATLIHQSITGLYETRIDLSQLGGDGGGGGGGSEAAAKGGVLNLEEEYRLHEKPVPSSIDPSWLQLFPTVWAERAGMGLANQVPPVVVELRSGASPVAVRQYPMSKEAREGIRPHIQRFLDLGVLVPCQSPWNTPLLPVKKPGTNDYRPVQDLREINKRVQDIHPTVPNPYNLLSSLPPSHTWYSVLDLKDAFFCLKLHPNSQPLFAFEWRDPEKGNTGQLTWTRLPQGFKNSPTLFNEALHRDLAPFRALNPQVVLLQYVDDLLVAAPTYRDCKEGTQKLLQELSKLGYRVSAKKAQLCQKEVTYLGYLLKEGKRWLTPARKATVMKIPPPTTPRQVREFLGTAGFCRLWIPGFASLAAPLYPLTKPSIPFIWTEEHQKAFDRIKEALLSAPALALPDLTKPFTLYVDERAGVARGVLTQTLGPWRRPVAYLSKKLDPVASGWPTCLKAVAAVALLLKDADKLTLGQNVTVIASHSLESIVRQPPDRWMTNARMTHYQSLLLNERVSFAPPAVLNPATLLPVESEATPVHRCSEILAEETGTRRDLKDQPLPGVPAWYTDGSSFIAEGKRRAGAAIVDGKRTVWASSLPEGTSAQKAELVALTQALRLAEGKDINIYTDSRYAFATAHIHGAIYKQRGWLTSAGKDIKNKEEILALLEAIHLPKRVAIIHCPGHQKGNDPVATGNRRADEAAKQAALSTRVLAETTKPAGKRTADGSEFEKRTADGSEFESPKKKAKVE

SEQ ID NO: 801 - protein, 2129 aa, synthetic construct
MPAAKRVKLDGGDKKYSIGLDIGTNSVGWAVITDEYKVPSKKFKVLGNTDRHSIKKNLIGALLFDSGETAEATRLKRTARRRYTRRKNRICYLQEIFSNEMAKVDDSFFHRLEESFLVEEDKKHERHPIFGNIVDEVAYHEKYPTIYHLRKKLVDSTDKADLRLIYLALAHMIKFRGHFLIEGDLNPDNSDVDKLFIQLVQTYNQLFEENPINASGVDAKAILSARLSKSRRLENLIAQLPGEKKNGLFGNLIALSLGLTPNFKSNFDLAEDAKLQLSKDTYDDDLDNLLAQIGDQYADLFLAAKNLSDAILLSDILRVNTEITKAPLSASMIKRYDEHHQDLTLLKALVRQQLPEKYKEIFFDQSKNGYAGYIDGGASQEEFYKFIKPILEKMDGTEELLVKLNREDLLRKQRTFDNGSIPHQIHLGELHAILRRQEDFYPFLKDNREKIEKILTFRIPYYVGPLARGNSRFAWMTRKSEETITPWNFEEVVDKGASAQSFIERMTNFDKNLPNEKVLPKHSLLYEYFTVYNELTKVKYVTEGMRKPAFLSGEQKKAIVDLLFKTNRKVTVKQLKEDYFKKIECFDSVEISGVEDRFNASLGTYHDLLKIIKDKDFLDNEENEDILEDIVLTLTLFEDREMIEERLKTYAHLFDDKVMKQLKRRRYTGWGRLSRKLINGIRDKQSGKTILDFLKSDGFANRNFMQLIHDDSLTFKEDIQKAQVSGQGDSLHEHIANLAGSPAIKKGILQTVKVVDELVKVMGRHKPENIVIEMARENQTTQKGQKNSRERMKRIEEGIKELGSQILKEHPVENTQLQNEKLYLYYLQNGRDMYVDQELDINRLSDYDVDHIVPQSFLKDDSIDNKVLTRSDKARGKSDNVPSEEVVKKMKNYWRQLLNAKLITQRKFDNLTKAERGGLSELDKAGFIKRQLVETRQITKHVAQILDSRMNTKYDENDKLIREVKVITLKSKLVSDFRKDFQFYKVREINNYHHAHDAYLNAVVGTALIKKYPKLESEFVYGDYKVYDVRKMIAKSEQEIGKATAKYFFYSNIMNFFKTEITLANGEIRKRPLIETNGETGEIVWDKGRDFATVRKVLSMPQVNIVKKTEVQTGGFSKESILPKRNSDKLIARKKDWDPKKYGGFDSPTVAYSVLVVAKVEKGKSKKLKSVKELLGITIMERSSFEKNPIDFLEAKGYKEVKKDLIIKLPKYSLFELENGRKRMLASAGELQKGNELALPSKYVNFLYLASHYEKLKGSPEDNEQKQLFVEQHKHYLDEIIEQISEFSKRVILADANLDKVLSAYNKHRDKPIREQAENIIHLFTLTNLGAPAAFKYFDTTIDRKRYTSTKEVLDATLIHQSITGLYETRIDLSQLGGDGGAEAAAKEAAAKEAAAKEAAAKALEAEAAAKEAAAKEAAAKEAAAKAGGVLNLEEEYRLHEKPVPSSIDPSWLQLFPTVWAERAGMGLANQVPPVVVELRSGASPVAVRQYPMSKEAREGIRPHIQRFLDLGVLVPCQSPWNTPLLPVKKPGTNDYRPVQDLREINKRVQDIHPTVPNPYNLLSSLPPSHTWYSVLDLKDAFFCLKLHPNSQPLFAFEWRDPEKGNTGQLTWTRLPQGFKNSPTLFNEALHRDLAPFRALNPQVVLLQYVDDLLVAAPTYRDCKEGTQKLLQELSKLGYRVSAKKAQLCQKEVTYLGYLLKEGKRWLTPARKATVMKIPPPTTPRQVREFLGTAGFCRLWIPGFASLAAPLYPLTKPSIPFIWTEEHQKAFDRIKEALLSAPALALPDLTKPFTLYVDERAGVARGVLTQTLGPWRRPVAYLSKKLDPVASGWPTCLKAVAAVALLLKDADKLTLGQNVTVIASHSLESIVRQPPDRWMTNARMTHYQSLLLNERVSFAPPAVLNPATLLPVESEATPVHRCSEILAEETGTRRDLKDQPLPGVPAWYTDGSSFIAEGKRRAGAAIVDGKRTVWASSLPEGTSAQKAELVALTQALRLAEGKDINIYTDSRYAFATAHIHGAIYKQRGWLTSAGKDIKNKEEILALLEAIHLPKRVAIIHCPGHQKGNDPVATGNRRADEAAKQAALSTRVLAETTKPAGKRTADGSEFEKRTADGSEFESPKKKAKVE

SEQ ID NO: 802 - protein, 2090 aa, synthetic construct
MPAAKRVKLDGGDKKYSIGLDIGTNSVGWAVITDEYKVPSKKFKVLGNTDRHSIKKNLIGALLFDSGETAEATRLKRTARRRYTRRKNRICYLQEIFSNEMAKVDDSFFHRLEESFLVEEDKKHERHPIFGNIVDEVAYHEKYPTIYHLRKKLVDSTDKADLRLIYLALAHMIKFRGHFLIEGDLNPDNSDVDKLFIQLVQTYNQLFEENPINASGVDAKAILSARLSKSRRLENLIAQLPGEKKNGLFGNLIALSLGLTPNFKSNFDLAEDAKLQLSKDTYDDDLDNLLAQIGDQYADLFLAAKNLSDAILLSDILRVNTEITKAPLSASMIKRYDEHHQDLTLLKALVRQQLPEKYKEIFFDQSKNGYAGYIDGGASQEEFYKFIKPILEKMDGTEELLVKLNREDLLRKQRTFDNGSIPHQIHLGELHAILRRQEDFYPFLKDNREKIEKILTFRIPYYVGPLARGNSRFAWMTRKSEETITPWNFEEVVDKGASAQSFIERMTNFDKNLPNEKVLPKHSLLYEYFTVYNELTKVKYVTEGMRKPAFLSGEQKKAIVDLLFKTNRKVTVKQLKEDYFKKIECFDSVEISGVEDRFNASLGTYHDLLKIIKDKDFLDNEENEDILEDIVLTLTLFEDREMIEERLKTYAHLFDDKVMKQLKRRRYTGWGRLSRKLINGIRDKQSGKTILDFLKSDGFANRNFMQLIHDDSLTFKEDIQKAQVSGQGDSLHEHIANLAGSPAIKKGILQTVKVVDELVKVMGRHKPENIVIEMARENQTTQKGQKNSRERMKRIEEGIKELGSQILKEHPVENTQLQNEKLYLYYLQNGRDMYVDQELDINRLSDYDVDHIVPQSFLKDDSIDNKVLTRSDKARGKSDNVPSEEVVKKMKNYWRQLLNAKLITQRKFDNLTKAERGGLSELDKAGFIKRQLVETRQITKHVAQILDSRMNTKYDENDKLIREVKVITLKSKLVSDFRKDFQFYKVREINNYHHAHDAYLNAVVGTALIKKYPKLESEFVYGDYKVYDVRKMIAKSEQEIGKATAKYFFYSNIMNFFKTEITLANGEIRKRPLIETNGETGEIVWDKGRDFATVRKVLSMPQVNIVKKTEVQTGGFSKESILPKRNSDKLIARKKDWDPKKYGGFDSPTVAYSVLVVAKVEKGKSKKLKSVKELLGITIMERSSFEKNPIDFLEAKGYKEVKKDLIIKLPKYSLFELENGRKRMLASAGELQKGNELALPSKYVNFLYLASHYEKLKGSPEDNEQKQLFVEQHKHYLDEIIEQISEFSKRVILADANLDKVLSAYNKHRDKPIREQAENIIHLFTLTNLGAPAAFKYFDTTIDRKRYTSTKEVLDATLIHQSITGLYETRIDLSQLGGDGGGGGGGGGGGVLNLEEEYRLHEKPVPSSIDPSWLQLFPTVWAERAGMGLANQVPPVVVELRSGASPVAVRQYPMSKEAREGIRPHIQRFLDLGVLVPCQSPWNTPLLPVKKPGTNDYRPVQDLREINKRVQDIHPTVPNPYNLLSSLPPSHTWYSVLDLKDAFFCLKLHPNSQPLFAFEWRDPEKGNTGQLTWTRLPQGFKNSPTLFNEALHRDLAPFRALNPQVVLLQYVDDLLVAAPTYRDCKEGTQKLLQELSKLGYRVSAKKAQLCQKEVTYLGYLLKEGKRWLTPARKATVMKIPPPTTPRQVREFLGTAGFCRLWIPGFASLAAPLYPLTKPSIPFIWTEEHQKAFDRIKEALLSAPALALPDLTKPFTLYVDERAGVARGVLTQTLGPWRRPVAYLSKKLDPVASGWPTCLKAVAAVALLLKDADKLTLGQNVTVIASHSLESIVRQPPDRWMTNARMTHYQSLLLNERVSFAPPAVLNPATLLPVESEATPVHRCSEILAEETGTRRDLKDQPLPGVPAWYTDGSSFIAEGKRRAGAAIVDGKRTVWASSLPEGTSAQKAELVALTQALRLAEGKDINIYTDSRYAFATAHIHGAIYKQRGWLTSAGKDIKNKEEILALLEAIHLPKRVAIIHCPGHQKGNDPVATGNRRADEAAKQAALSTRVLAETTKPAGKRTADGSEFEKRTADGSEFESPKKKAKVE

SEQ ID NO: 803 - protein, 2086 aa, synthetic construct
MPAAKRVKLDGGDKKYSIGLDIGTNSVGWAVITDEYKVPSKKFKVLGNTDRHSIKKNLIGALLFDSGETAEATRLKRTARRRYTRRKNRICYLQEIFSNEMAKVDDSFFHRLEESFLVEEDKKHERHPIFGNIVDEVAYHEKYPTIYHLRKKLVDSTDKADLRLIYLALAHMIKFRGHFLIEGDLNPDNSDVDKLFIQLVQTYNQLFEENPINASGVDAKAILSARLSKSRRLENLIAQLPGEKKNGLFGNLIALSLGLTPNFKSNFDLAEDAKLQLSKDTYDDDLDNLLAQIGDQYADLFLAAKNLSDAILLSDILRVNTEITKAPLSASMIKRYDEHHQDLTLLKALVRQQLPEKYKEIFFDQSKNGYAGYIDGGASQEEFYKFIKPILEKMDGTEELLVKLNREDLLRKQRTFDNGSIPHQIHLGELHAILRRQEDFYPFLKDNREKIEKILTFRIPYYVGPLARGNSRFAWMTRKSEETITPWNFEEVVDKGASAQSFIERMTNFDKNLPNEKVLPKHSLLYEYFTVYNELTKVKYVTEGMRKPAFLSGEQKKAIVDLLFKTNRKVTVKQLKEDYFKKIECFDSVEISGVEDRFNASLGTYHDLLKIIKDKDFLDNEENEDILEDIVLTLTLFEDREMIEERLKTYAHLFDDKVMKQLKRRRYTGWGRLSRKLINGIRDKQSGKTILDFLKSDGFANRNFMQLIHDDSLTFKEDIQKAQVSGQGDSLHEHIANLAGSPAIKKGILQTVKVVDELVKVMGRHKPENIVIEMARENQTTQKGQKNSRERMKRIEEGIKELGSQILKEHPVENTQLQNEKLYLYYLQNGRDMYVDQELDINRLSDYDVDHIVPQSFLKDDSIDNKVLTRSDKARGKSDNVPSEEVVKKMKNYWRQLLNAKLITQRKFDNLTKAERGGLSELDKAGFIKRQLVETRQITKHVAQILDSRMNTKYDENDKLIREVKVITLKSKLVSDFRKDFQFYKVREINNYHHAHDAYLNAVVGTALIKKYPKLESEFVYGDYKVYDVRKMIAKSEQEIGKATAKYFFYSNIMNFFKTEITLANGEIRKRPLIETNGETGEIVWDKGRDFATVRKVLSMPQVNIVKKTEVQTGGFSKESILPKRNSDKLIARKKDWDPKKYGGFDSPTVAYSVLVVAKVEKGKSKKLKSVKELLGITIMERSSFEKNPIDFLEAKGYKEVKKDLIIKLPKYSLFELENGRKRMLASAGELQKGNELALPSKYVNFLYLASHYEKLKGSPEDNEQKQLFVEQHKHYLDEIIEQISEFSKRVILADANLDKVLSAYNKHRDKPIREQAENIIHLFTLTNLGAPAAFKYFDTTIDRKRYTSTKEVLDATLIHQSITGLYETRIDLSQLGGDGGGSSGGVLNLEEEYRLHEKPVPSSIDPSWLQLFPTVWAERAGMGLANQVPPVVVELRSGASPVAVRQYPMSKEAREGIRPHIQRFLDLGVLVPCQSPWNTPLLPVKKPGTNDYRPVQDLREINKRVQDIHPTVPNPYNLLSSLPPSHTWYSVLDLKDAFFCLKLHPNSQPLFAFEWRDPEKGNTGQLTWTRLPQGFKNSPTLFNEALHRDLAPFRALNPQVVLLQYVDDLLVAAPTYRDCKEGTQKLLQELSKLGYRVSAKKAQLCQKEVTYLGYLLKEGKRWLTPARKATVMKIPPPTTPRQVREFLGTAGFCRLWIPGFASLAAPLYPLTKPSIPFIWTEEHQKAFDRIKEALLSAPALALPDLTKPFTLYVDERAGVARGVLTQTLGPWRRPVAYLSKKLDPVASGWPTCLKAVAAVALLLKDADKLTLGQNVTVIASHSLESIVRQPPDRWMTNARMTHYQSLLLNERVSFAPPAVLNPATLLPVESEATPVHRCSEILAEETGTRRDLKDQPLPGVPAWYTDGSSFIAEGKRRAGAAIVDGKRTVWASSLPEGTSAQKAELVALTQALRLAEGKDINIYTDSRYAFATAHIHGAIYKQRGWLTSAGKDIKNKEEILALLEAIHLPKRVAIIHCPGHQKGNDPVATGNRRADEAAKQAALSTRVLAETTKPAGKRTADGSEFEKRTADGSEFESPKKKAKVE

SEQ ID NO: 804 - protein, 2092 aa, synthetic construct
MPAAKRVKLDGGDKKYSIGLDIGTNSVGWAVITDEYKVPSKKFKVLGNTDRHSIKKNLIGALLFDSGETAEATRLKRTARRRYTRRKNRICYLQEIFSNEMAKVDDSFFHRLEESFLVEEDKKHERHPIFGNIVDEVAYHEKYPTIYHLRKKLVDSTDKADLRLIYLALAHMIKFRGHFLIEGDLNPDNSDVDKLFIQLVQTYNQLFEENPINASGVDAKAILSARLSKSRRLENLIAQLPGEKKNGLFGNLIALSLGLTPNFKSNFDLAEDAKLQLSKDTYDDDLDNLLAQIGDQYADLFLAAKNLSDAILLSDILRVNTEITKAPLSASMIKRYDEHHQDLTLLKALVRQQLPEKYKEIFFDQSKNGYAGYIDGGASQEEFYKFIKPILEKMDGTEELLVKLNREDLLRKQRTFDNGSIPHQIHLGELHAILRRQEDFYPFLKDNREKIEKILTFRIPYYVGPLARGNSRFAWMTRKSEETITPWNFEEVVDKGASAQSFIERMTNFDKNLPNEKVLPKHSLLYEYFTVYNELTKVKYVTEGMRKPAFLSGEQKKAIVDLLFKTNRKVTVKQLKEDYFKKIECFDSVEISGVEDRFNASLGTYHDLLKIIKDKDFLDNEENEDILEDIVLTLTLFEDREMIEERLKTYAHLFDDKVMKQLKRRRYTGWGRLSRKLINGIRDKQSGKTILDFLKSDGFANRNFMQLIHDDSLTFKEDIQKAQVSGQGDSLHEHIANLAGSPAIKKGILQTVKVVDELVKVMGRHKPENIVIEMARENQTTQKGQKNSRERMKRIEEGIKELGSQILKEHPVENTQLQNEKLYLYYLQNGRDMYVDQELDINRLSDYDVDHIVPQSFLKDDSIDNKVLTRSDKARGKSDNVPSEEVVKKMKNYWRQLLNAKLITQRKFDNLTKAERGGLSELDKAGFIKRQLVETRQITKHVAQILDSRMNTKYDENDKLIREVKVITLKSKLVSDFRKDFQFYKVREINNYHHAHDAYLNAVVGTALIKKYPKLESEFVYGDYKVYDVRKMIAKSEQEIGKATAKYFFYSNIMNFFKTEITLANGEIRKRPLIETNGETGEIVWDKGRDFATVRKVLSMPQVNIVKKTEVQTGGFSKESILPKRNSDKLIARKKDWDPKKYGGFDSPTVAYSVLVVAKVEKGKSKKLKSVKELLGITIMERSSFEKNPIDFLEAKGYKEVKKDLIIKLPKYSLFELENGRKRMLASAGELQKGNELALPSKYVNFLYLASHYEKLKGSPEDNEQKQLFVEQHKHYLDEIIEQISEFSKRVILADANLDKVLSAYNKHRDKPIREQAENIIHLFTLTNLGAPAAFKYFDTTIDRKRYTSTKEVLDATLIHQSITGLYETRIDLSQLGGDGGGGGGSSGGSGGVLNLEEEYRLHEKPVPSSIDPSWLQLFPTVWAERAGMGLANQVPPVVVELRSGASPVAVRQYPMSKEAREGIRPHIQRFLDLGVLVPCQSPWNTPLLPVKKPGTNDYRPVQDLREINKRVQDIHPTVPNPYNLLSSLPPSHTWYSVLDLKDAFFCLKLHPNSQPLFAFEWRDPEKGNTGQLTWTRLPQGFKNSPTLFNEALHRDLAPFRALNPQVVLLQYVDDLLVAAPTYRDCKEGTQKLLQELSKLGYRVSAKKAQLCQKEVTYLGYLLKEGKRWLTPARKATVMKIPPPTTPRQVREFLGTAGFCRLWIPGFASLAAPLYPLTKPSIPFIWTEEHQKAFDRIKEALLSAPALALPDLTKPFTLYVDERAGVARGVLTQTLGPWRRPVAYLSKKLDPVASGWPTCLKAVAAVALLLKDADKLTLGQNVTVIASHSLESIVRQPPDRWMTNARMTHYQSLLLNERVSFAPPAVLNPATLLPVESEATPVHRCSEILAEETGTRRDLKDQPLPGVPAWYTDGSSFIAEGKRRAGAAIVDGKRTVWASSLPEGTSAQKAELVALTQALRLAEGKDINIYTDSRYAFATAHIHGAIYKQRGWLTSAGKDIKNKEEILALLEAIHLPKRVAIIHCPGHQKGNDPVATGNRRADEAAKQAALSTRVLAETTKPAGKRTADGSEFEKRTADGSEFESPKKKAKVE

SEQ ID NO: 805 - protein, 2089 aa, synthetic construct
MPAAKRVKLDGGDKKYSIGLDIGTNSVGWAVITDEYKVPSKKFKVLGNTDRHSIKKNLIGALLFDSGETAEATRLKRTARRRYTRRKNRICYLQEIFSNEMAKVDDSFFHRLEESFLVEEDKKHERHPIFGNIVDEVAYHEKYPTIYHLRKKLVDSTDKADLRLIYLALAHMIKFRGHFLIEGDLNPDNSDVDKLFIQLVQTYNQLFEENPINASGVDAKAILSARLSKSRRLENLIAQLPGEKKNGLFGNLIALSLGLTPNFKSNFDLAEDAKLQLSKDTYDDDLDNLLAQIGDQYADLFLAAKNLSDAILLSDILRVNTEITKAPLSASMIKRYDEHHQDLTLLKALVRQQLPEKYKEIFFDQSKNGYAGYIDGGASQEEFYKFIKPILEKMDGTEELLVKLNREDLLRKQRTFDNGSIPHQIHLGELHAILRRQEDFYPFLKDNREKIEKILTFRIPYYVGPLARGNSRFAWMTRKSEETITPWNFEEVVDKGASAQSFIERMTNFDKNLPNEKVLPKHSLLYEYFTVYNELTKVKYVTEGMRKPAFLSGEQKKAIVDLLFKTNRKVTVKQLKEDYFKKIECFDSVEISGVEDRFNASLGTYHDLLKIIKDKDFLDNEENEDILEDIVLTLTLFEDREMIEERLKTYAHLFDDKVMKQLKRRRYTGWGRLSRKLINGIRDKQSGKTILDFLKSDGFANRNFMQLIHDDSLTFKEDIQKAQVSGQGDSLHEHIANLAGSPAIKKGILQTVKVVDELVKVMGRHKPENIVIEMARENQTTQKGQKNSRERMKRIEEGIKELGSQILKEHPVENTQLQNEKLYLYYLQNGRDMYVDQELDINRLSDYDVDHIVPQSFLKDDSIDNKVLTRSDKARGKSDNVPSEEVVKKMKNYWRQLLNAKLITQRKFDNLTKAERGGLSELDKAGFIKRQLVETRQITKHVAQILDSRMNTKYDENDKLIREVKVITLKSKLVSDFRKDFQFYKVREINNYHHAHDAYLNAVVGTALIKKYPKLESEFVYGDYKVYDVRKMIAKSEQEIGKATAKYFFYSNIMNFFKTEITLANGEIRKRPLIETNGETGEIVWDKGRDFATVRKVLSMPQVNIVKKTEVQTGGFSKESILPKRNSDKLIARKKDWDPKKYGGFDSPTVAYSVLVVAKVEKGKSKKLKSVKELLGITIMERSSFEKNPIDFLEAKGYKEVKKDLIIKLPKYSLFELENGRKRMLASAGELQKGNELALPSKYVNFLYLASHYEKLKGSPEDNEQKQLFVEQHKHYLDEIIEQISEFSKRVILADANLDKVLSAYNKHRDKPIREQAENIIHLFTLTNLGAPAAFKYFDTTIDRKRYTSTKEVLDATLIHQSITGLYETRIDLSQLGGDGGGGGGGGGGVLNLEEEYRLHEKPVPSSIDPSWLQLFPTVWAERAGMGLANQVPPVVVELRSGASPVAVRQYPMSKEAREGIRPHIQRFLDLGVLVPCQSPWNTPLLPVKKPGTNDYRPVQDLREINKRVQDIHPTVPNPYNLLSSLPPSHTWYSVLDLKDAFFCLKLHPNSQPLFAFEWRDPEKGNTGQLTWTRLPQGFKNSPTLFNEALHRDLAPFRALNPQVVLLQYVDDLLVAAPTYRDCKEGTQKLLQELSKLGYRVSAKKAQLCQKEVTYLGYLLKEGKRWLTPARKATVMKIPPPTTPRQVREFLGTAGFCRLWIPGFASLAAPLYPLTKPSIPFIWTEEHQKAFDRIKEALLSAPALALPDLTKPFTLYVDERAGVARGVLTQTLGPWRRPVAYLSKKLDPVASGWPTCLKAVAAVALLLKDADKLTLGQNVTVIASHSLESIVRQPPDRWMTNARMTHYQSLLLNERVSFAPPAVLNPATLLPVESEATPVHRCSEILAEETGTRRDLKDQPLPGVPAWYTDGSSFIAEGKRRAGAAIVDGKRTVWASSLPEGTSAQKAELVALTQALRLAEGKDINIYTDSRYAFATAHIHGAIYKQRGWLTSAGKDIKNKEEILALLEAIHLPKRVAIIHCPGHQKGNDPVATGNRRADEAAKQAALSTRVLAETTKPAGKRTADGSEFEKRTADGSEFESPKKKAKVE

SEQ ID NO: 806 - protein, 2099 aa, synthetic construct
MPAAKRVKLDGGDKKYSIGLDIGTNSVGWAVITDEYKVPSKKFKVLGNTDRHSIKKNLIGALLFDSGETAEATRLKRTARRRYTRRKNRICYLQEIFSNEMAKVDDSFFHRLEESFLVEEDKKHERHPIFGNIVDEVAYHEKYPTIYHLRKKLVDSTDKADLRLIYLALAHMIKFRGHFLIEGDLNPDNSDVDKLFIQLVQTYNQLFEENPINASGVDAKAILSARLSKSRRLENLIAQLPGEKKNGLFGNLIALSLGLTPNFKSNFDLAEDAKLQLSKDTYDDDLDNLLAQIGDQYADLFLAAKNLSDAILLSDILRVNTEITKAPLSASMIKRYDEHHQDLTLLKALVRQQLPEKYKEIFFDQSKNGYAGYIDGGASQEEFYKFIKPILEKMDGTEELLVKLNREDLLRKQRTFDNGSIPHQIHLGELHAILRRQEDFYPFLKDNREKIEKILTFRIPYYVGPLARGNSRFAWMTRKSEETITPWNFEEVVDKGASAQSFIERMTNFDKNLPNEKVLPKHSLLYEYFTVYNELTKVKYVTEGMRKPAFLSGEQKKAIVDLLFKTNRKVTVKQLKEDYFKKIECFDSVEISGVEDRFNASLGTYHDLLKIIKDKDFLDNEENEDILEDIVLTLTLFEDREMIEERLKTYAHLFDDKVMKQLKRRRYTGWGRLSRKLINGIRDKQSGKTILDFLKSDGFANRNFMQLIHDDSLTFKEDIQKAQVSGQGDSLHEHIANLAGSPAIKKGILQTVKVVDELVKVMGRHKPENIVIEMARENQTTQKGQKNSRERMKRIEEGIKELGSQILKEHPVENTQLQNEKLYLYYLQNGRDMYVDQELDINRLSDYDVDHIVPQSFLKDDSIDNKVLTRSDKARGKSDNVPSEEVVKKMKNYWRQLLNAKLITQRKFDNLTKAERGGLSELDKAGFIKRQLVETRQITKHVAQILDSRMNTKYDENDKLIREVKVITLKSKLVSDFRKDFQFYKVREINNYHHAHDAYLNAVVGTALIKKYPKLESEFVYGDYKVYDVRKMIAKSEQEIGKATAKYFFYSNIMNFFKTEITLANGEIRKRPLIETNGETGEIVWDKGRDFATVRKVLSMPQVNIVKKTEVQTGGFSKESILPKRNSDKLIARKKDWDPKKYGGFDSPTVAYSVLVVAKVEKGKSKKLKSVKELLGITIMERSSFEKNPIDFLEAKGYKEVKKDLIIKLPKYSLFELENGRKRMLASAGELQKGNELALPSKYVNFLYLASHYEKLKGSPEDNEQKQLFVEQHKHYLDEIIEQISEFSKRVILADANLDKVLSAYNKHRDKPIREQAENIIHLFTLTNLGAPAAFKYFDTTIDRKRYTSTKEVLDATLIHQSITGLYETRIDLSQLGGDGGSGSETPGTSESATPESGGVLNLEEEYRLHEKPVPSSIDPSWLQLFPTVWAERAGMGLANQVPPVVVELRSGASPVAVRQYPMSKEAREGIRPHIQRFLDLGVLVPCQSPWNTPLLPVKKPGTNDYRPVQDLREINKRVQDIHPTVPNPYNLLSSLPPSHTWYSVLDLKDAFFCLKLHPNSQPLFAFEWRDPEKGNTGQLTWTRLPQGFKNSPTLFNEALHRDLAPFRALNPQVVLLQYVDDLLVAAPTYRDCKEGTQKLLQELSKLGYRVSAKKAQLCQKEVTYLGYLLKEGKRWLTPARKATVMKIPPPTTPRQVREFLGTAGFCRLWIPGFASLAAPLYPLTKPSIPFIWTEEHQKAFDRIKEALLSAPALALPDLTKPFTLYVDERAGVARGVLTQTLGPWRRPVAYLSKKLDPVASGWPTCLKAVAAVALLLKDADKLTLGQNVTVIASHSLESIVRQPPDRWMTNARMTHYQSLLLNERVSFAPPAVLNPATLLPVESEATPVHRCSEILAEETGTRRDLKDQPLPGVPAWYTDGSSFIAEGKRRAGAAIVDGKRTVWASSLPEGTSAQKAELVALTQALRLAEGKDINIYTDSRYAFATAHIHGAIYKQRGWLTSAGKDIKNKEEILALLEAIHLPKRVAIIHCPGHQKGNDPVATGNRRADEAAKQAALSTRVLAETTKPAGKRTADGSEFEKRTADGSEFESPKKKAKVE

SEQ ID NO: 807 - protein, 2094 aa, synthetic construct
MPAAKRVKLDGGDKKYSIGLDIGTNSVGWAVITDEYKVPSKKFKVLGNTDRHSIKKNLIGALLFDSGETAEATRLKRTARRRYTRRKNRICYLQEIFSNEMAKVDDSFFHRLEESFLVEEDKKHERHPIFGNIVDEVAYHEKYPTIYHLRKKLVDSTDKADLRLIYLALAHMIKFRGHFLIEGDLNPDNSDVDKLFIQLVQTYNQLFEENPINASGVDAKAILSARLSKSRRLENLIAQLPGEKKNGLFGNLIALSLGLTPNFKSNFDLAEDAKLQLSKDTYDDDLDNLLAQIGDQYADLFLAAKNLSDAILLSDILRVNTEITKAPLSASMIKRYDEHHQDLTLLKALVRQQLPEKYKEIFFDQSKNGYAGYIDGGASQEEFYKFIKPILEKMDGTEELLVKLNREDLLRKQRTFDNGSIPHQIHLGELHAILRRQEDFYPFLKDNREKIEKILTFRIPYYVGPLARGNSRFAWMTRKSEETITPWNFEEVVDKGASAQSFIERMTNFDKNLPNEKVLPKHSLLYEYFTVYNELTKVKYVTEGMRKPAFLSGEQKKAIVDLLFKTNRKVTVKQLKEDYFKKIECFDSVEISGVEDRFNASLGTYHDLLKIIKDKDFLDNEENEDILEDIVLTLTLFEDREMIEERLKTYAHLFDDKVMKQLKRRRYTGWGRLSRKLINGIRDKQSGKTILDFLKSDGFANRNFMQLIHDDSLTFKEDIQKAQVSGQGDSLHEHIANLAGSPAIKKGILQTVKVVDELVKVMGRHKPENIVIEMARENQTTQKGQKNSRERMKRIEEGIKELGSQILKEHPVENTQLQNEKLYLYYLQNGRDMYVDQELDINRLSDYDVDHIVPQSFLKDDSIDNKVLTRSDKARGKSDNVPSEEVVKKMKNYWRQLLNAKLITQRKFDNLTKAERGGLSELDKAGFIKRQLVETRQITKHVAQILDSRMNTKYDENDKLIREVKVITLKSKLVSDFRKDFQFYKVREINNYHHAHDAYLNAVVGTALIKKYPKLESEFVYGDYKVYDVRKMIAKSEQEIGKATAKYFFYSNIMNFFKTEITLANGEIRKRPLIETNGETGEIVWDKGRDFATVRKVLSMPQVNIVKKTEVQTGGFSKESILPKRNSDKLIARKKDWDPKKYGGFDSPTVAYSVLVVAKVEKGKSKKLKSVKELLGITIMERSSFEKNPIDFLEAKGYKEVKKDLIIKLPKYSLFELENGRKRMLASAGELQKGNELALPSKYVNFLYLASHYEKLKGSPEDNEQKQLFVEQHKHYLDEIIEQISEFSKRVILADANLDKVLSAYNKHRDKPIREQAENIIHLFTLTNLGAPAAFKYFDTTIDRKRYTSTKEVLDATLIHQSITGLYETRIDLSQLGGDGGGGGGSSEAAAKGGVLNLEEEYRLHEKPVPSSIDPSWLQLFPTVWAERAGMGLANQVPPVVVELRSGASPVAVRQYPMSKEAREGIRPHIQRFLDLGVLVPCQSPWNTPLLPVKKPGTNDYRPVQDLREINKRVQDIHPTVPNPYNLLSSLPPSHTWYSVLDLKDAFFCLKLHPNSQPLFAFEWRDPEKGNTGQLTWTRLPQGFKNSPTLFNEALHRDLAPFRALNPQVVLLQYVDDLLVAAPTYRDCKEGTQKLLQELSKLGYRVSAKKAQLCQKEVTYLGYLLKEGKRWLTPARKATVMKIPPPTTPRQVREFLGTAGFCRLWIPGFASLAAPLYPLTKPSIPFIWTEEHQKAFDRIKEALLSAPALALPDLTKPFTLYVDERAGVARGVLTQTLGPWRRPVAYLSKKLDPVASGWPTCLKAVAAVALLLKDADKLTLGQNVTVIASHSLESIVRQPPDRWMTNARMTHYQSLLLNERVSFAPPAVLNPATLLPVESEATPVHRCSEILAEETGTRRDLKDQPLPGVPAWYTDGSSFIAEGKRRAGAAIVDGKRTVWASSLPEGTSAQKAELVALTQALRLAEGKDINIYTDSRYAFATAHIHGAIYKQRGWLTSAGKDIKNKEEILALLEAIHLPKRVAIIHCPGHQKGNDPVATGNRRADEAAKQAALSTRVLAETTKPAGKRTADGSEFEKRTADGSEFESPKKKAKVE

SEQ ID NO: 808 - protein, 2093 aa, synthetic construct
MPAAKRVKLDGGDKKYSIGLDIGTNSVGWAVITDEYKVPSKKFKVLGNTDRHSIKKNLIGALLFDSGETAEATRLKRTARRRYTRRKNRICYLQEIFSNEMAKVDDSFFHRLEESFLVEEDKKHERHPIFGNIVDEVAYHEKYPTIYHLRKKLVDSTDKADLRLIYLALAHMIKFRGHFLIEGDLNPDNSDVDKLFIQLVQTYNQLFEENPINASGVDAKAILSARLSKSRRLENLIAQLPGEKKNGLFGNLIALSLGLTPNFKSNFDLAEDAKLQLSKDTYDDDLDNLLAQIGDQYADLFLAAKNLSDAILLSDILRVNTEITKAPLSASMIKRYDEHHQDLTLLKALVRQQLPEKYKEIFFDQSKNGYAGYIDGGASQEEFYKFIKPILEKMDGTEELLVKLNREDLLRKQRTFDNGSIPHQIHLGELHAILRRQEDFYPFLKDNREKIEKILTFRIPYYVGPLARGNSRFAWMTRKSEETITPWNFEEVVDKGASAQSFIERMTNFDKNLPNEKVLPKHSLLYEYFTVYNELTKVKYVTEGMRKPAFLSGEQKKAIVDLLFKTNRKVTVKQLKEDYFKKIECFDSVEISGVEDRFNASLGTYHDLLKIIKDKDFLDNEENEDILEDIVLTLTLFEDREMIEERLKTYAHLFDDKVMKQLKRRRYTGWGRLSRKLINGIRDKQSGKTILDFLKSDGFANRNFMQLIHDDSLTFKEDIQKAQVSGQGDSLHEHIANLAGSPAIKKGILQTVKVVDELVKVMGRHKPENIVIEMARENQTTQKGQKNSRERMKRIEEGIKELGSQILKEHPVENTQLQNEKLYLYYLQNGRDMYVDQELDINRLSDYDVDHIVPQSFLKDDSIDNKVLTRSDKARGKSDNVPSEEVVKKMKNYWRQLLNAKLITQRKFDNLTKAERGGLSELDKAGFIKRQLVETRQITKHVAQILDSRMNTKYDENDKLIREVKVITLKSKLVSDFRKDFQFYKVREINNYHHAHDAYLNAVVGTALIKKYPKLESEFVYGDYKVYDVRKMIAKSEQEIGKATAKYFFYSNIMNFFKTEITLANGEIRKRPLIETNGETGEIVWDKGRDFATVRKVLSMPQVNIVKKTEVQTGGFSKESILPKRNSDKLIARKKDWDPKKYGGFDSPTVAYSVLVVAKVEKGKSKKLKSVKELLGITIMERSSFEKNPIDFLEAKGYKEVKKDLIIKLPKYSLFELENGRKRMLASAGELQKGNELALPSKYVNFLYLASHYEKLKGSPEDNEQKQLFVEQHKHYLDEIIEQISEFSKRVILADANLDKVLSAYNKHRDKPIREQAENIIHLFTLTNLGAPAAFKYFDTTIDRKRYTSTKEVLDATLIHQSITGLYETRIDLSQLGGDGGGGGGSGGGGSGGVLNLEEEYRLHEKPVPSSIDPSWLQLFPTVWAERAGMGLANQVPPVVVELRSGASPVAVRQYPMSKEAREGIRPHIQRFLDLGVLVPCQSPWNTPLLPVKKPGTNDYRPVQDLREINKRVQDIHPTVPNPYNLLSSLPPSHTWYSVLDLKDAFFCLKLHPNSQPLFAFEWRDPEKGNTGQLTWTRLPQGFKNSPTLFNEALHRDLAPFRALNPQVVLLQYVDDLLVAAPTYRDCKEGTQKLLQELSKLGYRVSAKKAQLCQKEVTYLGYLLKEGKRWLTPARKATVMKIPPPTTPRQVREFLGTAGFCRLWIPGFASLAAPLYPLTKPSIPFIWTEEHQKAFDRIKEALLSAPALALPDLTKPFTLYVDERAGVARGVLTQTLGPWRRPVAYLSKKLDPVASGWPTCLKAVAAVALLLKDADKLTLGQNVTVIASHSLESIVRQPPDRWMTNARMTHYQSLLLNERVSFAPPAVLNPATLLPVESEATPVHRCSEILAEETGTRRDLKDQPLPGVPAWYTDGSSFIAEGKRRAGAAIVDGKRTVWASSLPEGTSAQKAELVALTQALRLAEGKDINIYTDSRYAFATAHIHGAIYKQRGWLTSAGKDIKNKEEILALLEAIHLPKRVAIIHCPGHQKGNDPVATGNRRADEAAKQAALSTRVLAETTKPAGKRTADGSEFEKRTADGSEFESPKKKAKVE

SEQ ID NO: 809 - protein, 2094 aa, synthetic construct
MPAAKRVKLDGGDKKYSIGLDIGTNSVGWAVITDEYKVPSKKFKVLGNTDRHSIKKNLIGALLFDSGETAEATRLKRTARRRYTRRKNRICYLQEIFSNEMAKVDDSFFHRLEESFLVEEDKKHERHPIFGNIVDEVAYHEKYPTIYHLRKKLVDSTDKADLRLIYLALAHMIKFRGHFLIEGDLNPDNSDVDKLFIQLVQTYNQLFEENPINASGVDAKAILSARLSKSRRLENLIAQLPGEKKNGLFGNLIALSLGLTPNFKSNFDLAEDAKLQLSKDTYDDDLDNLLAQIGDQYADLFLAAKNLSDAILLSDILRVNTEITKAPLSASMIKRYDEHHQDLTLLKALVRQQLPEKYKEIFFDQSKNGYAGYIDGGASQEEFYKFIKPILEKMDGTEELLVKLNREDLLRKQRTFDNGSIPHQIHLGELHAILRRQEDFYPFLKDNREKIEKILTFRIPYYVGPLARGNSRFAWMTRKSEETITPWNFEEVVDKGASAQSFIERMTNFDKNLPNEKVLPKHSLLYEYFTVYNELTKVKYVTEGMRKPAFLSGEQKKAIVDLLFKTNRKVTVKQLKEDYFKKIECFDSVEISGVEDRFNASLGTYHDLLKIIKDKDFLDNEENEDILEDIVLTLTLFEDREMIEERLKTYAHLFDDKVMKQLKRRRYTGWGRLSRKLINGIRDKQSGKTILDFLKSDGFANRNFMQLIHDDSLTFKEDIQKAQVSGQGDSLHEHIANLAGSPAIKKGILQTVKVVDELVKVMGRHKPENIVIEMARENQTTQKGQKNSRERMKRIEEGIKELGSQILKEHPVENTQLQNEKLYLYYLQNGRDMYVDQELDINRLSDYDVDHIVPQSFLKDDSIDNKVLTRSDKARGKSDNVPSEEVVKKMKNYWRQLLNAKLITQRKFDNLTKAERGGLSELDKAGFIKRQLVETRQITKHVAQILDSRMNTKYDENDKLIREVKVITLKSKLVSDFRKDFQFYKVREINNYHHAHDAYLNAVVGTALIKKYPKLESEFVYGDYKVYDVRKMIAKSEQEIGKATAKYFFYSNIMNFFKTEITLANGEIRKRPLIETNGETGEIVWDKGRDFATVRKVLSMPQVNIVKKTEVQTGGFSKESILPKRNSDKLIARKKDWDPKKYGGFDSPTVAYSVLVVAKVEKGKSKKLKSVKELLGITIMERSSFEKNPIDFLEAKGYKEVKKDLIIKLPKYSLFELENGRKRMLASAGELQKGNELALPSKYVNFLYLASHYEKLKGSPEDNEQKQLFVEQHKHYLDEIIEQISEFSKRVILADANLDKVLSAYNKHRDKPIREQAENIIHLFTLTNLGAPAAFKYFDTTIDRKRYTSTKEVLDATLIHQSITGLYETRIDLSQLGGDGGGSSGGSEAAAKGGVLNLEEEYRLHEKPVPSSIDPSWLQLFPTVWAERAGMGLANQVPPVVVELRSGASPVAVRQYPMSKEAREGIRPHIQRFLDLGVLVPCQSPWNTPLLPVKKPGTNDYRPVQDLREINKRVQDIHPTVPNPYNLLSSLPPSHTWYSVLDLKDAFFCLKLHPNSQPLFAFEWRDPEKGNTGQLTWTRLPQGFKNSPTLFNEALHRDLAPFRALNPQVVLLQYVDDLLVAAPTYRDCKEGTQKLLQELSKLGYRVSAKKAQLCQKEVTYLGYLLKEGKRWLTPARKATVMKIPPPTTPRQVREFLGTAGFCRLWIPGFASLAAPLYPLTKPSIPFIWTEEHQKAFDRIKEALLSAPALALPDLTKPFTLYVDERAGVARGVLTQTLGPWRRPVAYLSKKLDPVASGWPTCLKAVAAVALLLKDADKLTLGQNVTVIASHSLESIVRQPPDRWMTNARMTHYQSLLLNERVSFAPPAVLNPATLLPVESEATPVHRCSEILAEETGTRRDLKDQPLPGVPAWYTDGSSFIAEGKRRAGAAIVDGKRTVWASSLPEGTSAQKAELVALTQALRLAEGKDINIYTDSRYAFATAHIHGAIYKQRGWLTSAGKDIKNKEEILALLEAIHLPKRVAIIHCPGHQKGNDPVATGNRRADEAAKQAALSTRVLAETTKPAGKRTADGSEFEKRTADGSEFESPKKKAKVE

SEQ ID NO: 810 - protein, 2089 aa, synthetic construct
MPAAKRVKLDGGDKKYSIGLDIGTNSVGWAVITDEYKVPSKKFKVLGNTDRHSIKKNLIGALLFDSGETAEATRLKRTARRRYTRRKNRICYLQEIFSNEMAKVDDSFFHRLEESFLVEEDKKHERHPIFGNIVDEVAYHEKYPTIYHLRKKLVDSTDKADLRLIYLALAHMIKFRGHFLIEGDLNPDNSDVDKLFIQLVQTYNQLFEENPINASGVDAKAILSARLSKSRRLENLIAQLPGEKKNGLFGNLIALSLGLTPNFKSNFDLAEDAKLQLSKDTYDDDLDNLLAQIGDQYADLFLAAKNLSDAILLSDILRVNTEITKAPLSASMIKRYDEHHQDLTLLKALVRQQLPEKYKEIFFDQSKNGYAGYIDGGASQEEFYKFIKPILEKMDGTEELLVKLNREDLLRKQRTFDNGSIPHQIHLGELHAILRRQEDFYPFLKDNREKIEKILTFRIPYYVGPLARGNSRFAWMTRKSEETITPWNFEEVVDKGASAQSFIERMTNFDKNLPNEKVLPKHSLLYEYFTVYNELTKVKYVTEGMRKPAFLSGEQKKAIVDLLFKTNRKVTVKQLKEDYFKKIECFDSVEISGVEDRFNASLGTYHDLLKIIKDKDFLDNEENEDILEDIVLTLTLFEDREMIEERLKTYAHLFDDKVMKQLKRRRYTGWGRLSRKLINGIRDKQSGKTILDFLKSDGFANRNFMQLIHDDSLTFKEDIQKAQVSGQGDSLHEHIANLAGSPAIKKGILQTVKVVDELVKVMGRHKPENIVIEMARENQTTQKGQKNSRERMKRIEEGIKELGSQILKEHPVENTQLQNEKLYLYYLQNGRDMYVDQELDINRLSDYDVDHIVPQSFLKDDSIDNKVLTRSDKARGKSDNVPSEEVVKKMKNYWRQLLNAKLITQRKFDNLTKAERGGLSELDKAGFIKRQLVETRQITKHVAQILDSRMNTKYDENDKLIREVKVITLKSKLVSDFRKDFQFYKVREINNYHHAHDAYLNAVVGTALIKKYPKLESEFVYGDYKVYDVRKMIAKSEQEIGKATAKYFFYSNIMNFFKTEITLANGEIRKRPLIETNGETGEIVWDKGRDFATVRKVLSMPQVNIVKKTEVQTGGFSKESILPKRNSDKLIARKKDWDPKKYGGFDSPTVAYSVLVVAKVEKGKSKKLKSVKELLGITIMERSSFEKNPIDFLEAKGYKEVKKDLIIKLPKYSLFELENGRKRMLASAGELQKGNELALPSKYVNFLYLASHYEKLKGSPEDNEQKQLFVEQHKHYLDEIIEQISEFSKRVILADANLDKVLSAYNKHRDKPIREQAENIIHLFTLTNLGAPAAFKYFDTTIDRKRYTSTKEVLDATLIHQSITGLYETRIDLSQLGGDGGPAPGGGGGVLNLEEEYRLHEKPVPSSIDPSWLQLFPTVWAERAGMGLANQVPPVVVELRSGASPVAVRQYPMSKEAREGIRPHIQRFLDLGVLVPCQSPWNTPLLPVKKPGTNDYRPVQDLREINKRVQDIHPTVPNPYNLLSSLPPSHTWYSVLDLKDAFFCLKLHPNSQPLFAFEWRDPEKGNTGQLTWTRLPQGFKNSPTLFNEALHRDLAPFRALNPQVVLLQYVDDLLVAAPTYRDCKEGTQKLLQELSKLGYRVSAKKAQLCQKEVTYLGYLLKEGKRWLTPARKATVMKIPPPTTPRQVREFLGTAGFCRLWIPGFASLAAPLYPLTKPSIPFIWTEEHQKAFDRIKEALLSAPALALPDLTKPFTLYVDERAGVARGVLTQTLGPWRRPVAYLSKKLDPVASGWPTCLKAVAAVALLLKDADKLTLGQNVTVIASHSLESIVRQPPDRWMTNARMTHYQSLLLNERVSFAPPAVLNPATLLPVESEATPVHRCSEILAEETGTRRDLKDQPLPGVPAWYTDGSSFIAEGKRRAGAAIVDGKRTVWASSLPEGTSAQKAELVALTQALRLAEGKDINIYTDSRYAFATAHIHGAIYKQRGWLTSAGKDIKNKEEILALLEAIHLPKRVAIIHCPGHQKGNDPVATGNRRADEAAKQAALSTRVLAETTKPAGKRTADGSEFEKRTADGSEFESPKKKAKVE

SEQ ID NO: 811 - protein, 2094 aa, synthetic construct
MPAAKRVKLDGGDKKYSIGLDIGTNSVGWAVITDEYKVPSKKFKVLGNTDRHSIKKNLIGALLFDSGETAEATRLKRTARRRYTRRKNRICYLQEIFSNEMAKVDDSFFHRLEESFLVEEDKKHERHPIFGNIVDEVAYHEKYPTIYHLRKKLVDSTDKADLRLIYLALAHMIKFRGHFLIEGDLNPDNSDVDKLFIQLVQTYNQLFEENPINASGVDAKAILSARLSKSRRLENLIAQLPGEKKNGLFGNLIALSLGLTPNFKSNFDLAEDAKLQLSKDTYDDDLDNLLAQIGDQYADLFLAAKNLSDAILLSDILRVNTEITKAPLSASMIKRYDEHHQDLTLLKALVRQQLPEKYKEIFFDQSKNGYAGYIDGGASQEEFYKFIKPILEKMDGTEELLVKLNREDLLRKQRTFDNGSIPHQIHLGELHAILRRQEDFYPFLKDNREKIEKILTFRIPYYVGPLARGNSRFAWMTRKSEETITPWNFEEVVDKGASAQSFIERMTNFDKNLPNEKVLPKHSLLYEYFTVYNELTKVKYVTEGMRKPAFLSGEQKKAIVDLLFKTNRKVTVKQLKEDYFKKIECFDSVEISGVEDRFNASLGTYHDLLKIIKDKDFLDNEENEDILEDIVLTLTLFEDREMIEERLKTYAHLFDDKVMKQLKRRRYTGWGRLSRKLINGIRDKQSGKTILDFLKSDGFANRNFMQLIHDDSLTFKEDIQKAQVSGQGDSLHEHIANLAGSPAIKKGILQTVKVVDELVKVMGRHKPENIVIEMARENQTTQKGQKNSRERMKRIEEGIKELGSQILKEHPVENTQLQNEKLYLYYLQNGRDMYVDQELDINRLSDYDVDHIVPQSFLKDDSIDNKVLTRSDKARGKSDNVPSEEVVKKMKNYWRQLLNAKLITQRKFDNLTKAERGGLSELDKAGFIKRQLVETRQITKHVAQILDSRMNTKYDENDKLIREVKVITLKSKLVSDFRKDFQFYKVREINNYHHAHDAYLNAVVGTALIKKYPKLESEFVYGDYKVYDVRKMIAKSEQEIGKATAKYFFYSNIMNFFKTEITLANGEIRKRPLIETNGETGEIVWDKGRDFATVRKVLSMPQVNIVKKTEVQTGGFSKESILPKRNSDKLIARKKDWDPKKYGGFDSPTVAYSVLVVAKVEKGKSKKLKSVKELLGITIMERSSFEKNPIDFLEAKGYKEVKKDLIIKLPKYSLFELENGRKRMLASAGELQKGNELALPSKYVNFLYLASHYEKLKGSPEDNEQKQLFVEQHKHYLDEIIEQISEFSKRVILADANLDKVLSAYNKHRDKPIREQAENIIHLFTLTNLGAPAAFKYFDTTIDRKRYTSTKEVLDATLIHQSITGLYETRIDLSQLGGDGGGGGEAAAKGSSGGVLNLEEEYRLHEKPVPSSIDPSWLQLFPTVWAERAGMGLANQVPPVVVELRSGASPVAVRQYPMSKEAREGIRPHIQRFLDLGVLVPCQSPWNTPLLPVKKPGTNDYRPVQDLREINKRVQDIHPTVPNPYNLLSSLPPSHTWYSVLDLKDAFFCLKLHPNSQPLFAFEWRDPEKGNTGQLTWTRLPQGFKNSPTLFNEALHRDLAPFRALNPQVVLLQYVDDLLVAAPTYRDCKEGTQKLLQELSKLGYRVSAKKAQLCQKEVTYLGYLLKEGKRWLTPARKATVMKIPPPTTPRQVREFLGTAGFCRLWIPGFASLAAPLYPLTKPSIPFIWTEEHQKAFDRIKEALLSAPALALPDLTKPFTLYVDERAGVARGVLTQTLGPWRRPVAYLSKKLDPVASGWPTCLKAVAAVALLLKDADKLTLGQNVTVIASHSLESIVRQPPDRWMTNARMTHYQSLLLNERVSFAPPAVLNPATLLPVESEATPVHRCSEILAEETGTRRDLKDQPLPGVPAWYTDGSSFIAEGKRRAGAAIVDGKRTVWASSLPEGTSAQKAELVALTQALRLAEGKDINIYTDSRYAFATAHIHGAIYKQRGWLTSAGKDIKNKEEILALLEAIHLPKRVAIIHCPGHQKGNDPVATGNRRADEAAKQAALSTRVLAETTKPAGKRTADGSEFEKRTADGSEFESPKKKAKVE

SEQ ID NO: 812 - protein, 2094 aa, synthetic construct
MPAAKRVKLDGGDKKYSIGLDIGTNSVGWAVITDEYKVPSKKFKVLGNTDRHSIKKNLIGALLFDSGETAEATRLKRTARRRYTRRKNRICYLQEIFSNEMAKVDDSFFHRLEESFLVEEDKKHERHPIFGNIVDEVAYHEKYPTIYHLRKKLVDSTDKADLRLIYLALAHMIKFRGHFLIEGDLNPDNSDVDKLFIQLVQTYNQLFEENPINASGVDAKAILSARLSKSRRLENLIAQLPGEKKNGLFGNLIALSLGLTPNFKSNFDLAEDAKLQLSKDTYDDDLDNLLAQIGDQYADLFLAAKNLSDAILLSDILRVNTEITKAPLSASMIKRYDEHHQDLTLLKALVRQQLPEKYKEIFFDQSKNGYAGYIDGGASQEEFYKFIKPILEKMDGTEELLVKLNREDLLRKQRTFDNGSIPHQIHLGELHAILRRQEDFYPFLKDNREKIEKILTFRIPYYVGPLARGNSRFAWMTRKSEETITPWNFEEVVDKGASAQSFIERMTNFDKNLPNEKVLPKHSLLYEYFTVYNELTKVKYVTEGMRKPAFLSGEQKKAIVDLLFKTNRKVTVKQLKEDYFKKIECFDSVEISGVEDRFNASLGTYHDLLKIIKDKDFLDNEENEDILEDIVLTLTLFEDREMIEERLKTYAHLFDDKVMKQLKRRRYTGWGRLSRKLINGIRDKQSGKTILDFLKSDGFANRNFMQLIHDDSLTFKEDIQKAQVSGQGDSLHEHIANLAGSPAIKKGILQTVKVVDELVKVMGRHKPENIVIEMARENQTTQKGQKNSRERMKRIEEGIKELGSQILKEHPVENTQLQNEKLYLYYLQNGRDMYVDQELDINRLSDYDVDHIVPQSFLKDDSIDNKVLTRSDKARGKSDNVPSEEVVKKMKNYWRQLLNAKLITQRKFDNLTKAERGGLSELDKAGFIKRQLVETRQITKHVAQILDSRMNTKYDENDKLIREVKVITLKSKLVSDFRKDFQFYKVREINNYHHAHDAYLNAVVGTALIKKYPKLESEFVYGDYKVYDVRKMIAKSEQEIGKATAKYFFYSNIMNFFKTEITLANGEIRKRPLIETNGETGEIVWDKGRDFATVRKVLSMPQVNIVKKTEVQTGGFSKESILPKRNSDKLIARKKDWDPKKYGGFDSPTVAYSVLVVAKVEKGKSKKLKSVKELLGITIMERSSFEKNPIDFLEAKGYKEVKKDLIIKLPKYSLFELENGRKRMLASAGELQKGNELALPSKYVNFLYLASHYEKLKGSPEDNEQKQLFVEQHKHYLDEIIEQISEFSKRVILADANLDKVLSAYNKHRDKPIREQAENIIHLFTLTNLGAPAAFKYFDTTIDRKRYTSTKEVLDATLIHQSITGLYETRIDLSQLGGDGGEAAAKGSSPAPGGVLNLEEEYRLHEKPVPSSIDPSWLQLFPTVWAERAGMGLANQVPPVVVELRSGASPVAVRQYPMSKEAREGIRPHIQRFLDLGVLVPCQSPWNTPLLPVKKPGTNDYRPVQDLREINKRVQDIHPTVPNPYNLLSSLPPSHTWYSVLDLKDAFFCLKLHPNSQPLFAFEWRDPEKGNTGQLTWTRLPQGFKNSPTLFNEALHRDLAPFRALNPQVVLLQYVDDLLVAAPTYRDCKEGTQKLLQELSKLGYRVSAKKAQLCQKEVTYLGYLLKEGKRWLTPARKATVMKIPPPTTPRQVREFLGTAGFCRLWIPGFASLAAPLYPLTKPSIPFIWTEEHQKAFDRIKEALLSAPALALPDLTKPFTLYVDERAGVARGVLTQTLGPWRRPVAYLSKKLDPVASGWPTCLKAVAAVALLLKDADKLTLGQNVTVIASHSLESIVRQPPDRWMTNARMTHYQSLLLNERVSFAPPAVLNPATLLPVESEATPVHRCSEILAEETGTRRDLKDQPLPGVPAWYTDGSSFIAEGKRRAGAAIVDGKRTVWASSLPEGTSAQKAELVALTQALRLAEGKDINIYTDSRYAFATAHIHGAIYKQRGWLTSAGKDIKNKEEILALLEAIHLPKRVAIIHCPGHQKGNDPVATGNRRADEAAKQAALSTRVLAETTKPAGKRTADGSEFEKRTADGSEFESPKKKAKVE

SEQ ID NO: 813 - protein, 2098 aa, synthetic construct
MPAAKRVKLDGGDKKYSIGLDIGTNSVGWAVITDEYKVPSKKFKVLGNTDRHSIKKNLIGALLFDSGETAEATRLKRTARRRYTRRKNRICYLQEIFSNEMAKVDDSFFHRLEESFLVEEDKKHERHPIFGNIVDEVAYHEKYPTIYHLRKKLVDSTDKADLRLIYLALAHMIKFRGHFLIEGDLNPDNSDVDKLFIQLVQTYNQLFEENPINASGVDAKAILSARLSKSRRLENLIAQLPGEKKNGLFGNLIALSLGLTPNFKSNFDLAEDAKLQLSKDTYDDDLDNLLAQIGDQYADLFLAAKNLSDAILLSDILRVNTEITKAPLSASMIKRYDEHHQDLTLLKALVRQQLPEKYKEIFFDQSKNGYAGYIDGGASQEEFYKFIKPILEKMDGTEELLVKLNREDLLRKQRTFDNGSIPHQIHLGELHAILRRQEDFYPFLKDNREKIEKILTFRIPYYVGPLARGNSRFAWMTRKSEETITPWNFEEVVDKGASAQSFIERMTNFDKNLPNEKVLPKHSLLYEYFTVYNELTKVKYVTEGMRKPAFLSGEQKKAIVDLLFKTNRKVTVKQLKEDYFKKIECFDSVEISGVEDRFNASLGTYHDLLKIIKDKDFLDNEENEDILEDIVLTLTLFEDREMIEERLKTYAHLFDDKVMKQLKRRRYTGWGRLSRKLINGIRDKQSGKTILDFLKSDGFANRNFMQLIHDDSLTFKEDIQKAQVSGQGDSLHEHIANLAGSPAIKKGILQTVKVVDELVKVMGRHKPENIVIEMARENQTTQKGQKNSRERMKRIEEGIKELGSQILKEHPVENTQLQNEKLYLYYLQNGRDMYVDQELDINRLSDYDVDHIVPQSFLKDDSIDNKVLTRSDKARGKSDNVPSEEVVKKMKNYWRQLLNAKLITQRKFDNLTKAERGGLSELDKAGFIKRQLVETRQITKHVAQILDSRMNTKYDENDKLIREVKVITLKSKLVSDFRKDFQFYKVREINNYHHAHDAYLNAVVGTALIKKYPKLESEFVYGDYKVYDVRKMIAKSEQEIGKATAKYFFYSNIMNFFKTEITLANGEIRKRPLIETNGETGEIVWDKGRDFATVRKVLSMPQVNIVKKTEVQTGGFSKESILPKRNSDKLIARKKDWDPKKYGGFDSPTVAYSVLVVAKVEKGKSKKLKSVKELLGITIMERSSFEKNPIDFLEAKGYKEVKKDLIIKLPKYSLFELENGRKRMLASAGELQKGNELALPSKYVNFLYLASHYEKLKGSPEDNEQKQLFVEQHKHYLDEIIEQISEFSKRVILADANLDKVLSAYNKHRDKPIREQAENIIHLFTLTNLGAPAAFKYFDTTIDRKRYTSTKEVLDATLIHQSITGLYETRIDLSQLGGDGGGSSGSSGSSGSSGSSGGVLNLEEEYRLHEKPVPSSIDPSWLQLFPTVWAERAGMGLANQVPPVVVELRSGASPVAVRQYPMSKEAREGIRPHIQRFLDLGVLVPCQSPWNTPLLPVKKPGTNDYRPVQDLREINKRVQDIHPTVPNPYNLLSSLPPSHTWYSVLDLKDAFFCLKLHPNSQPLFAFEWRDPEKGNTGQLTWTRLPQGFKNSPTLFNEALHRDLAPFRALNPQVVLLQYVDDLLVAAPTYRDCKEGTQKLLQELSKLGYRVSAKKAQLCQKEVTYLGYLLKEGKRWLTPARKATVMKIPPPTTPRQVREFLGTAGFCRLWIPGFASLAAPLYPLTKPSIPFIWTEEHQKAFDRIKEALLSAPALALPDLTKPFTLYVDERAGVARGVLTQTLGPWRRPVAYLSKKLDPVASGWPTCLKAVAAVALLLKDADKLTLGQNVTVIASHSLESIVRQPPDRWMTNARMTHYQSLLLNERVSFAPPAVLNPATLLPVESEATPVHRCSEILAEETGTRRDLKDQPLPGVPAWYTDGSSFIAEGKRRAGAAIVDGKRTVWASSLPEGTSAQKAELVALTQALRLAEGKDINIYTDSRYAFATAHIHGAIYKQRGWLTSAGKDIKNKEEILALLEAIHLPKRVAIIHCPGHQKGNDPVATGNRRADEAAKQAALSTRVLAETTKPAGKRTADGSEFEKRTADGSEFESPKKKAKVE

SEQ ID NO: 814 - protein, 2094 aa, synthetic construct
MPAAKRVKLDGGDKKYSIGLDIGTNSVGWAVITDEYKVPSKKFKVLGNTDRHSIKKNLIGALLFDSGETAEATRLKRTARRRYTRRKNRICYLQEIFSNEMAKVDDSFFHRLEESFLVEEDKKHERHPIFGNIVDEVAYHEKYPTIYHLRKKLVDSTDKADLRLIYLALAHMIKFRGHFLIEGDLNPDNSDVDKLFIQLVQTYNQLFEENPINASGVDAKAILSARLSKSRRLENLIAQLPGEKKNGLFGNLIALSLGLTPNFKSNFDLAEDAKLQLSKDTYDDDLDNLLAQIGDQYADLFLAAKNLSDAILLSDILRVNTEITKAPLSASMIKRYDEHHQDLTLLKALVRQQLPEKYKEIFFDQSKNGYAGYIDGGASQEEFYKFIKPILEKMDGTEELLVKLNREDLLRKQRTFDNGSIPHQIHLGELHAILRRQEDFYPFLKDNREKIEKILTFRIPYYVGPLARGNSRFAWMTRKSEETITPWNFEEVVDKGASAQSFIERMTNFDKNLPNEKVLPKHSLLYEYFTVYNELTKVKYVTEGMRKPAFLSGEQKKAIVDLLFKTNRKVTVKQLKEDYFKKIECFDSVEISGVEDRFNASLGTYHDLLKIIKDKDFLDNEENEDILEDIVLTLTLFEDREMIEERLKTYAHLFDDKVMKQLKRRRYTGWGRLSRKLINGIRDKQSGKTILDFLKSDGFANRNFMQLIHDDSLTFKEDIQKAQVSGQGDSLHEHIANLAGSPAIKKGILQTVKVVDELVKVMGRHKPENIVIEMARENQTTQKGQKNSRERMKRIEEGIKELGSQILKEHPVENTQLQNEKLYLYYLQNGRDMYVDQELDINRLSDYDVDHIVPQSFLKDDSIDNKVLTRSDKARGKSDNVPSEEVVKKMKNYWRQLLNAKLITQRKFDNLTKAERGGLSELDKAGFIKRQLVETRQITKHVAQILDSRMNTKYDENDKLIREVKVITLKSKLVSDFRKDFQFYKVREINNYHHAHDAYLNAVVGTALIKKYPKLESEFVYGDYKVYDVRKMIAKSEQEIGKATAKYFFYSNIMNFFKTEITLANGEIRKRPLIETNGETGEIVWDKGRDFATVRKVLSMPQVNIVKKTEVQTGGFSKESILPKRNSDKLIARKKDWDPKKYGGFDSPTVAYSVLVVAKVEKGKSKKLKSVKELLGITIMERSSFEKNPIDFLEAKGYKEVKKDLIIKLPKYSLFELENGRKRMLASAGELQKGNELALPSKYVNFLYLASHYEKLKGSPEDNEQKQLFVEQHKHYLDEIIEQISEFSKRVILADANLDKVLSAYNKHRDKPIREQAENIIHLFTLTNLGAPAAFKYFDTTIDRKRYTSTKEVLDATLIHQSITGLYETRIDLSQLGGDGGPAPAPAPAPAPGGVLNLEEEYRLHEKPVPSSIDPSWLQLFPTVWAERAGMGLANQVPPVVVELRSGASPVAVRQYPMSKEAREGIRPHIQRFLDLGVLVPCQSPWNTPLLPVKKPGTNDYRPVQDLREINKRVQDIHPTVPNPYNLLSSLPPSHTWYSVLDLKDAFFCLKLHPNSQPLFAFEWRDPEKGNTGQLTWTRLPQGFKNSPTLFNEALHRDLAPFRALNPQVVLLQYVDDLLVAAPTYRDCKEGTQKLLQELSKLGYRVSAKKAQLCQKEVTYLGYLLKEGKRWLTPARKATVMKIPPPTTPRQVREFLGTAGFCRLWIPGFASLAAPLYPLTKPSIPFIWTEEHQKAFDRIKEALLSAPALALPDLTKPFTLYVDERAGVARGVLTQTLGPWRRPVAYLSKKLDPVASGWPTCLKAVAAVALLLKDADKLTLGQNVTVIASHSLESIVRQPPDRWMTNARMTHYQSLLLNERVSFAPPAVLNPATLLPVESEATPVHRCSEILAEETGTRRDLKDQPLPGVPAWYTDGSSFIAEGKRRAGAAIVDGKRTVWASSLPEGTSAQKAELVALTQALRLAEGKDINIYTDSRYAFATAHIHGAIYKQRGWLTSAGKDIKNKEEILALLEAIHLPKRVAIIHCPGHQKGNDPVATGNRRADEAAKQAALSTRVLAETTKPAGKRTADGSEFEKRTADGSEFESPKKKAKVE

SEQ ID NO: 815 - protein, 2086 aa, synthetic construct
MPAAKRVKLDGGDKKYSIGLDIGTNSVGWAVITDEYKVPSKKFKVLGNTDRHSIKKNLIGALLFDSGETAEATRLKRTARRRYTRRKNRICYLQEIFSNEMAKVDDSFFHRLEESFLVEEDKKHERHPIFGNIVDEVAYHEKYPTIYHLRKKLVDSTDKADLRLIYLALAHMIKFRGHFLIEGDLNPDNSDVDKLFIQLVQTYNQLFEENPINASGVDAKAILSARLSKSRRLENLIAQLPGEKKNGLFGNLIALSLGLTPNFKSNFDLAEDAKLQLSKDTYDDDLDNLLAQIGDQYADLFLAAKNLSDAILLSDILRVNTEITKAPLSASMIKRYDEHHQDLTLLKALVRQQLPEKYKEIFFDQSKNGYAGYIDGGASQEEFYKFIKPILEKMDGTEELLVKLNREDLLRKQRTFDNGSIPHQIHLGELHAILRRQEDFYPFLKDNREKIEKILTFRIPYYVGPLARGNSRFAWMTRKSEETITPWNFEEVVDKGASAQSFIERMTNFDKNLPNEKVLPKHSLLYEYFTVYNELTKVKYVTEGMRKPAFLSGEQKKAIVDLLFKTNRKVTVKQLKEDYFKKIECFDSVEISGVEDRFNASLGTYHDLLKIIKDKDFLDNEENEDILEDIVLTLTLFEDREMIEERLKTYAHLFDDKVMKQLKRRRYTGWGRLSRKLINGIRDKQSGKTILDFLKSDGFANRNFMQLIHDDSLTFKEDIQKAQVSGQGDSLHEHIANLAGSPAIKKGILQTVKVVDELVKVMGRHKPENIVIEMARENQTTQKGQKNSRERMKRIEEGIKELGSQILKEHPVENTQLQNEKLYLYYLQNGRDMYVDQELDINRLSDYDVDHIVPQSFLKDDSIDNKVLTRSDKARGKSDNVPSEEVVKKMKNYWRQLLNAKLITQRKFDNLTKAERGGLSELDKAGFIKRQLVETRQITKHVAQILDSRMNTKYDENDKLIREVKVITLKSKLVSDFRKDFQFYKVREINNYHHAHDAYLNAVVGTALIKKYPKLESEFVYGDYKVYDVRKMIAKSEQEIGKATAKYFFYSNIMNFFKTEITLANGEIRKRPLIETNGETGEIVWDKGRDFATVRKVLSMPQVNIVKKTEVQTGGFSKESILPKRNSDKLIARKKDWDPKKYGGFDSPTVAYSVLVVAKVEKGKSKKLKSVKELLGITIMERSSFEKNPIDFLEAKGYKEVKKDLIIKLPKYSLFELENGRKRMLASAGELQKGNELALPSKYVNFLYLASHYEKLKGSPEDNEQKQLFVEQHKHYLDEIIEQISEFSKRVILADANLDKVLSAYNKHRDKPIREQAENIIHLFTLTNLGAPAAFKYFDTTIDRKRYTSTKEVLDATLIHQSITGLYETRIDLSQLGGDGGGGGGGVLNLEEEYRLHEKPVPSSIDPSWLQLFPTVWAERAGMGLANQVPPVVVELRSGASPVAVRQYPMSKEAREGIRPHIQRFLDLGVLVPCQSPWNTPLLPVKKPGTNDYRPVQDLREINKRVQDIHPTVPNPYNLLSSLPPSHTWYSVLDLKDAFFCLKLHPNSQPLFAFEWRDPEKGNTGQLTWTRLPQGFKNSPTLFNEALHRDLAPFRALNPQVVLLQYVDDLLVAAPTYRDCKEGTQKLLQELSKLGYRVSAKKAQLCQKEVTYLGYLLKEGKRWLTPARKATVMKIPPPTTPRQVREFLGTAGFCRLWIPGFASLAAPLYPLTKPSIPFIWTEEHQKAFDRIKEALLSAPALALPDLTKPFTLYVDERAGVARGVLTQTLGPWRRPVAYLSKKLDPVASGWPTCLKAVAAVALLLKDADKLTLGQNVTVIASHSLESIVRQPPDRWMTNARMTHYQSLLLNERVSFAPPAVLNPATLLPVESEATPVHRCSEILAEETGTRRDLKDQPLPGVPAWYTDGSSFIAEGKRRAGAAIVDGKRTVWASSLPEGTSAQKAELVALTQALRLAEGKDINIYTDSRYAFATAHIHGAIYKQRGWLTSAGKDIKNKEEILALLEAIHLPKRVAIIHCPGHQKGNDPVATGNRRADEAAKQAALSTRVLAETTKPAGKRTADGSEFEKRTADGSEFESPKKKAKVE

SEQ ID NO: 816 - protein, 2087 aa, synthetic construct
MPAAKRVKLDGGDKKYSIGLDIGTNSVGWAVITDEYKVPSKKFKVLGNTDRHSIKKNLIGALLFDSGETAEATRLKRTARRRYTRRKNRICYLQEIFSNEMAKVDDSFFHRLEESFLVEEDKKHERHPIFGNIVDEVAYHEKYPTIYHLRKKLVDSTDKADLRLIYLALAHMIKFRGHFLIEGDLNPDNSDVDKLFIQLVQTYNQLFEENPINASGVDAKAILSARLSKSRRLENLIAQLPGEKKNGLFGNLIALSLGLTPNFKSNFDLAEDAKLQLSKDTYDDDLDNLLAQIGDQYADLFLAAKNLSDAILLSDILRVNTEITKAPLSASMIKRYDEHHQDLTLLKALVRQQLPEKYKEIFFDQSKNGYAGYIDGGASQEEFYKFIKPILEKMDGTEELLVKLNREDLLRKQRTFDNGSIPHQIHLGELHAILRRQEDFYPFLKDNREKIEKILTFRIPYYVGPLARGNSRFAWMTRKSEETITPWNFEEVVDKGASAQSFIERMTNFDKNLPNEKVLPKHSLLYEYFTVYNELTKVKYVTEGMRKPAFLSGEQKKAIVDLLFKTNRKVTVKQLKEDYFKKIECFDSVEISGVEDRFNASLGTYHDLLKIIKDKDFLDNEENEDILEDIVLTLTLFEDREMIEERLKTYAHLFDDKVMKQLKRRRYTGWGRLSRKLINGIRDKQSGKTILDFLKSDGFANRNFMQLIHDDSLTFKEDIQKAQVSGQGDSLHEHIANLAGSPAIKKGILQTVKVVDELVKVMGRHKPENIVIEMARENQTTQKGQKNSRERMKRIEEGIKELGSQILKEHPVENTQLQNEKLYLYYLQNGRDMYVDQELDINRLSDYDVDHIVPQSFLKDDSIDNKVLTRSDKARGKSDNVPSEEVVKKMKNYWRQLLNAKLITQRKFDNLTKAERGGLSELDKAGFIKRQLVETRQITKHVAQILDSRMNTKYDENDKLIREVKVITLKSKLVSDFRKDFQFYKVREINNYHHAHDAYLNAVVGTALIKKYPKLESEFVYGDYKVYDVRKMIAKSEQEIGKATAKYFFYSNIMNFFKTEITLANGEIRKRPLIETNGETGEIVWDKGRDFATVRKVLSMPQVNIVKKTEVQTGGFSKESILPKRNSDKLIARKKDWDPKKYGGFDSPTVAYSVLVVAKVEKGKSKKLKSVKELLGITIMERSSFEKNPIDFLEAKGYKEVKKDLIIKLPKYSLFELENGRKRMLASAGELQKGNELALPSKYVNFLYLASHYEKLKGSPEDNEQKQLFVEQHKHYLDEIIEQISEFSKRVILADANLDKVLSAYNKHRDKPIREQAENIIHLFTLTNLGAPAAFKYFDTTIDRKRYTSTKEVLDATLIHQSITGLYETRIDLSQLGGDGGGGGGGGVLNLEEEYRLHEKPVPSSIDPSWLQLFPTVWAERAGMGLANQVPPVVVELRSGASPVAVRQYPMSKEAREGIRPHIQRFLDLGVLVPCQSPWNTPLLPVKKPGTNDYRPVQDLREINKRVQDIHPTVPNPYNLLSSLPPSHTWYSVLDLKDAFFCLKLHPNSQPLFAFEWRDPEKGNTGQLTWTRLPQGFKNSPTLFNEALHRDLAPFRALNPQVVLLQYVDDLLVAAPTYRDCKEGTQKLLQELSKLGYRVSAKKAQLCQKEVTYLGYLLKEGKRWLTPARKATVMKIPPPTTPRQVREFLGTAGFCRLWIPGFASLAAPLYPLTKPSIPFIWTEEHQKAFDRIKEALLSAPALALPDLTKPFTLYVDERAGVARGVLTQTLGPWRRPVAYLSKKLDPVASGWPTCLKAVAAVALLLKDADKLTLGQNVTVIASHSLESIVRQPPDRWMTNARMTHYQSLLLNERVSFAPPAVLNPATLLPVESEATPVHRCSEILAEETGTRRDLKDQPLPGVPAWYTDGSSFIAEGKRRAGAAIVDGKRTVWASSLPEGTSAQKAELVALTQALRLAEGKDINIYTDSRYAFATAHIHGAIYKQRGWLTSAGKDIKNKEEILALLEAIHLPKRVAIIHCPGHQKGNDPVATGNRRADEAAKQAALSTRVLAETTKPAGKRTADGSEFEKRTADGSEFESPKKKAKVE

SEQ ID NO: 817 - protein, 2091 aa, synthetic construct
MPAAKRVKLDGGDKKYSIGLDIGTNSVGWAVITDEYKVPSKKFKVLGNTDRHSIKKNLIGALLFDSGETAEATRLKRTARRRYTRRKNRICYLQEIFSNEMAKVDDSFFHRLEESFLVEEDKKHERHPIFGNIVDEVAYHEKYPTIYHLRKKLVDSTDKADLRLIYLALAHMIKFRGHFLIEGDLNPDNSDVDKLFIQLVQTYNQLFEENPINASGVDAKAILSARLSKSRRLENLIAQLPGEKKNGLFGNLIALSLGLTPNFKSNFDLAEDAKLQLSKDTYDDDLDNLLAQIGDQYADLFLAAKNLSDAILLSDILRVNTEITKAPLSASMIKRYDEHHQDLTLLKALVRQQLPEKYKEIFFDQSKNGYAGYIDGGASQEEFYKFIKPILEKMDGTEELLVKLNREDLLRKQRTFDNGSIPHQIHLGELHAILRRQEDFYPFLKDNREKIEKILTFRIPYYVGPLARGNSRFAWMTRKSEETITPWNFEEVVDKGASAQSFIERMTNFDKNLPNEKVLPKHSLLYEYFTVYNELTKVKYVTEGMRKPAFLSGEQKKAIVDLLFKTNRKVTVKQLKEDYFKKIECFDSVEISGVEDRFNASLGTYHDLLKIIKDKDFLDNEENEDILEDIVLTLTLFEDREMIEERLKTYAHLFDDKVMKQLKRRRYTGWGRLSRKLINGIRDKQSGKTILDFLKSDGFANRNFMQLIHDDSLTFKEDIQKAQVSGQGDSLHEHIANLAGSPAIKKGILQTVKVVDELVKVMGRHKPENIVIEMARENQTTQKGQKNSRERMKRIEEGIKELGSQILKEHPVENTQLQNEKLYLYYLQNGRDMYVDQELDINRLSDYDVDHIVPQSFLKDDSIDNKVLTRSDKARGKSDNVPSEEVVKKMKNYWRQLLNAKLITQRKFDNLTKAERGGLSELDKAGFIKRQLVETRQITKHVAQILDSRMNTKYDENDKLIREVKVITLKSKLVSDFRKDFQFYKVREINNYHHAHDAYLNAVVGTALIKKYPKLESEFVYGDYKVYDVRKMIAKSEQEIGKATAKYFFYSNIMNFFKTEITLANGEIRKRPLIETNGETGEIVWDKGRDFATVRKVLSMPQVNIVKKTEVQTGGFSKESILPKRNSDKLIARKKDWDPKKYGGFDSPTVAYSVLVVAKVEKGKSKKLKSVKELLGITIMERSSFEKNPIDFLEAKGYKEVKKDLIIKLPKYSLFELENGRKRMLASAGELQKGNELALPSKYVNFLYLASHYEKLKGSPEDNEQKQLFVEQHKHYLDEIIEQISEFSKRVILADANLDKVLSAYNKHRDKPIREQAENIIHLFTLTNLGAPAAFKYFDTTIDRKRYTSTKEVLDATLIHQSITGLYETRIDLSQLGGDGGEAAAKGGGGGVLNLEEEYRLHEKPVPSSIDPSWLQLFPTVWAERAGMGLANQVPPVVVELRSGASPVAVRQYPMSKEAREGIRPHIQRFLDLGVLVPCQSPWNTPLLPVKKPGTNDYRPVQDLREINKRVQDIHPTVPNPYNLLSSLPPSHTWYSVLDLKDAFFCLKLHPNSQPLFAFEWRDPEKGNTGQLTWTRLPQGFKNSPTLFNEALHRDLAPFRALNPQVVLLQYVDDLLVAAPTYRDCKEGTQKLLQELSKLGYRVSAKKAQLCQKEVTYLGYLLKEGKRWLTPARKATVMKIPPPTTPRQVREFLGTAGFCRLWIPGFASLAAPLYPLTKPSIPFIWTEEHQKAFDRIKEALLSAPALALPDLTKPFTLYVDERAGVARGVLTQTLGPWRRPVAYLSKKLDPVASGWPTCLKAVAAVALLLKDADKLTLGQNVTVIASHSLESIVRQPPDRWMTNARMTHYQSLLLNERVSFAPPAVLNPATLLPVESEATPVHRCSEILAEETGTRRDLKDQPLPGVPAWYTDGSSFIAEGKRRAGAAIVDGKRTVWASSLPEGTSAQKAELVALTQALRLAEGKDINIYTDSRYAFATAHIHGAIYKQRGWLTSAGKDIKNKEEILALLEAIHLPKRVAIIHCPGHQKGNDPVATGNRRADEAAKQAALSTRVLAETTKPAGKRTADGSEFEKRTADGSEFESPKKKAKVE

SEQ ID NO: 818 - protein, 2101 aa, synthetic construct
MPAAKRVKLDGGDKKYSIGLDIGTNSVGWAVITDEYKVPSKKFKVLGNTDRHSIKKNLIGALLFDSGETAEATRLKRTARRRYTRRKNRICYLQEIFSNEMAKVDDSFFHRLEESFLVEEDKKHERHPIFGNIVDEVAYHEKYPTIYHLRKKLVDSTDKADLRLIYLALAHMIKFRGHFLIEGDLNPDNSDVDKLFIQLVQTYNQLFEENPINASGVDAKAILSARLSKSRRLENLIAQLPGEKKNGLFGNLIALSLGLTPNFKSNFDLAEDAKLQLSKDTYDDDLDNLLAQIGDQYADLFLAAKNLSDAILLSDILRVNTEITKAPLSASMIKRYDEHHQDLTLLKALVRQQLPEKYKEIFFDQSKNGYAGYIDGGASQEEFYKFIKPILEKMDGTEELLVKLNREDLLRKQRTFDNGSIPHQIHLGELHAILRRQEDFYPFLKDNREKIEKILTFRIPYYVGPLARGNSRFAWMTRKSEETITPWNFEEVVDKGASAQSFIERMTNFDKNLPNEKVLPKHSLLYEYFTVYNELTKVKYVTEGMRKPAFLSGEQKKAIVDLLFKTNRKVTVKQLKEDYFKKIECFDSVEISGVEDRFNASLGTYHDLLKIIKDKDFLDNEENEDILEDIVLTLTLFEDREMIEERLKTYAHLFDDKVMKQLKRRRYTGWGRLSRKLINGIRDKQSGKTILDFLKSDGFANRNFMQLIHDDSLTFKEDIQKAQVSGQGDSLHEHIANLAGSPAIKKGILQTVKVVDELVKVMGRHKPENIVIEMARENQTTQKGQKNSRERMKRIEEGIKELGSQILKEHPVENTQLQNEKLYLYYLQNGRDMYVDQELDINRLSDYDVDHIVPQSFLKDDSIDNKVLTRSDKARGKSDNVPSEEVVKKMKNYWRQLLNAKLITQRKFDNLTKAERGGLSELDKAGFIKRQLVETRQITKHVAQILDSRMNTKYDENDKLIREVKVITLKSKLVSDFRKDFQFYKVREINNYHHAHDAYLNAVVGTALIKKYPKLESEFVYGDYKVYDVRKMIAKSEQEIGKATAKYFFYSNIMNFFKTEITLANGEIRKRPLIETNGETGEIVWDKGRDFATVRKVLSMPQVNIVKKTEVQTGGFSKESILPKRNSDKLIARKKDWDPKKYGGFDSPTVAYSVLVVAKVEKGKSKKLKSVKELLGITIMERSSFEKNPIDFLEAKGYKEVKKDLIIKLPKYSLFELENGRKRMLASAGELQKGNELALPSKYVNFLYLASHYEKLKGSPEDNEQKQLFVEQHKHYLDEIIEQISEFSKRVILADANLDKVLSAYNKHRDKPIREQAENIIHLFTLTNLGAPAAFKYFDTTIDRKRYTSTKEVLDATLIHQSITGLYETRIDLSQLGGDGGGSSGSSGSSGSSGSSGSSGGVLNLEEEYRLHEKPVPSSIDPSWLQLFPTVWAERAGMGLANQVPPVVVELRSGASPVAVRQYPMSKEAREGIRPHIQRFLDLGVLVPCQSPWNTPLLPVKKPGTNDYRPVQDLREINKRVQDIHPTVPNPYNLLSSLPPSHTWYSVLDLKDAFFCLKLHPNSQPLFAFEWRDPEKGNTGQLTWTRLPQGFKNSPTLFNEALHRDLAPFRALNPQVVLLQYVDDLLVAAPTYRDCKEGTQKLLQELSKLGYRVSAKKAQLCQKEVTYLGYLLKEGKRWLTPARKATVMKIPPPTTPRQVREFLGTAGFCRLWIPGFASLAAPLYPLTKPSIPFIWTEEHQKAFDRIKEALLSAPALALPDLTKPFTLYVDERAGVARGVLTQTLGPWRRPVAYLSKKLDPVASGWPTCLKAVAAVALLLKDADKLTLGQNVTVIASHSLESIVRQPPDRWMTNARMTHYQSLLLNERVSFAPPAVLNPATLLPVESEATPVHRCSEILAEETGTRRDLKDQPLPGVPAWYTDGSSFIAEGKRRAGAAIVDGKRTVWASSLPEGTSAQKAELVALTQALRLAEGKDINIYTDSRYAFATAHIHGAIYKQRGWLTSAGKDIKNKEEILALLEAIHLPKRVAIIHCPGHQKGNDPVATGNRRADEAAKQAALSTRVLAETTKPAGKRTADGSEFEKRTADGSEFESPKKKAKVE

SEQ ID NO: 819 - protein, 2091 aa, synthetic construct
MPAAKRVKLDGGDKKYSIGLDIGTNSVGWAVITDEYKVPSKKFKVLGNTDRHSIKKNLIGALLFDSGETAEATRLKRTARRRYTRRKNRICYLQEIFSNEMAKVDDSFFHRLEESFLVEEDKKHERHPIFGNIVDEVAYHEKYPTIYHLRKKLVDSTDKADLRLIYLALAHMIKFRGHFLIEGDLNPDNSDVDKLFIQLVQTYNQLFEENPINASGVDAKAILSARLSKSRRLENLIAQLPGEKKNGLFGNLIALSLGLTPNFKSNFDLAEDAKLQLSKDTYDDDLDNLLAQIGDQYADLFLAAKNLSDAILLSDILRVNTEITKAPLSASMIKRYDEHHQDLTLLKALVRQQLPEKYKEIFFDQSKNGYAGYIDGGASQEEFYKFIKPILEKMDGTEELLVKLNREDLLRKQRTFDNGSIPHQIHLGELHAILRRQEDFYPFLKDNREKIEKILTFRIPYYVGPLARGNSRFAWMTRKSEETITPWNFEEVVDKGASAQSFIERMTNFDKNLPNEKVLPKHSLLYEYFTVYNELTKVKYVTEGMRKPAFLSGEQKKAIVDLLFKTNRKVTVKQLKEDYFKKIECFDSVEISGVEDRFNASLGTYHDLLKIIKDKDFLDNEENEDILEDIVLTLTLFEDREMIEERLKTYAHLFDDKVMKQLKRRRYTGWGRLSRKLINGIRDKQSGKTILDFLKSDGFANRNFMQLIHDDSLTFKEDIQKAQVSGQGDSLHEHIANLAGSPAIKKGILQTVKVVDELVKVMGRHKPENIVIEMARENQTTQKGQKNSRERMKRIEEGIKELGSQILKEHPVENTQLQNEKLYLYYLQNGRDMYVDQELDINRLSDYDVDHIVPQSFLKDDSIDNKVLTRSDKARGKSDNVPSEEVVKKMKNYWRQLLNAKLITQRKFDNLTKAERGGLSELDKAGFIKRQLVETRQITKHVAQILDSRMNTKYDENDKLIREVKVITLKSKLVSDFRKDFQFYKVREINNYHHAHDAYLNAVVGTALIKKYPKLESEFVYGDYKVYDVRKMIAKSEQEIGKATAKYFFYSNIMNFFKTEITLANGEIRKRPLIETNGETGEIVWDKGRDFATVRKVLSMPQVNIVKKTEVQTGGFSKESILPKRNSDKLIARKKDWDPKKYGGFDSPTVAYSVLVVAKVEKGKSKKLKSVKELLGITIMERSSFEKNPIDFLEAKGYKEVKKDLIIKLPKYSLFELENGRKRMLASAGELQKGNELALPSKYVNFLYLASHYEKLKGSPEDNEQKQLFVEQHKHYLDEIIEQISEFSKRVILADANLDKVLSAYNKHRDKPIREQAENIIHLFTLTNLGAPAAFKYFDTTIDRKRYTSTKEVLDATLIHQSITGLYETRIDLSQLGGDGGPAPEAAAKGGVLNLEEEYRLHEKPVPSSIDPSWLQLFPTVWAERAGMGLANQVPPVVVELRSGASPVAVRQYPMSKEAREGIRPHIQRFLDLGVLVPCQSPWNTPLLPVKKPGTNDYRPVQDLREINKRVQDIHPTVPNPYNLLSSLPPSHTWYSVLDLKDAFFCLKLHPNSQPLFAFEWRDPEKGNTGQLTWTRLPQGFKNSPTLFNEALHRDLAPFRALNPQVVLLQYVDDLLVAAPTYRDCKEGTQKLLQELSKLGYRVSAKKAQLCQKEVTYLGYLLKEGKRWLTPARKATVMKIPPPTTPRQVREFLGTAGFCRLWIPGFASLAAPLYPLTKPSIPFIWTEEHQKAFDRIKEALLSAPALALPDLTKPFTLYVDERAGVARGVLTQTLGPWRRPVAYLSKKLDPVASGWPTCLKAVAAVALLLKDADKLTLGQNVTVIASHSLESIVRQPPDRWMTNARMTHYQSLLLNERVSFAPPAVLNPATLLPVESEATPVHRCSEILAEETGTRRDLKDQPLPGVPAWYTDGSSFIAEGKRRAGAAIVDGKRTVWASSLPEGTSAQKAELVALTQALRLAEGKDINIYTDSRYAFATAHIHGAIYKQRGWLTSAGKDIKNKEEILALLEAIHLPKRVAIIHCPGHQKGNDPVATGNRRADEAAKQAALSTRVLAETTKPAGKRTADGSEFEKRTADGSEFESPKKKAKVE

SEQ ID NO: 820 - protein, 2094 aa, synthetic construct
MPAAKRVKLDGGDKKYSIGLDIGTNSVGWAVITDEYKVPSKKFKVLGNTDRHSIKKNLIGALLFDSGETAEATRLKRTARRRYTRRKNRICYLQEIFSNEMAKVDDSFFHRLEESFLVEEDKKHERHPIFGNIVDEVAYHEKYPTIYHLRKKLVDSTDKADLRLIYLALAHMIKFRGHFLIEGDLNPDNSDVDKLFIQLVQTYNQLFEENPINASGVDAKAILSARLSKSRRLENLIAQLPGEKKNGLFGNLIALSLGLTPNFKSNFDLAEDAKLQLSKDTYDDDLDNLLAQIGDQYADLFLAAKNLSDAILLSDILRVNTEITKAPLSASMIKRYDEHHQDLTLLKALVRQQLPEKYKEIFFDQSKNGYAGYIDGGASQEEFYKFIKPILEKMDGTEELLVKLNREDLLRKQRTFDNGSIPHQIHLGELHAILRRQEDFYPFLKDNREKIEKILTFRIPYYVGPLARGNSRFAWMTRKSEETITPWNFEEVVDKGASAQSFIERMTNFDKNLPNEKVLPKHSLLYEYFTVYNELTKVKYVTEGMRKPAFLSGEQKKAIVDLLFKTNRKVTVKQLKEDYFKKIECFDSVEISGVEDRFNASLGTYHDLLKIIKDKDFLDNEENEDILEDIVLTLTLFEDREMIEERLKTYAHLFDDKVMKQLKRRRYTGWGRLSRKLINGIRDKQSGKTILDFLKSDGFANRNFMQLIHDDSLTFKEDIQKAQVSGQGDSLHEHIANLAGSPAIKKGILQTVKVVDELVKVMGRHKPENIVIEMARENQTTQKGQKNSRERMKRIEEGIKELGSQILKEHPVENTQLQNEKLYLYYLQNGRDMYVDQELDINRLSDYDVDHIVPQSFLKDDSIDNKVLTRSDKARGKSDNVPSEEVVKKMKNYWRQLLNAKLITQRKFDNLTKAERGGLSELDKAGFIKRQLVETRQITKHVAQILDSRMNTKYDENDKLIREVKVITLKSKLVSDFRKDFQFYKVREINNYHHAHDAYLNAVVGTALIKKYPKLESEFVYGDYKVYDVRKMIAKSEQEIGKATAKYFFYSNIMNFFKTEITLANGEIRKRPLIETNGETGEIVWDKGRDFATVRKVLSMPQVNIVKKTEVQTGGFSKESILPKRNSDKLIARKKDWDPKKYGGFDSPTVAYSVLVVAKVEKGKSKKLKSVKELLGITIMERSSFEKNPIDFLEAKGYKEVKKDLIIKLPKYSLFELENGRKRMLASAGELQKGNELALPSKYVNFLYLASHYEKLKGSPEDNEQKQLFVEQHKHYLDEIIEQISEFSKRVILADANLDKVLSAYNKHRDKPIREQAENIIHLFTLTNLGAPAAFKYFDTTIDRKRYTSTKEVLDATLIHQSITGLYETRIDLSQLGGDGGEAAAKGGSGSSGGVLNLEEEYRLHEKPVPSSIDPSWLQLFPTVWAERAGMGLANQVPPVVVELRSGASPVAVRQYPMSKEAREGIRPHIQRFLDLGVLVPCQSPWNTPLLPVKKPGTNDYRPVQDLREINKRVQDIHPTVPNPYNLLSSLPPSHTWYSVLDLKDAFFCLKLHPNSQPLFAFEWRDPEKGNTGQLTWTRLPQGFKNSPTLFNEALHRDLAPFRALNPQVVLLQYVDDLLVAAPTYRDCKEGTQKLLQELSKLGYRVSAKKAQLCQKEVTYLGYLLKEGKRWLTPARKATVMKIPPPTTPRQVREFLGTAGFCRLWIPGFASLAAPLYPLTKPSIPFIWTEEHQKAFDRIKEALLSAPALALPDLTKPFTLYVDERAGVARGVLTQTLGPWRRPVAYLSKKLDPVASGWPTCLKAVAAVALLLKDADKLTLGQNVTVIASHSLESIVRQPPDRWMTNARMTHYQSLLLNERVSFAPPAVLNPATLLPVESEATPVHRCSEILAEETGTRRDLKDQPLPGVPAWYTDGSSFIAEGKRRAGAAIVDGKRTVWASSLPEGTSAQKAELVALTQALRLAEGKDINIYTDSRYAFATAHIHGAIYKQRGWLTSAGKDIKNKEEILALLEAIHLPKRVAIIHCPGHQKGNDPVATGNRRADEAAKQAALSTRVLAETTKPAGKRTADGSEFEKRTADGSEFESPKKKAKVE

SEQ ID NO: 821 - protein, 2092 aa, synthetic construct
MPAAKRVKLDGGDKKYSIGLDIGTNSVGWAVITDEYKVPSKKFKVLGNTDRHSIKKNLIGALLFDSGETAEATRLKRTARRRYTRRKNRICYLQEIFSNEMAKVDDSFFHRLEESFLVEEDKKHERHPIFGNIVDEVAYHEKYPTIYHLRKKLVDSTDKADLRLIYLALAHMIKFRGHFLIEGDLNPDNSDVDKLFIQLVQTYNQLFEENPINASGVDAKAILSARLSKSRRLENLIAQLPGEKKNGLFGNLIALSLGLTPNFKSNFDLAEDAKLQLSKDTYDDDLDNLLAQIGDQYADLFLAAKNLSDAILLSDILRVNTEITKAPLSASMIKRYDEHHQDLTLLKALVRQQLPEKYKEIFFDQSKNGYAGYIDGGASQEEFYKFIKPILEKMDGTEELLVKLNREDLLRKQRTFDNGSIPHQIHLGELHAILRRQEDFYPFLKDNREKIEKILTFRIPYYVGPLARGNSRFAWMTRKSEETITPWNFEEVVDKGASAQSFIERMTNFDKNLPNEKVLPKHSLLYEYFTVYNELTKVKYVTEGMRKPAFLSGEQKKAIVDLLFKTNRKVTVKQLKEDYFKKIECFDSVEISGVEDRFNASLGTYHDLLKIIKDKDFLDNEENEDILEDIVLTLTLFEDREMIEERLKTYAHLFDDKVMKQLKRRRYTGWGRLSRKLINGIRDKQSGKTILDFLKSDGFANRNFMQLIHDDSLTFKEDIQKAQVSGQGDSLHEHIANLAGSPAIKKGILQTVKVVDELVKVMGRHKPENIVIEMARENQTTQKGQKNSRERMKRIEEGIKELGSQILKEHPVENTQLQNEKLYLYYLQNGRDMYVDQELDINRLSDYDVDHIVPQSFLKDDSIDNKVLTRSDKARGKSDNVPSEEVVKKMKNYWRQLLNAKLITQRKFDNLTKAERGGLSELDKAGFIKRQLVETRQITKHVAQILDSRMNTKYDENDKLIREVKVITLKSKLVSDFRKDFQFYKVREINNYHHAHDAYLNAVVGTALIKKYPKLESEFVYGDYKVYDVRKMIAKSEQEIGKATAKYFFYSNIMNFFKTEITLANGEIRKRPLIETNGETGEIVWDKGRDFATVRKVLSMPQVNIVKKTEVQTGGFSKESILPKRNSDKLIARKKDWDPKKYGGFDSPTVAYSVLVVAKVEKGKSKKLKSVKELLGITIMERSSFEKNPIDFLEAKGYKEVKKDLIIKLPKYSLFELENGRKRMLASAGELQKGNELALPSKYVNFLYLASHYEKLKGSPEDNEQKQLFVEQHKHYLDEIIEQISEFSKRVILADANLDKVLSAYNKHRDKPIREQAENIIHLFTLTNLGAPAAFKYFDTTIDRKRYTSTKEVLDATLIHQSITGLYETRIDLSQLGGDGGPAPAPAPAPGGVLNLEEEYRLHEKPVPSSIDPSWLQLFPTVWAERAGMGLANQVPPVVVELRSGASPVAVRQYPMSKEAREGIRPHIQRFLDLGVLVPCQSPWNTPLLPVKKPGTNDYRPVQDLREINKRVQDIHPTVPNPYNLLSSLPPSHTWYSVLDLKDAFFCLKLHPNSQPLFAFEWRDPEKGNTGQLTWTRLPQGFKNSPTLFNEALHRDLAPFRALNPQVVLLQYVDDLLVAAPTYRDCKEGTQKLLQELSKLGYRVSAKKAQLCQKEVTYLGYLLKEGKRWLTPARKATVMKIPPPTTPRQVREFLGTAGFCRLWIPGFASLAAPLYPLTKPSIPFIWTEEHQKAFDRIKEALLSAPALALPDLTKPFTLYVDERAGVARGVLTQTLGPWRRPVAYLSKKLDPVASGWPTCLKAVAAVALLLKDADKLTLGQNVTVIASHSLESIVRQPPDRWMTNARMTHYQSLLLNERVSFAPPAVLNPATLLPVESEATPVHRCSEILAEETGTRRDLKDQPLPGVPAWYTDGSSFIAEGKRRAGAAIVDGKRTVWASSLPEGTSAQKAELVALTQALRLAEGKDINIYTDSRYAFATAHIHGAIYKQRGWLTSAGKDIKNKEEILALLEAIHLPKRVAIIHCPGHQKGNDPVATGNRRADEAAKQAALSTRVLAETTKPAGKRTADGSEFEKRTADGSEFESPKKKAKVE

SEQ ID NO: 822 - protein, 2094 aa, synthetic construct
MPAAKRVKLDGGDKKYSIGLDIGTNSVGWAVITDEYKVPSKKFKVLGNTDRHSIKKNLIGALLFDSGETAEATRLKRTARRRYTRRKNRICYLQEIFSNEMAKVDDSFFHRLEESFLVEEDKKHERHPIFGNIVDEVAYHEKYPTIYHLRKKLVDSTDKADLRLIYLALAHMIKFRGHFLIEGDLNPDNSDVDKLFIQLVQTYNQLFEENPINASGVDAKAILSARLSKSRRLENLIAQLPGEKKNGLFGNLIALSLGLTPNFKSNFDLAEDAKLQLSKDTYDDDLDNLLAQIGDQYADLFLAAKNLSDAILLSDILRVNTEITKAPLSASMIKRYDEHHQDLTLLKALVRQQLPEKYKEIFFDQSKNGYAGYIDGGASQEEFYKFIKPILEKMDGTEELLVKLNREDLLRKQRTFDNGSIPHQIHLGELHAILRRQEDFYPFLKDNREKIEKILTFRIPYYVGPLARGNSRFAWMTRKSEETITPWNFEEVVDKGASAQSFIERMTNFDKNLPNEKVLPKHSLLYEYFTVYNELTKVKYVTEGMRKPAFLSGEQKKAIVDLLFKTNRKVTVKQLKEDYFKKIECFDSVEISGVEDRFNASLGTYHDLLKIIKDKDFLDNEENEDILEDIVLTLTLFEDREMIEERLKTYAHLFDDKVMKQLKRRRYTGWGRLSRKLINGIRDKQSGKTILDFLKSDGFANRNFMQLIHDDSLTFKEDIQKAQVSGQGDSLHEHIANLAGSPAIKKGILQTVKVVDELVKVMGRHKPENIVIEMARENQTTQKGQKNSRERMKRIEEGIKELGSQILKEHPVENTQLQNEKLYLYYLQNGRDMYVDQELDINRLSDYDVDHIVPQSFLKDDSIDNKVLTRSDKARGKSDNVPSEEVVKKMKNYWRQLLNAKLITQRKFDNLTKAERGGLSELDKAGFIKRQLVETRQITKHVAQILDSRMNTKYDENDKLIREVKVITLKSKLVSDFRKDFQFYKVREINNYHHAHDAYLNAVVGTALIKKYPKLESEFVYGDYKVYDVRKMIAKSEQEIGKATAKYFFYSNIMNFFKTEITLANGEIRKRPLIETNGETGEIVWDKGRDFATVRKVLSMPQVNIVKKTEVQTGGFSKESILPKRNSDKLIARKKDWDPKKYGGFDSPTVAYSVLVVAKVEKGKSKKLKSVKELLGITIMERSSFEKNPIDFLEAKGYKEVKKDLIIKLPKYSLFELENGRKRMLASAGELQKGNELALPSKYVNFLYLASHYEKLKGSPEDNEQKQLFVEQHKHYLDEIIEQISEFSKRVILADANLDKVLSAYNKHRDKPIREQAENIIHLFTLTNLGAPAAFKYFDTTIDRKRYTSTKEVLDATLIHQSITGLYETRIDLSQLGGDGGEAAAKGGGPAPGGVLNLEEEYRLHEKPVPSSIDPSWLQLFPTVWAERAGMGLANQVPPVVVELRSGASPVAVRQYPMSKEAREGIRPHIQRFLDLGVLVPCQSPWNTPLLPVKKPGTNDYRPVQDLREINKRVQDIHPTVPNPYNLLSSLPPSHTWYSVLDLKDAFFCLKLHPNSQPLFAFEWRDPEKGNTGQLTWTRLPQGFKNSPTLFNEALHRDLAPFRALNPQVVLLQYVDDLLVAAPTYRDCKEGTQKLLQELSKLGYRVSAKKAQLCQKEVTYLGYLLKEGKRWLTPARKATVMKIPPPTTPRQVREFLGTAGFCRLWIPGFASLAAPLYPLTKPSIPFIWTEEHQKAFDRIKEALLSAPALALPDLTKPFTLYVDERAGVARGVLTQTLGPWRRPVAYLSKKLDPVASGWPTCLKAVAAVALLLKDADKLTLGQNVTVIASHSLESIVRQPPDRWMTNARMTHYQSLLLNERVSFAPPAVLNPATLLPVESEATPVHRCSEILAEETGTRRDLKDQPLPGVPAWYTDGSSFIAEGKRRAGAAIVDGKRTVWASSLPEGTSAQKAELVALTQALRLAEGKDINIYTDSRYAFATAHIHGAIYKQRGWLTSAGKDIKNKEEILALLEAIHLPKRVAIIHCPGHQKGNDPVATGNRRADEAAKQAALSTRVLAETTKPAGKRTADGSEFEKRTADGSEFESPKKKAKVE

SEQ ID NO: 823 - protein, 2088 aa, synthetic construct
MPAAKRVKLDGGDKKYSIGLDIGTNSVGWAVITDEYKVPSKKFKVLGNTDRHSIKKNLIGALLFDSGETAEATRLKRTARRRYTRRKNRICYLQEIFSNEMAKVDDSFFHRLEESFLVEEDKKHERHPIFGNIVDEVAYHEKYPTIYHLRKKLVDSTDKADLRLIYLALAHMIKFRGHFLIEGDLNPDNSDVDKLFIQLVQTYNQLFEENPINASGVDAKAILSARLSKSRRLENLIAQLPGEKKNGLFGNLIALSLGLTPNFKSNFDLAEDAKLQLSKDTYDDDLDNLLAQIGDQYADLFLAAKNLSDAILLSDILRVNTEITKAPLSASMIKRYDEHHQDLTLLKALVRQQLPEKYKEIFFDQSKNGYAGYIDGGASQEEFYKFIKPILEKMDGTEELLVKLNREDLLRKQRTFDNGSIPHQIHLGELHAILRRQEDFYPFLKDNREKIEKILTFRIPYYVGPLARGNSRFAWMTRKSEETITPWNFEEVVDKGASAQSFIERMTNFDKNLPNEKVLPKHSLLYEYFTVYNELTKVKYVTEGMRKPAFLSGEQKKAIVDLLFKTNRKVTVKQLKEDYFKKIECFDSVEISGVEDRFNASLGTYHDLLKIIKDKDFLDNEENEDILEDIVLTLTLFEDREMIEERLKTYAHLFDDKVMKQLKRRRYTGWGRLSRKLINGIRDKQSGKTILDFLKSDGFANRNFMQLIHDDSLTFKEDIQKAQVSGQGDSLHEHIANLAGSPAIKKGILQTVKVVDELVKVMGRHKPENIVIEMARENQTTQKGQKNSRERMKRIEEGIKELGSQILKEHPVENTQLQNEKLYLYYLQNGRDMYVDQELDINRLSDYDVDHIVPQSFLKDDSIDNKVLTRSDKARGKSDNVPSEEVVKKMKNYWRQLLNAKLITQRKFDNLTKAERGGLSELDKAGFIKRQLVETRQITKHVAQILDSRMNTKYDENDKLIREVKVITLKSKLVSDFRKDFQFYKVREINNYHHAHDAYLNAVVGTALIKKYPKLESEFVYGDYKVYDVRKMIAKSEQEIGKATAKYFFYSNIMNFFKTEITLANGEIRKRPLIETNGETGEIVWDKGRDFATVRKVLSMPQVNIVKKTEVQTGGFSKESILPKRNSDKLIARKKDWDPKKYGGFDSPTVAYSVLVVAKVEKGKSKKLKSVKELLGITIMERSSFEKNPIDFLEAKGYKEVKKDLIIKLPKYSLFELENGRKRMLASAGELQKGNELALPSKYVNFLYLASHYEKLKGSPEDNEQKQLFVEQHKHYLDEIIEQISEFSKRVILADANLDKVLSAYNKHRDKPIREQAENIIHLFTLTNLGAPAAFKYFDTTIDRKRYTSTKEVLDATLIHQSITGLYETRIDLSQLGGDGGEAAAKGGVLNLEEEYRLHEKPVPSSIDPSWLQLFPTVWAERAGMGLANQVPPVVVELRSGASPVAVRQYPMSKEAREGIRPHIQRFLDLGVLVPCQSPWNTPLLPVKKPGTNDYRPVQDLREINKRVQDIHPTVPNPYNLLSSLPPSHTWYSVLDLKDAFFCLKLHPNSQPLFAFEWRDPEKGNTGQLTWTRLPQGFKNSPTLFNEALHRDLAPFRALNPQVVLLQYVDDLLVAAPTYRDCKEGTQKLLQELSKLGYRVSAKKAQLCQKEVTYLGYLLKEGKRWLTPARKATVMKIPPPTTPRQVREFLGTAGFCRLWIPGFASLAAPLYPLTKPSIPFIWTEEHQKAFDRIKEALLSAPALALPDLTKPFTLYVDERAGVARGVLTQTLGPWRRPVAYLSKKLDPVASGWPTCLKAVAAVALLLKDADKLTLGQNVTVIASHSLESIVRQPPDRWMTNARMTHYQSLLLNERVSFAPPAVLNPATLLPVESEATPVHRCSEILAEETGTRRDLKDQPLPGVPAWYTDGSSFIAEGKRRAGAAIVDGKRTVWASSLPEGTSAQKAELVALTQALRLAEGKDINIYTDSRYAFATAHIHGAIYKQRGWLTSAGKDIKNKEEILALLEAIHLPKRVAIIHCPGHQKGNDPVATGNRRADEAAKQAALSTRVLAETTKPAGKRTADGSEFEKRTADGSEFESPKKKAKVE

SEQ ID NO: 824 - protein, 2095 aa, synthetic construct
MPAAKRVKLDGGDKKYSIGLDIGTNSVGWAVITDEYKVPSKKFKVLGNTDRHSIKKNLIGALLFDSGETAEATRLKRTARRRYTRRKNRICYLQEIFSNEMAKVDDSFFHRLEESFLVEEDKKHERHPIFGNIVDEVAYHEKYPTIYHLRKKLVDSTDKADLRLIYLALAHMIKFRGHFLIEGDLNPDNSDVDKLFIQLVQTYNQLFEENPINASGVDAKAILSARLSKSRRLENLIAQLPGEKKNGLFGNLIALSLGLTPNFKSNFDLAEDAKLQLSKDTYDDDLDNLLAQIGDQYADLFLAAKNLSDAILLSDILRVNTEITKAPLSASMIKRYDEHHQDLTLLKALVRQQLPEKYKEIFFDQSKNGYAGYIDGGASQEEFYKFIKPILEKMDGTEELLVKLNREDLLRKQRTFDNGSIPHQIHLGELHAILRRQEDFYPFLKDNREKIEKILTFRIPYYVGPLARGNSRFAWMTRKSEETITPWNFEEVVDKGASAQSFIERMTNFDKNLPNEKVLPKHSLLYEYFTVYNELTKVKYVTEGMRKPAFLSGEQKKAIVDLLFKTNRKVTVKQLKEDYFKKIECFDSVEISGVEDRFNASLGTYHDLLKIIKDKDFLDNEENEDILEDIVLTLTLFEDREMIEERLKTYAHLFDDKVMKQLKRRRYTGWGRLSRKLINGIRDKQSGKTILDFLKSDGFANRNFMQLIHDDSLTFKEDIQKAQVSGQGDSLHEHIANLAGSPAIKKGILQTVKVVDELVKVMGRHKPENIVIEMARENQTTQKGQKNSRERMKRIEEGIKELGSQILKEHPVENTQLQNEKLYLYYLQNGRDMYVDQELDINRLSDYDVDHIVPQSFLKDDSIDNKVLTRSDKARGKSDNVPSEEVVKKMKNYWRQLLNAKLITQRKFDNLTKAERGGLSELDKAGFIKRQLVETRQITKHVAQILDSRMNTKYDENDKLIREVKVITLKSKLVSDFRKDFQFYKVREINNYHHAHDAYLNAVVGTALIKKYPKLESEFVYGDYKVYDVRKMIAKSEQEIGKATAKYFFYSNIMNFFKTEITLANGEIRKRPLIETNGETGEIVWDKGRDFATVRKVLSMPQVNIVKKTEVQTGGFSKESILPKRNSDKLIARKKDWDPKKYGGFDSPTVAYSVLVVAKVEKGKSKKLKSVKELLGITIMERSSFEKNPIDFLEAKGYKEVKKDLIIKLPKYSLFELENGRKRMLASAGELQKGNELALPSKYVNFLYLASHYEKLKGSPEDNEQKQLFVEQHKHYLDEIIEQISEFSKRVILADANLDKVLSAYNKHRDKPIREQAENIIHLFTLTNLGAPAAFKYFDTTIDRKRYTSTKEVLDATLIHQSITGLYETRIDLSQLGGDGGGGSGGSGGSGGSGGVLNLEEEYRLHEKPVPSSIDPSWLQLFPTVWAERAGMGLANQVPPVVVELRSGASPVAVRQYPMSKEAREGIRPHIQRFLDLGVLVPCQSPWNTPLLPVKKPGTNDYRPVQDLREINKRVQDIHPTVPNPYNLLSSLPPSHTWYSVLDLKDAFFCLKLHPNSQPLFAFEWRDPEKGNTGQLTWTRLPQGFKNSPTLFNEALHRDLAPFRALNPQVVLLQYVDDLLVAAPTYRDCKEGTQKLLQELSKLGYRVSAKKAQLCQKEVTYLGYLLKEGKRWLTPARKATVMKIPPPTTPRQVREFLGTAGFCRLWIPGFASLAAPLYPLTKPSIPFIWTEEHQKAFDRIKEALLSAPALALPDLTKPFTLYVDERAGVARGVLTQTLGPWRRPVAYLSKKLDPVASGWPTCLKAVAAVALLLKDADKLTLGQNVTVIASHSLESIVRQPPDRWMTNARMTHYQSLLLNERVSFAPPAVLNPATLLPVESEATPVHRCSEILAEETGTRRDLKDQPLPGVPAWYTDGSSFIAEGKRRAGAAIVDGKRTVWASSLPEGTSAQKAELVALTQALRLAEGKDINIYTDSRYAFATAHIHGAIYKQRGWLTSAGKDIKNKEEILALLEAIHLPKRVAIIHCPGHQKGNDPVATGNRRADEAAKQAALSTRVLAETTKPAGKRTADGSEFEKRTADGSEFESPKKKAKVE

SEQ ID NO: 825 - protein, 2094 aa, synthetic construct
MPAAKRVKLDGGDKKYSIGLDIGTNSVGWAVITDEYKVPSKKFKVLGNTDRHSIKKNLIGALLFDSGETAEATRLKRTARRRYTRRKNRICYLQEIFSNEMAKVDDSFFHRLEESFLVEEDKKHERHPIFGNIVDEVAYHEKYPTIYHLRKKLVDSTDKADLRLIYLALAHMIKFRGHFLIEGDLNPDNSDVDKLFIQLVQTYNQLFEENPINASGVDAKAILSARLSKSRRLENLIAQLPGEKKNGLFGNLIALSLGLTPNFKSNFDLAEDAKLQLSKDTYDDDLDNLLAQIGDQYADLFLAAKNLSDAILLSDILRVNTEITKAPLSASMIKRYDEHHQDLTLLKALVRQQLPEKYKEIFFDQSKNGYAGYIDGGASQEEFYKFIKPILEKMDGTEELLVKLNREDLLRKQRTFDNGSIPHQIHLGELHAILRRQEDFYPFLKDNREKIEKILTFRIPYYVGPLARGNSRFAWMTRKSEETITPWNFEEVVDKGASAQSFIERMTNFDKNLPNEKVLPKHSLLYEYFTVYNELTKVKYVTEGMRKPAFLSGEQKKAIVDLLFKTNRKVTVKQLKEDYFKKIECFDSVEISGVEDRFNASLGTYHDLLKIIKDKDFLDNEENEDILEDIVLTLTLFEDREMIEERLKTYAHLFDDKVMKQLKRRRYTGWGRLSRKLINGIRDKQSGKTILDFLKSDGFANRNFMQLIHDDSLTFKEDIQKAQVSGQGDSLHEHIANLAGSPAIKKGILQTVKVVDELVKVMGRHKPENIVIEMARENQTTQKGQKNSRERMKRIEEGIKELGSQILKEHPVENTQLQNEKLYLYYLQNGRDMYVDQELDINRLSDYDVDHIVPQSFLKDDSIDNKVLTRSDKARGKSDNVPSEEVVKKMKNYWRQLLNAKLITQRKFDNLTKAERGGLSELDKAGFIKRQLVETRQITKHVAQILDSRMNTKYDENDKLIREVKVITLKSKLVSDFRKDFQFYKVREINNYHHAHDAYLNAVVGTALIKKYPKLESEFVYGDYKVYDVRKMIAKSEQEIGKATAKYFFYSNIMNFFKTEITLANGEIRKRPLIETNGETGEIVWDKGRDFATVRKVLSMPQVNIVKKTEVQTGGFSKESILPKRNSDKLIARKKDWDPKKYGGFDSPTVAYSVLVVAKVEKGKSKKLKSVKELLGITIMERSSFEKNPIDFLEAKGYKEVKKDLIIKLPKYSLFELENGRKRMLASAGELQKGNELALPSKYVNFLYLASHYEKLKGSPEDNEQKQLFVEQHKHYLDEIIEQISEFSKRVILADANLDKVLSAYNKHRDKPIREQAENIIHLFTLTNLGAPAAFKYFDTTIDRKRYTSTKEVLDATLIHQSITGLYETRIDLSQLGGDGGGGSGSSEAAAKGGVLNLEEEYRLHEKPVPSSIDPSWLQLFPTVWAERAGMGLANQVPPVVVELRSGASPVAVRQYPMSKEAREGIRPHIQRFLDLGVLVPCQSPWNTPLLPVKKPGTNDYRPVQDLREINKRVQDIHPTVPNPYNLLSSLPPSHTWYSVLDLKDAFFCLKLHPNSQPLFAFEWRDPEKGNTGQLTWTRLPQGFKNSPTLFNEALHRDLAPFRALNPQVVLLQYVDDLLVAAPTYRDCKEGTQKLLQELSKLGYRVSAKKAQLCQKEVTYLGYLLKEGKRWLTPARKATVMKIPPPTTPRQVREFLGTAGFCRLWIPGFASLAAPLYPLTKPSIPFIWTEEHQKAFDRIKEALLSAPALALPDLTKPFTLYVDERAGVARGVLTQTLGPWRRPVAYLSKKLDPVASGWPTCLKAVAAVALLLKDADKLTLGQNVTVIASHSLESIVRQPPDRWMTNARMTHYQSLLLNERVSFAPPAVLNPATLLPVESEATPVHRCSEILAEETGTRRDLKDQPLPGVPAWYTDGSSFIAEGKRRAGAAIVDGKRTVWASSLPEGTSAQKAELVALTQALRLAEGKDINIYTDSRYAFATAHIHGAIYKQRGWLTSAGKDIKNKEEILALLEAIHLPKRVAIIHCPGHQKGNDPVATGNRRADEAAKQAALSTRVLAETTKPAGKRTADGSEFEKRTADGSEFESPKKKAKVE

SEQ ID NO: 826 - protein, 2094 aa, synthetic construct
MPAAKRVKLDGGDKKYSIGLDIGTNSVGWAVITDEYKVPSKKFKVLGNTDRHSIKKNLIGALLFDSGETAEATRLKRTARRRYTRRKNRICYLQEIFSNEMAKVDDSFFHRLEESFLVEEDKKHERHPIFGNIVDEVAYHEKYPTIYHLRKKLVDSTDKADLRLIYLALAHMIKFRGHFLIEGDLNPDNSDVDKLFIQLVQTYNQLFEENPINASGVDAKAILSARLSKSRRLENLIAQLPGEKKNGLFGNLIALSLGLTPNFKSNFDLAEDAKLQLSKDTYDDDLDNLLAQIGDQYADLFLAAKNLSDAILLSDILRVNTEITKAPLSASMIKRYDEHHQDLTLLKALVRQQLPEKYKEIFFDQSKNGYAGYIDGGASQEEFYKFIKPILEKMDGTEELLVKLNREDLLRKQRTFDNGSIPHQIHLGELHAILRRQEDFYPFLKDNREKIEKILTFRIPYYVGPLARGNSRFAWMTRKSEETITPWNFEEVVDKGASAQSFIERMTNFDKNLPNEKVLPKHSLLYEYFTVYNELTKVKYVTEGMRKPAFLSGEQKKAIVDLLFKTNRKVTVKQLKEDYFKKIECFDSVEISGVEDRFNASLGTYHDLLKIIKDKDFLDNEENEDILEDIVLTLTLFEDREMIEERLKTYAHLFDDKVMKQLKRRRYTGWGRLSRKLINGIRDKQSGKTILDFLKSDGFANRNFMQLIHDDSLTFKEDIQKAQVSGQGDSLHEHIANLAGSPAIKKGILQTVKVVDELVKVMGRHKPENIVIEMARENQTTQKGQKNSRERMKRIEEGIKELGSQILKEHPVENTQLQNEKLYLYYLQNGRDMYVDQELDINRLSDYDVDHIVPQSFLKDDSIDNKVLTRSDKARGKSDNVPSEEVVKKMKNYWRQLLNAKLITQRKFDNLTKAERGGLSELDKAGFIKRQLVETRQITKHVAQILDSRMNTKYDENDKLIREVKVITLKSKLVSDFRKDFQFYKVREINNYHHAHDAYLNAVVGTALIKKYPKLESEFVYGDYKVYDVRKMIAKSEQEIGKATAKYFFYSNIMNFFKTEITLANGEIRKRPLIETNGETGEIVWDKGRDFATVRKVLSMPQVNIVKKTEVQTGGFSKESILPKRNSDKLIARKKDWDPKKYGGFDSPTVAYSVLVVAKVEKGKSKKLKSVKELLGITIMERSSFEKNPIDFLEAKGYKEVKKDLIIKLPKYSLFELENGRKRMLASAGELQKGNELALPSKYVNFLYLASHYEKLKGSPEDNEQKQLFVEQHKHYLDEIIEQISEFSKRVILADANLDKVLSAYNKHRDKPIREQAENIIHLFTLTNLGAPAAFKYFDTTIDRKRYTSTKEVLDATLIHQSITGLYETRIDLSQLGGDGGEAAAKGGGGSSGGVLNLEEEYRLHEKPVPSSIDPSWLQLFPTVWAERAGMGLANQVPPVVVELRSGASPVAVRQYPMSKEAREGIRPHIQRFLDLGVLVPCQSPWNTPLLPVKKPGTNDYRPVQDLREINKRVQDIHPTVPNPYNLLSSLPPSHTWYSVLDLKDAFFCLKLHPNSQPLFAFEWRDPEKGNTGQLTWTRLPQGFKNSPTLFNEALHRDLAPFRALNPQVVLLQYVDDLLVAAPTYRDCKEGTQKLLQELSKLGYRVSAKKAQLCQKEVTYLGYLLKEGKRWLTPARKATVMKIPPPTTPRQVREFLGTAGFCRLWIPGFASLAAPLYPLTKPSIPFIWTEEHQKAFDRIKEALLSAPALALPDLTKPFTLYVDERAGVARGVLTQTLGPWRRPVAYLSKKLDPVASGWPTCLKAVAAVALLLKDADKLTLGQNVTVIASHSLESIVRQPPDRWMTNARMTHYQSLLLNERVSFAPPAVLNPATLLPVESEATPVHRCSEILAEETGTRRDLKDQPLPGVPAWYTDGSSFIAEGKRRAGAAIVDGKRTVWASSLPEGTSAQKAELVALTQALRLAEGKDINIYTDSRYAFATAHIHGAIYKQRGWLTSAGKDIKNKEEILALLEAIHLPKRVAIIHCPGHQKGNDPVATGNRRADEAAKQAALSTRVLAETTKPAGKRTADGSEFEKRTADGSEFESPKKKAKVE

SEQ ID NO: 827 - protein, 2103 aa, synthetic construct
MPAAKRVKLDGGDKKYSIGLDIGTNSVGWAVITDEYKVPSKKFKVLGNTDRHSIKKNLIGALLFDSGETAEATRLKRTARRRYTRRKNRICYLQEIFSNEMAKVDDSFFHRLEESFLVEEDKKHERHPIFGNIVDEVAYHEKYPTIYHLRKKLVDSTDKADLRLIYLALAHMIKFRGHFLIEGDLNPDNSDVDKLFIQLVQTYNQLFEENPINASGVDAKAILSARLSKSRRLENLIAQLPGEKKNGLFGNLIALSLGLTPNFKSNFDLAEDAKLQLSKDTYDDDLDNLLAQIGDQYADLFLAAKNLSDAILLSDILRVNTEITKAPLSASMIKRYDEHHQDLTLLKALVRQQLPEKYKEIFFDQSKNGYAGYIDGGASQEEFYKFIKPILEKMDGTEELLVKLNREDLLRKQRTFDNGSIPHQIHLGELHAILRRQEDFYPFLKDNREKIEKILTFRIPYYVGPLARGNSRFAWMTRKSEETITPWNFEEVVDKGASAQSFIERMTNFDKNLPNEKVLPKHSLLYEYFTVYNELTKVKYVTEGMRKPAFLSGEQKKAIVDLLFKTNRKVTVKQLKEDYFKKIECFDSVEISGVEDRFNASLGTYHDLLKIIKDKDFLDNEENEDILEDIVLTLTLFEDREMIEERLKTYAHLFDDKVMKQLKRRRYTGWGRLSRKLINGIRDKQSGKTILDFLKSDGFANRNFMQLIHDDSLTFKEDIQKAQVSGQGDSLHEHIANLAGSPAIKKGILQTVKVVDELVKVMGRHKPENIVIEMARENQTTQKGQKNSRERMKRIEEGIKELGSQILKEHPVENTQLQNEKLYLYYLQNGRDMYVDQELDINRLSDYDVDHIVPQSFLKDDSIDNKVLTRSDKARGKSDNVPSEEVVKKMKNYWRQLLNAKLITQRKFDNLTKAERGGLSELDKAGFIKRQLVETRQITKHVAQILDSRMNTKYDENDKLIREVKVITLKSKLVSDFRKDFQFYKVREINNYHHAHDAYLNAVVGTALIKKYPKLESEFVYGDYKVYDVRKMIAKSEQEIGKATAKYFFYSNIMNFFKTEITLANGEIRKRPLIETNGETGEIVWDKGRDFATVRKVLSMPQVNIVKKTEVQTGGFSKESILPKRNSDKLIARKKDWDPKKYGGFDSPTVAYSVLVVAKVEKGKSKKLKSVKELLGITIMERSSFEKNPIDFLEAKGYKEVKKDLIIKLPKYSLFELENGRKRMLASAGELQKGNELALPSKYVNFLYLASHYEKLKGSPEDNEQKQLFVEQHKHYLDEIIEQISEFSKRVILADANLDKVLSAYNKHRDKPIREQAENIIHLFTLTNLGAPAAFKYFDTTIDRKRYTSTKEVLDATLIHQSITGLYETRIDLSQLGGDGGEAAAKEAAAKEAAAKEAAAKGGVLNLEEEYRLHEKPVPSSIDPSWLQLFPTVWAERAGMGLANQVPPVVVELRSGASPVAVRQYPMSKEAREGIRPHIQRFLDLGVLVPCQSPWNTPLLPVKKPGTNDYRPVQDLREINKRVQDIHPTVPNPYNLLSSLPPSHTWYSVLDLKDAFFCLKLHPNSQPLFAFEWRDPEKGNTGQLTWTRLPQGFKNSPTLFNEALHRDLAPFRALNPQVVLLQYVDDLLVAAPTYRDCKEGTQKLLQELSKLGYRVSAKKAQLCQKEVTYLGYLLKEGKRWLTPARKATVMKIPPPTTPRQVREFLGTAGFCRLWIPGFASLAAPLYPLTKPSIPFIWTEEHQKAFDRIKEALLSAPALALPDLTKPFTLYVDERAGVARGVLTQTLGPWRRPVAYLSKKLDPVASGWPTCLKAVAAVALLLKDADKLTLGQNVTVIASHSLESIVRQPPDRWMTNARMTHYQSLLLNERVSFAPPAVLNPATLLPVESEATPVHRCSEILAEETGTRRDLKDQPLPGVPAWYTDGSSFIAEGKRRAGAAIVDGKRTVWASSLPEGTSAQKAELVALTQALRLAEGKDINIYTDSRYAFATAHIHGAIYKQRGWLTSAGKDIKNKEEILALLEAIHLPKRVAIIHCPGHQKGNDPVATGNRRADEAAKQAALSTRVLAETTKPAGKRTADGSEFEKRTADGSEFESPKKKAKVE

SEQ ID NO: 828 - protein, 2092 aa, synthetic construct
MPAAKRVKLDGGDKKYSIGLDIGTNSVGWAVITDEYKVPSKKFKVLGNTDRHSIKKNLIGALLFDSGETAEATRLKRTARRRYTRRKNRICYLQEIFSNEMAKVDDSFFHRLEESFLVEEDKKHERHPIFGNIVDEVAYHEKYPTIYHLRKKLVDSTDKADLRLIYLALAHMIKFRGHFLIEGDLNPDNSDVDKLFIQLVQTYNQLFEENPINASGVDAKAILSARLSKSRRLENLIAQLPGEKKNGLFGNLIALSLGLTPNFKSNFDLAEDAKLQLSKDTYDDDLDNLLAQIGDQYADLFLAAKNLSDAILLSDILRVNTEITKAPLSASMIKRYDEHHQDLTLLKALVRQQLPEKYKEIFFDQSKNGYAGYIDGGASQEEFYKFIKPILEKMDGTEELLVKLNREDLLRKQRTFDNGSIPHQIHLGELHAILRRQEDFYPFLKDNREKIEKILTFRIPYYVGPLARGNSRFAWMTRKSEETITPWNFEEVVDKGASAQSFIERMTNFDKNLPNEKVLPKHSLLYEYFTVYNELTKVKYVTEGMRKPAFLSGEQKKAIVDLLFKTNRKVTVKQLKEDYFKKIECFDSVEISGVEDRFNASLGTYHDLLKIIKDKDFLDNEENEDILEDIVLTLTLFEDREMIEERLKTYAHLFDDKVMKQLKRRRYTGWGRLSRKLINGIRDKQSGKTILDFLKSDGFANRNFMQLIHDDSLTFKEDIQKAQVSGQGDSLHEHIANLAGSPAIKKGILQTVKVVDELVKVMGRHKPENIVIEMARENQTTQKGQKNSRERMKRIEEGIKELGSQILKEHPVENTQLQNEKLYLYYLQNGRDMYVDQELDINRLSDYDVDHIVPQSFLKDDSIDNKVLTRSDKARGKSDNVPSEEVVKKMKNYWRQLLNAKLITQRKFDNLTKAERGGLSELDKAGFIKRQLVETRQITKHVAQILDSRMNTKYDENDKLIREVKVITLKSKLVSDFRKDFQFYKVREINNYHHAHDAYLNAVVGTALIKKYPKLESEFVYGDYKVYDVRKMIAKSEQEIGKATAKYFFYSNIMNFFKTEITLANGEIRKRPLIETNGETGEIVWDKGRDFATVRKVLSMPQVNIVKKTEVQTGGFSKESILPKRNSDKLIARKKDWDPKKYGGFDSPTVAYSVLVVAKVEKGKSKKLKSVKELLGITIMERSSFEKNPIDFLEAKGYKEVKKDLIIKLPKYSLFELENGRKRMLASAGELQKGNELALPSKYVNFLYLASHYEKLKGSPEDNEQKQLFVEQHKHYLDEIIEQISEFSKRVILADANLDKVLSAYNKHRDKPIREQAENIIHLFTLTNLGAPAAFKYFDTTIDRKRYTSTKEVLDATLIHQSITGLYETRIDLSQLGGDGGGGSGGGGSSGGVLNLEEEYRLHEKPVPSSIDPSWLQLFPTVWAERAGMGLANQVPPVVVELRSGASPVAVRQYPMSKEAREGIRPHIQRFLDLGVLVPCQSPWNTPLLPVKKPGTNDYRPVQDLREINKRVQDIHPTVPNPYNLLSSLPPSHTWYSVLDLKDAFFCLKLHPNSQPLFAFEWRDPEKGNTGQLTWTRLPQGFKNSPTLFNEALHRDLAPFRALNPQVVLLQYVDDLLVAAPTYRDCKEGTQKLLQELSKLGYRVSAKKAQLCQKEVTYLGYLLKEGKRWLTPARKATVMKIPPPTTPRQVREFLGTAGFCRLWIPGFASLAAPLYPLTKPSIPFIWTEEHQKAFDRIKEALLSAPALALPDLTKPFTLYVDERAGVARGVLTQTLGPWRRPVAYLSKKLDPVASGWPTCLKAVAAVALLLKDADKLTLGQNVTVIASHSLESIVRQPPDRWMTNARMTHYQSLLLNERVSFAPPAVLNPATLLPVESEATPVHRCSEILAEETGTRRDLKDQPLPGVPAWYTDGSSFIAEGKRRAGAAIVDGKRTVWASSLPEGTSAQKAELVALTQALRLAEGKDINIYTDSRYAFATAHIHGAIYKQRGWLTSAGKDIKNKEEILALLEAIHLPKRVAIIHCPGHQKGNDPVATGNRRADEAAKQAALSTRVLAETTKPAGKRTADGSEFEKRTADGSEFESPKKKAKVE

SEQ ID NO: 829 - protein, 2094 aa, synthetic construct
MPAAKRVKLDGGDKKYSIGLDIGTNSVGWAVITDEYKVPSKKFKVLGNTDRHSIKKNLIGALLFDSGETAEATRLKRTARRRYTRRKNRICYLQEIFSNEMAKVDDSFFHRLEESFLVEEDKKHERHPIFGNIVDEVAYHEKYPTIYHLRKKLVDSTDKADLRLIYLALAHMIKFRGHFLIEGDLNPDNSDVDKLFIQLVQTYNQLFEENPINASGVDAKAILSARLSKSRRLENLIAQLPGEKKNGLFGNLIALSLGLTPNFKSNFDLAEDAKLQLSKDTYDDDLDNLLAQIGDQYADLFLAAKNLSDAILLSDILRVNTEITKAPLSASMIKRYDEHHQDLTLLKALVRQQLPEKYKEIFFDQSKNGYAGYIDGGASQEEFYKFIKPILEKMDGTEELLVKLNREDLLRKQRTFDNGSIPHQIHLGELHAILRRQEDFYPFLKDNREKIEKILTFRIPYYVGPLARGNSRFAWMTRKSEETITPWNFEEVVDKGASAQSFIERMTNFDKNLPNEKVLPKHSLLYEYFTVYNELTKVKYVTEGMRKPAFLSGEQKKAIVDLLFKTNRKVTVKQLKEDYFKKIECFDSVEISGVEDRFNASLGTYHDLLKIIKDKDFLDNEENEDILEDIVLTLTLFEDREMIEERLKTYAHLFDDKVMKQLKRRRYTGWGRLSRKLINGIRDKQSGKTILDFLKSDGFANRNFMQLIHDDSLTFKEDIQKAQVSGQGDSLHEHIANLAGSPAIKKGILQTVKVVDELVKVMGRHKPENIVIEMARENQTTQKGQKNSRERMKRIEEGIKELGSQILKEHPVENTQLQNEKLYLYYLQNGRDMYVDQELDINRLSDYDVDHIVPQSFLKDDSIDNKVLTRSDKARGKSDNVPSEEVVKKMKNYWRQLLNAKLITQRKFDNLTKAERGGLSELDKAGFIKRQLVETRQITKHVAQILDSRMNTKYDENDKLIREVKVITLKSKLVSDFRKDFQFYKVREINNYHHAHDAYLNAVVGTALIKKYPKLESEFVYGDYKVYDVRKMIAKSEQEIGKATAKYFFYSNIMNFFKTEITLANGEIRKRPLIETNGETGEIVWDKGRDFATVRKVLSMPQVNIVKKTEVQTGGFSKESILPKRNSDKLIARKKDWDPKKYGGFDSPTVAYSVLVVAKVEKGKSKKLKSVKELLGITIMERSSFEKNPIDFLEAKGYKEVKKDLIIKLPKYSLFELENGRKRMLASAGELQKGNELALPSKYVNFLYLASHYEKLKGSPEDNEQKQLFVEQHKHYLDEIIEQISEFSKRVILADANLDKVLSAYNKHRDKPIREQAENIIHLFTLTNLGAPAAFKYFDTTIDRKRYTSTKEVLDATLIHQSITGLYETRIDLSQLGGDGGEAAAKGGSPAPGGVLNLEEEYRLHEKPVPSSIDPSWLQLFPTVWAERAGMGLANQVPPVVVELRSGASPVAVRQYPMSKEAREGIRPHIQRFLDLGVLVPCQSPWNTPLLPVKKPGTNDYRPVQDLREINKRVQDIHPTVPNPYNLLSSLPPSHTWYSVLDLKDAFFCLKLHPNSQPLFAFEWRDPEKGNTGQLTWTRLPQGFKNSPTLFNEALHRDLAPFRALNPQVVLLQYVDDLLVAAPTYRDCKEGTQKLLQELSKLGYRVSAKKAQLCQKEVTYLGYLLKEGKRWLTPARKATVMKIPPPTTPRQVREFLGTAGFCRLWIPGFASLAAPLYPLTKPSIPFIWTEEHQKAFDRIKEALLSAPALALPDLTKPFTLYVDERAGVARGVLTQTLGPWRRPVAYLSKKLDPVASGWPTCLKAVAAVALLLKDADKLTLGQNVTVIASHSLESIVRQPPDRWMTNARMTHYQSLLLNERVSFAPPAVLNPATLLPVESEATPVHRCSEILAEETGTRRDLKDQPLPGVPAWYTDGSSFIAEGKRRAGAAIVDGKRTVWASSLPEGTSAQKAELVALTQALRLAEGKDINIYTDSRYAFATAHIHGAIYKQRGWLTSAGKDIKNKEEILALLEAIHLPKRVAIIHCPGHQKGNDPVATGNRRADEAAKQAALSTRVLAETTKPAGKRTADGSEFEKRTADGSEFESPKKKAKVE

SEQ ID NO: 830 - protein, 2094 aa, synthetic construct
MPAAKRVKLDGGDKKYSIGLDIGTNSVGWAVITDEYKVPSKKFKVLGNTDRHSIKKNLIGALLFDSGETAEATRLKRTARRRYTRRKNRICYLQEIFSNEMAKVDDSFFHRLEESFLVEEDKKHERHPIFGNIVDEVAYHEKYPTIYHLRKKLVDSTDKADLRLIYLALAHMIKFRGHFLIEGDLNPDNSDVDKLFIQLVQTYNQLFEENPINASGVDAKAILSARLSKSRRLENLIAQLPGEKKNGLFGNLIALSLGLTPNFKSNFDLAEDAKLQLSKDTYDDDLDNLLAQIGDQYADLFLAAKNLSDAILLSDILRVNTEITKAPLSASMIKRYDEHHQDLTLLKALVRQQLPEKYKEIFFDQSKNGYAGYIDGGASQEEFYKFIKPILEKMDGTEELLVKLNREDLLRKQRTFDNGSIPHQIHLGELHAILRRQEDFYPFLKDNREKIEKILTFRIPYYVGPLARGNSRFAWMTRKSEETITPWNFEEVVDKGASAQSFIERMTNFDKNLPNEKVLPKHSLLYEYFTVYNELTKVKYVTEGMRKPAFLSGEQKKAIVDLLFKTNRKVTVKQLKEDYFKKIECFDSVEISGVEDRFNASLGTYHDLLKIIKDKDFLDNEENEDILEDIVLTLTLFEDREMIEERLKTYAHLFDDKVMKQLKRRRYTGWGRLSRKLINGIRDKQSGKTILDFLKSDGFANRNFMQLIHDDSLTFKEDIQKAQVSGQGDSLHEHIANLAGSPAIKKGILQTVKVVDELVKVMGRHKPENIVIEMARENQTTQKGQKNSRERMKRIEEGIKELGSQILKEHPVENTQLQNEKLYLYYLQNGRDMYVDQELDINRLSDYDVDHIVPQSFLKDDSIDNKVLTRSDKARGKSDNVPSEEVVKKMKNYWRQLLNAKLITQRKFDNLTKAERGGLSELDKAGFIKRQLVETRQITKHVAQILDSRMNTKYDENDKLIREVKVITLKSKLVSDFRKDFQFYKVREINNYHHAHDAYLNAVVGTALIKKYPKLESEFVYGDYKVYDVRKMIAKSEQEIGKATAKYFFYSNIMNFFKTEITLANGEIRKRPLIETNGETGEIVWDKGRDFATVRKVLSMPQVNIVKKTEVQTGGFSKESILPKRNSDKLIARKKDWDPKKYGGFDSPTVAYSVLVVAKVEKGKSKKLKSVKELLGITIMERSSFEKNPIDFLEAKGYKEVKKDLIIKLPKYSLFELENGRKRMLASAGELQKGNELALPSKYVNFLYLASHYEKLKGSPEDNEQKQLFVEQHKHYLDEIIEQISEFSKRVILADANLDKVLSAYNKHRDKPIREQAENIIHLFTLTNLGAPAAFKYFDTTIDRKRYTSTKEVLDATLIHQSITGLYETRIDLSQLGGDGGEAAAKGGGGGSGGVLNLEEEYRLHEKPVPSSIDPSWLQLFPTVWAERAGMGLANQVPPVVVELRSGASPVAVRQYPMSKEAREGIRPHIQRFLDLGVLVPCQSPWNTPLLPVKKPGTNDYRPVQDLREINKRVQDIHPTVPNPYNLLSSLPPSHTWYSVLDLKDAFFCLKLHPNSQPLFAFEWRDPEKGNTGQLTWTRLPQGFKNSPTLFNEALHRDLAPFRALNPQVVLLQYVDDLLVAAPTYRDCKEGTQKLLQELSKLGYRVSAKKAQLCQKEVTYLGYLLKEGKRWLTPARKATVMKIPPPTTPRQVREFLGTAGFCRLWIPGFASLAAPLYPLTKPSIPFIWTEEHQKAFDRIKEALLSAPALALPDLTKPFTLYVDERAGVARGVLTQTLGPWRRPVAYLSKKLDPVASGWPTCLKAVAAVALLLKDADKLTLGQNVTVIASHSLESIVRQPPDRWMTNARMTHYQSLLLNERVSFAPPAVLNPATLLPVESEATPVHRCSEILAEETGTRRDLKDQPLPGVPAWYTDGSSFIAEGKRRAGAAIVDGKRTVWASSLPEGTSAQKAELVALTQALRLAEGKDINIYTDSRYAFATAHIHGAIYKQRGWLTSAGKDIKNKEEILALLEAIHLPKRVAIIHCPGHQKGNDPVATGNRRADEAAKQAALSTRVLAETTKPAGKRTADGSEFEKRTADGSEFESPKKKAKVE

SEQ ID NO: 831 - protein, 2094 aa, synthetic construct
MPAAKRVKLDGGDKKYSIGLDIGTNSVGWAVITDEYKVPSKKFKVLGNTDRHSIKKNLIGALLFDSGETAEATRLKRTARRRYTRRKNRICYLQEIFSNEMAKVDDSFFHRLEESFLVEEDKKHERHPIFGNIVDEVAYHEKYPTIYHLRKKLVDSTDKADLRLIYLALAHMIKFRGHFLIEGDLNPDNSDVDKLFIQLVQTYNQLFEENPINASGVDAKAILSARLSKSRRLENLIAQLPGEKKNGLFGNLIALSLGLTPNFKSNFDLAEDAKLQLSKDTYDDDLDNLLAQIGDQYADLFLAAKNLSDAILLSDILRVNTEITKAPLSASMIKRYDEHHQDLTLLKALVRQQLPEKYKEIFFDQSKNGYAGYIDGGASQEEFYKFIKPILEKMDGTEELLVKLNREDLLRKQRTFDNGSIPHQIHLGELHAILRRQEDFYPFLKDNREKIEKILTFRIPYYVGPLARGNSRFAWMTRKSEETITPWNFEEVVDKGASAQSFIERMTNFDKNLPNEKVLPKHSLLYEYFTVYNELTKVKYVTEGMRKPAFLSGEQKKAIVDLLFKTNRKVTVKQLKEDYFKKIECFDSVEISGVEDRFNASLGTYHDLLKIIKDKDFLDNEENEDILEDIVLTLTLFEDREMIEERLKTYAHLFDDKVMKQLKRRRYTGWGRLSRKLINGIRDKQSGKTILDFLKSDGFANRNFMQLIHDDSLTFKEDIQKAQVSGQGDSLHEHIANLAGSPAIKKGILQTVKVVDELVKVMGRHKPENIVIEMARENQTTQKGQKNSRERMKRIEEGIKELGSQILKEHPVENTQLQNEKLYLYYLQNGRDMYVDQELDINRLSDYDVDHIVPQSFLKDDSIDNKVLTRSDKARGKSDNVPSEEVVKKMKNYWRQLLNAKLITQRKFDNLTKAERGGLSELDKAGFIKRQLVETRQITKHVAQILDSRMNTKYDENDKLIREVKVITLKSKLVSDFRKDFQFYKVREINNYHHAHDAYLNAVVGTALIKKYPKLESEFVYGDYKVYDVRKMIAKSEQEIGKATAKYFFYSNIMNFFKTEITLANGEIRKRPLIETNGETGEIVWDKGRDFATVRKVLSMPQVNIVKKTEVQTGGFSKESILPKRNSDKLIARKKDWDPKKYGGFDSPTVAYSVLVVAKVEKGKSKKLKSVKELLGITIMERSSFEKNPIDFLEAKGYKEVKKDLIIKLPKYSLFELENGRKRMLASAGELQKGNELALPSKYVNFLYLASHYEKLKGSPEDNEQKQLFVEQHKHYLDEIIEQISEFSKRVILADANLDKVLSAYNKHRDKPIREQAENIIHLFTLTNLGAPAAFKYFDTTIDRKRYTSTKEVLDATLIHQSITGLYETRIDLSQLGGDGGPAPGSSEAAAKGGVLNLEEEYRLHEKPVPSSIDPSWLQLFPTVWAERAGMGLANQVPPVVVELRSGASPVAVRQYPMSKEAREGIRPHIQRFLDLGVLVPCQSPWNTPLLPVKKPGTNDYRPVQDLREINKRVQDIHPTVPNPYNLLSSLPPSHTWYSVLDLKDAFFCLKLHPNSQPLFAFEWRDPEKGNTGQLTWTRLPQGFKNSPTLFNEALHRDLAPFRALNPQVVLLQYVDDLLVAAPTYRDCKEGTQKLLQELSKLGYRVSAKKAQLCQKEVTYLGYLLKEGKRWLTPARKATVMKIPPPTTPRQVREFLGTAGFCRLWIPGFASLAAPLYPLTKPSIPFIWTEEHQKAFDRIKEALLSAPALALPDLTKPFTLYVDERAGVARGVLTQTLGPWRRPVAYLSKKLDPVASGWPTCLKAVAAVALLLKDADKLTLGQNVTVIASHSLESIVRQPPDRWMTNARMTHYQSLLLNERVSFAPPAVLNPATLLPVESEATPVHRCSEILAEETGTRRDLKDQPLPGVPAWYTDGSSFIAEGKRRAGAAIVDGKRTVWASSLPEGTSAQKAELVALTQALRLAEGKDINIYTDSRYAFATAHIHGAIYKQRGWLTSAGKDIKNKEEILALLEAIHLPKRVAIIHCPGHQKGNDPVATGNRRADEAAKQAALSTRVLAETTKPAGKRTADGSEFEKRTADGSEFESPKKKAKVE

SEQ ID NO: 832 - protein, 2091 aa, synthetic construct
MPAAKRVKLDGGDKKYSIGLDIGTNSVGWAVITDEYKVPSKKFKVLGNTDRHSIKKNLIGALLFDSGETAEATRLKRTARRRYTRRKNRICYLQEIFSNEMAKVDDSFFHRLEESFLVEEDKKHERHPIFGNIVDEVAYHEKYPTIYHLRKKLVDSTDKADLRLIYLALAHMIKFRGHFLIEGDLNPDNSDVDKLFIQLVQTYNQLFEENPINASGVDAKAILSARLSKSRRLENLIAQLPGEKKNGLFGNLIALSLGLTPNFKSNFDLAEDAKLQLSKDTYDDDLDNLLAQIGDQYADLFLAAKNLSDAILLSDILRVNTEITKAPLSASMIKRYDEHHQDLTLLKALVRQQLPEKYKEIFFDQSKNGYAGYIDGGASQEEFYKFIKPILEKMDGTEELLVKLNREDLLRKQRTFDNGSIPHQIHLGELHAILRRQEDFYPFLKDNREKIEKILTFRIPYYVGPLARGNSRFAWMTRKSEETITPWNFEEVVDKGASAQSFIERMTNFDKNLPNEKVLPKHSLLYEYFTVYNELTKVKYVTEGMRKPAFLSGEQKKAIVDLLFKTNRKVTVKQLKEDYFKKIECFDSVEISGVEDRFNASLGTYHDLLKIIKDKDFLDNEENEDILEDIVLTLTLFEDREMIEERLKTYAHLFDDKVMKQLKRRRYTGWGRLSRKLINGIRDKQSGKTILDFLKSDGFANRNFMQLIHDDSLTFKEDIQKAQVSGQGDSLHEHIANLAGSPAIKKGILQTVKVVDELVKVMGRHKPENIVIEMARENQTTQKGQKNSRERMKRIEEGIKELGSQILKEHPVENTQLQNEKLYLYYLQNGRDMYVDQELDINRLSDYDVDHIVPQSFLKDDSIDNKVLTRSDKARGKSDNVPSEEVVKKMKNYWRQLLNAKLITQRKFDNLTKAERGGLSELDKAGFIKRQLVETRQITKHVAQILDSRMNTKYDENDKLIREVKVITLKSKLVSDFRKDFQFYKVREINNYHHAHDAYLNAVVGTALIKKYPKLESEFVYGDYKVYDVRKMIAKSEQEIGKATAKYFFYSNIMNFFKTEITLANGEIRKRPLIETNGETGEIVWDKGRDFATVRKVLSMPQVNIVKKTEVQTGGFSKESILPKRNSDKLIARKKDWDPKKYGGFDSPTVAYSVLVVAKVEKGKSKKLKSVKELLGITIMERSSFEKNPIDFLEAKGYKEVKKDLIIKLPKYSLFELENGRKRMLASAGELQKGNELALPSKYVNFLYLASHYEKLKGSPEDNEQKQLFVEQHKHYLDEIIEQISEFSKRVILADANLDKVLSAYNKHRDKPIREQAENIIHLFTLTNLGAPAAFKYFDTTIDRKRYTSTKEVLDATLIHQSITGLYETRIDLSQLGGDGGEAAAKGGSGGVLNLEEEYRLHEKPVPSSIDPSWLQLFPTVWAERAGMGLANQVPPVVVELRSGASPVAVRQYPMSKEAREGIRPHIQRFLDLGVLVPCQSPWNTPLLPVKKPGTNDYRPVQDLREINKRVQDIHPTVPNPYNLLSSLPPSHTWYSVLDLKDAFFCLKLHPNSQPLFAFEWRDPEKGNTGQLTWTRLPQGFKNSPTLFNEALHRDLAPFRALNPQVVLLQYVDDLLVAAPTYRDCKEGTQKLLQELSKLGYRVSAKKAQLCQKEVTYLGYLLKEGKRWLTPARKATVMKIPPPTTPRQVREFLGTAGFCRLWIPGFASLAAPLYPLTKPSIPFIWTEEHQKAFDRIKEALLSAPALALPDLTKPFTLYVDERAGVARGVLTQTLGPWRRPVAYLSKKLDPVASGWPTCLKAVAAVALLLKDADKLTLGQNVTVIASHSLESIVRQPPDRWMTNARMTHYQSLLLNERVSFAPPAVLNPATLLPVESEATPVHRCSEILAEETGTRRDLKDQPLPGVPAWYTDGSSFIAEGKRRAGAAIVDGKRTVWASSLPEGTSAQKAELVALTQALRLAEGKDINIYTDSRYAFATAHIHGAIYKQRGWLTSAGKDIKNKEEILALLEAIHLPKRVAIIHCPGHQKGNDPVATGNRRADEAAKQAALSTRVLAETTKPAGKRTADGSEFEKRTADGSEFESPKKKAKVE

SEQ ID NO: 833 - protein, 2093 aa, synthetic construct
MPAAKRVKLDGGDKKYSIGLDIGTNSVGWAVITDEYKVPSKKFKVLGNTDRHSIKKNLIGALLFDSGETAEATRLKRTARRRYTRRKNRICYLQEIFSNEMAKVDDSFFHRLEESFLVEEDKKHERHPIFGNIVDEVAYHEKYPTIYHLRKKLVDSTDKADLRLIYLALAHMIKFRGHFLIEGDLNPDNSDVDKLFIQLVQTYNQLFEENPINASGVDAKAILSARLSKSRRLENLIAQLPGEKKNGLFGNLIALSLGLTPNFKSNFDLAEDAKLQLSKDTYDDDLDNLLAQIGDQYADLFLAAKNLSDAILLSDILRVNTEITKAPLSASMIKRYDEHHQDLTLLKALVRQQLPEKYKEIFFDQSKNGYAGYIDGGASQEEFYKFIKPILEKMDGTEELLVKLNREDLLRKQRTFDNGSIPHQIHLGELHAILRRQEDFYPFLKDNREKIEKILTFRIPYYVGPLARGNSRFAWMTRKSEETITPWNFEEVVDKGASAQSFIERMTNFDKNLPNEKVLPKHSLLYEYFTVYNELTKVKYVTEGMRKPAFLSGEQKKAIVDLLFKTNRKVTVKQLKEDYFKKIECFDSVEISGVEDRFNASLGTYHDLLKIIKDKDFLDNEENEDILEDIVLTLTLFEDREMIEERLKTYAHLFDDKVMKQLKRRRYTGWGRLSRKLINGIRDKQSGKTILDFLKSDGFANRNFMQLIHDDSLTFKEDIQKAQVSGQGDSLHEHIANLAGSPAIKKGILQTVKVVDELVKVMGRHKPENIVIEMARENQTTQKGQKNSRERMKRIEEGIKELGSQILKEHPVENTQLQNEKLYLYYLQNGRDMYVDQELDINRLSDYDVDHIVPQSFLKDDSIDNKVLTRSDKARGKSDNVPSEEVVKKMKNYWRQLLNAKLITQRKFDNLTKAERGGLSELDKAGFIKRQLVETRQITKHVAQILDSRMNTKYDENDKLIREVKVITLKSKLVSDFRKDFQFYKVREINNYHHAHDAYLNAVVGTALIKKYPKLESEFVYGDYKVYDVRKMIAKSEQEIGKATAKYFFYSNIMNFFKTEITLANGEIRKRPLIETNGETGEIVWDKGRDFATVRKVLSMPQVNIVKKTEVQTGGFSKESILPKRNSDKLIARKKDWDPKKYGGFDSPTVAYSVLVVAKVEKGKSKKLKSVKELLGITIMERSSFEKNPIDFLEAKGYKEVKKDLIIKLPKYSLFELENGRKRMLASAGELQKGNELALPSKYVNFLYLASHYEKLKGSPEDNEQKQLFVEQHKHYLDEIIEQISEFSKRVILADANLDKVLSAYNKHRDKPIREQAENIIHLFTLTNLGAPAAFKYFDTTIDRKRYTSTKEVLDATLIHQSITGLYETRIDLSQLGGDGGEAAAKEAAAKGGVLNLEEEYRLHEKPVPSSIDPSWLQLFPTVWAERAGMGLANQVPPVVVELRSGASPVAVRQYPMSKEAREGIRPHIQRFLDLGVLVPCQSPWNTPLLPVKKPGTNDYRPVQDLREINKRVQDIHPTVPNPYNLLSSLPPSHTWYSVLDLKDAFFCLKLHPNSQPLFAFEWRDPEKGNTGQLTWTRLPQGFKNSPTLFNEALHRDLAPFRALNPQVVLLQYVDDLLVAAPTYRDCKEGTQKLLQELSKLGYRVSAKKAQLCQKEVTYLGYLLKEGKRWLTPARKATVMKIPPPTTPRQVREFLGTAGFCRLWIPGFASLAAPLYPLTKPSIPFIWTEEHQKAFDRIKEALLSAPALALPDLTKPFTLYVDERAGVARGVLTQTLGPWRRPVAYLSKKLDPVASGWPTCLKAVAAVALLLKDADKLTLGQNVTVIASHSLESIVRQPPDRWMTNARMTHYQSLLLNERVSFAPPAVLNPATLLPVESEATPVHRCSEILAEETGTRRDLKDQPLPGVPAWYTDGSSFIAEGKRRAGAAIVDGKRTVWASSLPEGTSAQKAELVALTQALRLAEGKDINIYTDSRYAFATAHIHGAIYKQRGWLTSAGKDIKNKEEILALLEAIHLPKRVAIIHCPGHQKGNDPVATGNRRADEAAKQAALSTRVLAETTKPAGKRTADGSEFEKRTADGSEFESPKKKAKVE

SEQ ID NO: 834 - protein, 2094 aa, synthetic construct
MPAAKRVKLDGGDKKYSIGLDIGTNSVGWAVITDEYKVPSKKFKVLGNTDRHSIKKNLIGALLFDSGETAEATRLKRTARRRYTRRKNRICYLQEIFSNEMAKVDDSFFHRLEESFLVEEDKKHERHPIFGNIVDEVAYHEKYPTIYHLRKKLVDSTDKADLRLIYLALAHMIKFRGHFLIEGDLNPDNSDVDKLFIQLVQTYNQLFEENPINASGVDAKAILSARLSKSRRLENLIAQLPGEKKNGLFGNLIALSLGLTPNFKSNFDLAEDAKLQLSKDTYDDDLDNLLAQIGDQYADLFLAAKNLSDAILLSDILRVNTEITKAPLSASMIKRYDEHHQDLTLLKALVRQQLPEKYKEIFFDQSKNGYAGYIDGGASQEEFYKFIKPILEKMDGTEELLVKLNREDLLRKQRTFDNGSIPHQIHLGELHAILRRQEDFYPFLKDNREKIEKILTFRIPYYVGPLARGNSRFAWMTRKSEETITPWNFEEVVDKGASAQSFIERMTNFDKNLPNEKVLPKHSLLYEYFTVYNELTKVKYVTEGMRKPAFLSGEQKKAIVDLLFKTNRKVTVKQLKEDYFKKIECFDSVEISGVEDRFNASLGTYHDLLKIIKDKDFLDNEENEDILEDIVLTLTLFEDREMIEERLKTYAHLFDDKVMKQLKRRRYTGWGRLSRKLINGIRDKQSGKTILDFLKSDGFANRNFMQLIHDDSLTFKEDIQKAQVSGQGDSLHEHIANLAGSPAIKKGILQTVKVVDELVKVMGRHKPENIVIEMARENQTTQKGQKNSRERMKRIEEGIKELGSQILKEHPVENTQLQNEKLYLYYLQNGRDMYVDQELDINRLSDYDVDHIVPQSFLKDDSIDNKVLTRSDKARGKSDNVPSEEVVKKMKNYWRQLLNAKLITQRKFDNLTKAERGGLSELDKAGFIKRQLVETRQITKHVAQILDSRMNTKYDENDKLIREVKVITLKSKLVSDFRKDFQFYKVREINNYHHAHDAYLNAVVGTALIKKYPKLESEFVYGDYKVYDVRKMIAKSEQEIGKATAKYFFYSNIMNFFKTEITLANGEIRKRPLIETNGETGEIVWDKGRDFATVRKVLSMPQVNIVKKTEVQTGGFSKESILPKRNSDKLIARKKDWDPKKYGGFDSPTVAYSVLVVAKVEKGKSKKLKSVKELLGITIMERSSFEKNPIDFLEAKGYKEVKKDLIIKLPKYSLFELENGRKRMLASAGELQKGNELALPSKYVNFLYLASHYEKLKGSPEDNEQKQLFVEQHKHYLDEIIEQISEFSKRVILADANLDKVLSAYNKHRDKPIREQAENIIHLFTLTNLGAPAAFKYFDTTIDRKRYTSTKEVLDATLIHQSITGLYETRIDLSQLGGDGGEAAAKPAPGSSGGVLNLEEEYRLHEKPVPSSIDPSWLQLFPTVWAERAGMGLANQVPPVVVELRSGASPVAVRQYPMSKEAREGIRPHIQRFLDLGVLVPCQSPWNTPLLPVKKPGTNDYRPVQDLREINKRVQDIHPTVPNPYNLLSSLPPSHTWYSVLDLKDAFFCLKLHPNSQPLFAFEWRDPEKGNTGQLTWTRLPQGFKNSPTLFNEALHRDLAPFRALNPQVVLLQYVDDLLVAAPTYRDCKEGTQKLLQELSKLGYRVSAKKAQLCQKEVTYLGYLLKEGKRWLTPARKATVMKIPPPTTPRQVREFLGTAGFCRLWIPGFASLAAPLYPLTKPSIPFIWTEEHQKAFDRIKEALLSAPALALPDLTKPFTLYVDERAGVARGVLTQTLGPWRRPVAYLSKKLDPVASGWPTCLKAVAAVALLLKDADKLTLGQNVTVIASHSLESIVRQPPDRWMTNARMTHYQSLLLNERVSFAPPAVLNPATLLPVESEATPVHRCSEILAEETGTRRDLKDQPLPGVPAWYTDGSSFIAEGKRRAGAAIVDGKRTVWASSLPEGTSAQKAELVALTQALRLAEGKDINIYTDSRYAFATAHIHGAIYKQRGWLTSAGKDIKNKEEILALLEAIHLPKRVAIIHCPGHQKGNDPVATGNRRADEAAKQAALSTRVLAETTKPAGKRTADGSEFEKRTADGSEFESPKKKAKVE

SEQ ID NO: 835 - protein, 2092 aa, synthetic construct
MPAAKRVKLDGGDKKYSIGLDIGTNSVGWAVITDEYKVPSKKFKVLGNTDRHSIKKNLIGALLFDSGETAEATRLKRTARRRYTRRKNRICYLQEIFSNEMAKVDDSFFHRLEESFLVEEDKKHERHPIFGNIVDEVAYHEKYPTIYHLRKKLVDSTDKADLRLIYLALAHMIKFRGHFLIEGDLNPDNSDVDKLFIQLVQTYNQLFEENPINASGVDAKAILSARLSKSRRLENLIAQLPGEKKNGLFGNLIALSLGLTPNFKSNFDLAEDAKLQLSKDTYDDDLDNLLAQIGDQYADLFLAAKNLSDAILLSDILRVNTEITKAPLSASMIKRYDEHHQDLTLLKALVRQQLPEKYKEIFFDQSKNGYAGYIDGGASQEEFYKFIKPILEKMDGTEELLVKLNREDLLRKQRTFDNGSIPHQIHLGELHAILRRQEDFYPFLKDNREKIEKILTFRIPYYVGPLARGNSRFAWMTRKSEETITPWNFEEVVDKGASAQSFIERMTNFDKNLPNEKVLPKHSLLYEYFTVYNELTKVKYVTEGMRKPAFLSGEQKKAIVDLLFKTNRKVTVKQLKEDYFKKIECFDSVEISGVEDRFNASLGTYHDLLKIIKDKDFLDNEENEDILEDIVLTLTLFEDREMIEERLKTYAHLFDDKVMKQLKRRRYTGWGRLSRKLINGIRDKQSGKTILDFLKSDGFANRNFMQLIHDDSLTFKEDIQKAQVSGQGDSLHEHIANLAGSPAIKKGILQTVKVVDELVKVMGRHKPENIVIEMARENQTTQKGQKNSRERMKRIEEGIKELGSQILKEHPVENTQLQNEKLYLYYLQNGRDMYVDQELDINRLSDYDVDHIVPQSFLKDDSIDNKVLTRSDKARGKSDNVPSEEVVKKMKNYWRQLLNAKLITQRKFDNLTKAERGGLSELDKAGFIKRQLVETRQITKHVAQILDSRMNTKYDENDKLIREVKVITLKSKLVSDFRKDFQFYKVREINNYHHAHDAYLNAVVGTALIKKYPKLESEFVYGDYKVYDVRKMIAKSEQEIGKATAKYFFYSNIMNFFKTEITLANGEIRKRPLIETNGETGEIVWDKGRDFATVRKVLSMPQVNIVKKTEVQTGGFSKESILPKRNSDKLIARKKDWDPKKYGGFDSPTVAYSVLVVAKVEKGKSKKLKSVKELLGITIMERSSFEKNPIDFLEAKGYKEVKKDLIIKLPKYSLFELENGRKRMLASAGELQKGNELALPSKYVNFLYLASHYEKLKGSPEDNEQKQLFVEQHKHYLDEIIEQISEFSKRVILADANLDKVLSAYNKHRDKPIREQAENIIHLFTLTNLGAPAAFKYFDTTIDRKRYTSTKEVLDATLIHQSITGLYETRIDLSQLGGDGGGSSGSSGSSGGVLNLEEEYRLHEKPVPSSIDPSWLQLFPTVWAERAGMGLANQVPPVVVELRSGASPVAVRQYPMSKEAREGIRPHIQRFLDLGVLVPCQSPWNTPLLPVKKPGTNDYRPVQDLREINKRVQDIHPTVPNPYNLLSSLPPSHTWYSVLDLKDAFFCLKLHPNSQPLFAFEWRDPEKGNTGQLTWTRLPQGFKNSPTLFNEALHRDLAPFRALNPQVVLLQYVDDLLVAAPTYRDCKEGTQKLLQELSKLGYRVSAKKAQLCQKEVTYLGYLLKEGKRWLTPARKATVMKIPPPTTPRQVREFLGTAGFCRLWIPGFASLAAPLYPLTKPSIPFIWTEEHQKAFDRIKEALLSAPALALPDLTKPFTLYVDERAGVARGVLTQTLGPWRRPVAYLSKKLDPVASGWPTCLKAVAAVALLLKDADKLTLGQNVTVIASHSLESIVRQPPDRWMTNARMTHYQSLLLNERVSFAPPAVLNPATLLPVESEATPVHRCSEILAEETGTRRDLKDQPLPGVPAWYTDGSSFIAEGKRRAGAAIVDGKRTVWASSLPEGTSAQKAELVALTQALRLAEGKDINIYTDSRYAFATAHIHGAIYKQRGWLTSAGKDIKNKEEILALLEAIHLPKRVAIIHCPGHQKGNDPVATGNRRADEAAKQAALSTRVLAETTKPAGKRTADGSEFEKRTADGSEFESPKKKAKVE

SEQ ID NO: 836 - protein, 2091 aa, synthetic construct
MPAAKRVKLDGGDKKYSIGLDIGTNSVGWAVITDEYKVPSKKFKVLGNTDRHSIKKNLIGALLFDSGETAEATRLKRTARRRYTRRKNRICYLQEIFSNEMAKVDDSFFHRLEESFLVEEDKKHERHPIFGNIVDEVAYHEKYPTIYHLRKKLVDSTDKADLRLIYLALAHMIKFRGHFLIEGDLNPDNSDVDKLFIQLVQTYNQLFEENPINASGVDAKAILSARLSKSRRLENLIAQLPGEKKNGLFGNLIALSLGLTPNFKSNFDLAEDAKLQLSKDTYDDDLDNLLAQIGDQYADLFLAAKNLSDAILLSDILRVNTEITKAPLSASMIKRYDEHHQDLTLLKALVRQQLPEKYKEIFFDQSKNGYAGYIDGGASQEEFYKFIKPILEKMDGTEELLVKLNREDLLRKQRTFDNGSIPHQIHLGELHAILRRQEDFYPFLKDNREKIEKILTFRIPYYVGPLARGNSRFAWMTRKSEETITPWNFEEVVDKGASAQSFIERMTNFDKNLPNEKVLPKHSLLYEYFTVYNELTKVKYVTEGMRKPAFLSGEQKKAIVDLLFKTNRKVTVKQLKEDYFKKIECFDSVEISGVEDRFNASLGTYHDLLKIIKDKDFLDNEENEDILEDIVLTLTLFEDREMIEERLKTYAHLFDDKVMKQLKRRRYTGWGRLSRKLINGIRDKQSGKTILDFLKSDGFANRNFMQLIHDDSLTFKEDIQKAQVSGQGDSLHEHIANLAGSPAIKKGILQTVKVVDELVKVMGRHKPENIVIEMARENQTTQKGQKNSRERMKRIEEGIKELGSQILKEHPVENTQLQNEKLYLYYLQNGRDMYVDQELDINRLSDYDVDHIVPQSFLKDDSIDNKVLTRSDKARGKSDNVPSEEVVKKMKNYWRQLLNAKLITQRKFDNLTKAERGGLSELDKAGFIKRQLVETRQITKHVAQILDSRMNTKYDENDKLIREVKVITLKSKLVSDFRKDFQFYKVREINNYHHAHDAYLNAVVGTALIKKYPKLESEFVYGDYKVYDVRKMIAKSEQEIGKATAKYFFYSNIMNFFKTEITLANGEIRKRPLIETNGETGEIVWDKGRDFATVRKVLSMPQVNIVKKTEVQTGGFSKESILPKRNSDKLIARKKDWDPKKYGGFDSPTVAYSVLVVAKVEKGKSKKLKSVKELLGITIMERSSFEKNPIDFLEAKGYKEVKKDLIIKLPKYSLFELENGRKRMLASAGELQKGNELALPSKYVNFLYLASHYEKLKGSPEDNEQKQLFVEQHKHYLDEIIEQISEFSKRVILADANLDKVLSAYNKHRDKPIREQAENIIHLFTLTNLGAPAAFKYFDTTIDRKRYTSTKEVLDATLIHQSITGLYETRIDLSQLGGDGGEAAAKGSSGGVLNLEEEYRLHEKPVPSSIDPSWLQLFPTVWAERAGMGLANQVPPVVVELRSGASPVAVRQYPMSKEAREGIRPHIQRFLDLGVLVPCQSPWNTPLLPVKKPGTNDYRPVQDLREINKRVQDIHPTVPNPYNLLSSLPPSHTWYSVLDLKDAFFCLKLHPNSQPLFAFEWRDPEKGNTGQLTWTRLPQGFKNSPTLFNEALHRDLAPFRALNPQVVLLQYVDDLLVAAPTYRDCKEGTQKLLQELSKLGYRVSAKKAQLCQKEVTYLGYLLKEGKRWLTPARKATVMKIPPPTTPRQVREFLGTAGFCRLWIPGFASLAAPLYPLTKPSIPFIWTEEHQKAFDRIKEALLSAPALALPDLTKPFTLYVDERAGVARGVLTQTLGPWRRPVAYLSKKLDPVASGWPTCLKAVAAVALLLKDADKLTLGQNVTVIASHSLESIVRQPPDRWMTNARMTHYQSLLLNERVSFAPPAVLNPATLLPVESEATPVHRCSEILAEETGTRRDLKDQPLPGVPAWYTDGSSFIAEGKRRAGAAIVDGKRTVWASSLPEGTSAQKAELVALTQALRLAEGKDINIYTDSRYAFATAHIHGAIYKQRGWLTSAGKDIKNKEEILALLEAIHLPKRVAIIHCPGHQKGNDPVATGNRRADEAAKQAALSTRVLAETTKPAGKRTADGSEFEKRTADGSEFESPKKKAKVE

SEQ ID NO: 837 - protein, 2091 aa, synthetic construct
MPAAKRVKLDGGDKKYSIGLDIGTNSVGWAVITDEYKVPSKKFKVLGNTDRHSIKKNLIGALLFDSGETAEATRLKRTARRRYTRRKNRICYLQEIFSNEMAKVDDSFFHRLEESFLVEEDKKHERHPIFGNIVDEVAYHEKYPTIYHLRKKLVDSTDKADLRLIYLALAHMIKFRGHFLIEGDLNPDNSDVDKLFIQLVQTYNQLFEENPINASGVDAKAILSARLSKSRRLENLIAQLPGEKKNGLFGNLIALSLGLTPNFKSNFDLAEDAKLQLSKDTYDDDLDNLLAQIGDQYADLFLAAKNLSDAILLSDILRVNTEITKAPLSASMIKRYDEHHQDLTLLKALVRQQLPEKYKEIFFDQSKNGYAGYIDGGASQEEFYKFIKPILEKMDGTEELLVKLNREDLLRKQRTFDNGSIPHQIHLGELHAILRRQEDFYPFLKDNREKIEKILTFRIPYYVGPLARGNSRFAWMTRKSEETITPWNFEEVVDKGASAQSFIERMTNFDKNLPNEKVLPKHSLLYEYFTVYNELTKVKYVTEGMRKPAFLSGEQKKAIVDLLFKTNRKVTVKQLKEDYFKKIECFDSVEISGVEDRFNASLGTYHDLLKIIKDKDFLDNEENEDILEDIVLTLTLFEDREMIEERLKTYAHLFDDKVMKQLKRRRYTGWGRLSRKLINGIRDKQSGKTILDFLKSDGFANRNFMQLIHDDSLTFKEDIQKAQVSGQGDSLHEHIANLAGSPAIKKGILQTVKVVDELVKVMGRHKPENIVIEMARENQTTQKGQKNSRERMKRIEEGIKELGSQILKEHPVENTQLQNEKLYLYYLQNGRDMYVDQELDINRLSDYDVDHIVPQSFLKDDSIDNKVLTRSDKARGKSDNVPSEEVVKKMKNYWRQLLNAKLITQRKFDNLTKAERGGLSELDKAGFIKRQLVETRQITKHVAQILDSRMNTKYDENDKLIREVKVITLKSKLVSDFRKDFQFYKVREINNYHHAHDAYLNAVVGTALIKKYPKLESEFVYGDYKVYDVRKMIAKSEQEIGKATAKYFFYSNIMNFFKTEITLANGEIRKRPLIETNGETGEIVWDKGRDFATVRKVLSMPQVNIVKKTEVQTGGFSKESILPKRNSDKLIARKKDWDPKKYGGFDSPTVAYSVLVVAKVEKGKSKKLKSVKELLGITIMERSSFEKNPIDFLEAKGYKEVKKDLIIKLPKYSLFELENGRKRMLASAGELQKGNELALPSKYVNFLYLASHYEKLKGSPEDNEQKQLFVEQHKHYLDEIIEQISEFSKRVILADANLDKVLSAYNKHRDKPIREQAENIIHLFTLTNLGAPAAFKYFDTTIDRKRYTSTKEVLDATLIHQSITGLYETRIDLSQLGGDGGGGGEAAAKGGVLNLEEEYRLHEKPVPSSIDPSWLQLFPTVWAERAGMGLANQVPPVVVELRSGASPVAVRQYPMSKEAREGIRPHIQRFLDLGVLVPCQSPWNTPLLPVKKPGTNDYRPVQDLREINKRVQDIHPTVPNPYNLLSSLPPSHTWYSVLDLKDAFFCLKLHPNSQPLFAFEWRDPEKGNTGQLTWTRLPQGFKNSPTLFNEALHRDLAPFRALNPQVVLLQYVDDLLVAAPTYRDCKEGTQKLLQELSKLGYRVSAKKAQLCQKEVTYLGYLLKEGKRWLTPARKATVMKIPPPTTPRQVREFLGTAGFCRLWIPGFASLAAPLYPLTKPSIPFIWTEEHQKAFDRIKEALLSAPALALPDLTKPFTLYVDERAGVARGVLTQTLGPWRRPVAYLSKKLDPVASGWPTCLKAVAAVALLLKDADKLTLGQNVTVIASHSLESIVRQPPDRWMTNARMTHYQSLLLNERVSFAPPAVLNPATLLPVESEATPVHRCSEILAEETGTRRDLKDQPLPGVPAWYTDGSSFIAEGKRRAGAAIVDGKRTVWASSLPEGTSAQKAELVALTQALRLAEGKDINIYTDSRYAFATAHIHGAIYKQRGWLTSAGKDIKNKEEILALLEAIHLPKRVAIIHCPGHQKGNDPVATGNRRADEAAKQAALSTRVLAETTKPAGKRTADGSEFEKRTADGSEFESPKKKAKVE

SEQ ID NO: 838 - protein, 2091 aa, synthetic construct
MPAAKRVKLDGGDKKYSIGLDIGTNSVGWAVITDEYKVPSKKFKVLGNTDRHSIKKNLIGALLFDSGETAEATRLKRTARRRYTRRKNRICYLQEIFSNEMAKVDDSFFHRLEESFLVEEDKKHERHPIFGNIVDEVAYHEKYPTIYHLRKKLVDSTDKADLRLIYLALAHMIKFRGHFLIEGDLNPDNSDVDKLFIQLVQTYNQLFEENPINASGVDAKAILSARLSKSRRLENLIAQLPGEKKNGLFGNLIALSLGLTPNFKSNFDLAEDAKLQLSKDTYDDDLDNLLAQIGDQYADLFLAAKNLSDAILLSDILRVNTEITKAPLSASMIKRYDEHHQDLTLLKALVRQQLPEKYKEIFFDQSKNGYAGYIDGGASQEEFYKFIKPILEKMDGTEELLVKLNREDLLRKQRTFDNGSIPHQIHLGELHAILRRQEDFYPFLKDNREKIEKILTFRIPYYVGPLARGNSRFAWMTRKSEETITPWNFEEVVDKGASAQSFIERMTNFDKNLPNEKVLPKHSLLYEYFTVYNELTKVKYVTEGMRKPAFLSGEQKKAIVDLLFKTNRKVTVKQLKEDYFKKIECFDSVEISGVEDRFNASLGTYHDLLKIIKDKDFLDNEENEDILEDIVLTLTLFEDREMIEERLKTYAHLFDDKVMKQLKRRRYTGWGRLSRKLINGIRDKQSGKTILDFLKSDGFANRNFMQLIHDDSLTFKEDIQKAQVSGQGDSLHEHIANLAGSPAIKKGILQTVKVVDELVKVMGRHKPENIVIEMARENQTTQKGQKNSRERMKRIEEGIKELGSQILKEHPVENTQLQNEKLYLYYLQNGRDMYVDQELDINRLSDYDVDHIVPQSFLKDDSIDNKVLTRSDKARGKSDNVPSEEVVKKMKNYWRQLLNAKLITQRKFDNLTKAERGGLSELDKAGFIKRQLVETRQITKHVAQILDSRMNTKYDENDKLIREVKVITLKSKLVSDFRKDFQFYKVREINNYHHAHDAYLNAVVGTALIKKYPKLESEFVYGDYKVYDVRKMIAKSEQEIGKATAKYFFYSNIMNFFKTEITLANGEIRKRPLIETNGETGEIVWDKGRDFATVRKVLSMPQVNIVKKTEVQTGGFSKESILPKRNSDKLIARKKDWDPKKYGGFDSPTVAYSVLVVAKVEKGKSKKLKSVKELLGITIMERSSFEKNPIDFLEAKGYKEVKKDLIIKLPKYSLFELENGRKRMLASAGELQKGNELALPSKYVNFLYLASHYEKLKGSPEDNEQKQLFVEQHKHYLDEIIEQISEFSKRVILADANLDKVLSAYNKHRDKPIREQAENIIHLFTLTNLGAPAAFKYFDTTIDRKRYTSTKEVLDATLIHQSITGLYETRIDLSQLGGDGGGSSEAAAKGGVLNLEEEYRLHEKPVPSSIDPSWLQLFPTVWAERAGMGLANQVPPVVVELRSGASPVAVRQYPMSKEAREGIRPHIQRFLDLGVLVPCQSPWNTPLLPVKKPGTNDYRPVQDLREINKRVQDIHPTVPNPYNLLSSLPPSHTWYSVLDLKDAFFCLKLHPNSQPLFAFEWRDPEKGNTGQLTWTRLPQGFKNSPTLFNEALHRDLAPFRALNPQVVLLQYVDDLLVAAPTYRDCKEGTQKLLQELSKLGYRVSAKKAQLCQKEVTYLGYLLKEGKRWLTPARKATVMKIPPPTTPRQVREFLGTAGFCRLWIPGFASLAAPLYPLTKPSIPFIWTEEHQKAFDRIKEALLSAPALALPDLTKPFTLYVDERAGVARGVLTQTLGPWRRPVAYLSKKLDPVASGWPTCLKAVAAVALLLKDADKLTLGQNVTVIASHSLESIVRQPPDRWMTNARMTHYQSLLLNERVSFAPPAVLNPATLLPVESEATPVHRCSEILAEETGTRRDLKDQPLPGVPAWYTDGSSFIAEGKRRAGAAIVDGKRTVWASSLPEGTSAQKAELVALTQALRLAEGKDINIYTDSRYAFATAHIHGAIYKQRGWLTSAGKDIKNKEEILALLEAIHLPKRVAIIHCPGHQKGNDPVATGNRRADEAAKQAALSTRVLAETTKPAGKRTADGSEFEKRTADGSEFESPKKKAKVE

SEQ ID NO: 839 - protein, 2094 aa, synthetic construct
MPAAKRVKLDGGDKKYSIGLDIGTNSVGWAVITDEYKVPSKKFKVLGNTDRHSIKKNLIGALLFDSGETAEATRLKRTARRRYTRRKNRICYLQEIFSNEMAKVDDSFFHRLEESFLVEEDKKHERHPIFGNIVDEVAYHEKYPTIYHLRKKLVDSTDKADLRLIYLALAHMIKFRGHFLIEGDLNPDNSDVDKLFIQLVQTYNQLFEENPINASGVDAKAILSARLSKSRRLENLIAQLPGEKKNGLFGNLIALSLGLTPNFKSNFDLAEDAKLQLSKDTYDDDLDNLLAQIGDQYADLFLAAKNLSDAILLSDILRVNTEITKAPLSASMIKRYDEHHQDLTLLKALVRQQLPEKYKEIFFDQSKNGYAGYIDGGASQEEFYKFIKPILEKMDGTEELLVKLNREDLLRKQRTFDNGSIPHQIHLGELHAILRRQEDFYPFLKDNREKIEKILTFRIPYYVGPLARGNSRFAWMTRKSEETITPWNFEEVVDKGASAQSFIERMTNFDKNLPNEKVLPKHSLLYEYFTVYNELTKVKYVTEGMRKPAFLSGEQKKAIVDLLFKTNRKVTVKQLKEDYFKKIECFDSVEISGVEDRFNASLGTYHDLLKIIKDKDFLDNEENEDILEDIVLTLTLFEDREMIEERLKTYAHLFDDKVMKQLKRRRYTGWGRLSRKLINGIRDKQSGKTILDFLKSDGFANRNFMQLIHDDSLTFKEDIQKAQVSGQGDSLHEHIANLAGSPAIKKGILQTVKVVDELVKVMGRHKPENIVIEMARENQTTQKGQKNSRERMKRIEEGIKELGSQILKEHPVENTQLQNEKLYLYYLQNGRDMYVDQELDINRLSDYDVDHIVPQSFLKDDSIDNKVLTRSDKARGKSDNVPSEEVVKKMKNYWRQLLNAKLITQRKFDNLTKAERGGLSELDKAGFIKRQLVETRQITKHVAQILDSRMNTKYDENDKLIREVKVITLKSKLVSDFRKDFQFYKVREINNYHHAHDAYLNAVVGTALIKKYPKLESEFVYGDYKVYDVRKMIAKSEQEIGKATAKYFFYSNIMNFFKTEITLANGEIRKRPLIETNGETGEIVWDKGRDFATVRKVLSMPQVNIVKKTEVQTGGFSKESILPKRNSDKLIARKKDWDPKKYGGFDSPTVAYSVLVVAKVEKGKSKKLKSVKELLGITIMERSSFEKNPIDFLEAKGYKEVKKDLIIKLPKYSLFELENGRKRMLASAGELQKGNELALPSKYVNFLYLASHYEKLKGSPEDNEQKQLFVEQHKHYLDEIIEQISEFSKRVILADANLDKVLSAYNKHRDKPIREQAENIIHLFTLTNLGAPAAFKYFDTTIDRKRYTSTKEVLDATLIHQSITGLYETRIDLSQLGGDGGGSSPAPEAAAKGGVLNLEEEYRLHEKPVPSSIDPSWLQLFPTVWAERAGMGLANQVPPVVVELRSGASPVAVRQYPMSKEAREGIRPHIQRFLDLGVLVPCQSPWNTPLLPVKKPGTNDYRPVQDLREINKRVQDIHPTVPNPYNLLSSLPPSHTWYSVLDLKDAFFCLKLHPNSQPLFAFEWRDPEKGNTGQLTWTRLPQGFKNSPTLFNEALHRDLAPFRALNPQVVLLQYVDDLLVAAPTYRDCKEGTQKLLQELSKLGYRVSAKKAQLCQKEVTYLGYLLKEGKRWLTPARKATVMKIPPPTTPRQVREFLGTAGFCRLWIPGFASLAAPLYPLTKPSIPFIWTEEHQKAFDRIKEALLSAPALALPDLTKPFTLYVDERAGVARGVLTQTLGPWRRPVAYLSKKLDPVASGWPTCLKAVAAVALLLKDADKLTLGQNVTVIASHSLESIVRQPPDRWMTNARMTHYQSLLLNERVSFAPPAVLNPATLLPVESEATPVHRCSEILAEETGTRRDLKDQPLPGVPAWYTDGSSFIAEGKRRAGAAIVDGKRTVWASSLPEGTSAQKAELVALTQALRLAEGKDINIYTDSRYAFATAHIHGAIYKQRGWLTSAGKDIKNKEEILALLEAIHLPKRVAIIHCPGHQKGNDPVATGNRRADEAAKQAALSTRVLAETTKPAGKRTADGSEFEKRTADGSEFESPKKKAKVE

SEQ ID NO: 840 - protein, 2092 aa, synthetic construct
MPAAKRVKLDGGDKKYSIGLDIGTNSVGWAVITDEYKVPSKKFKVLGNTDRHSIKKNLIGALLFDSGETAEATRLKRTARRRYTRRKNRICYLQEIFSNEMAKVDDSFFHRLEESFLVEEDKKHERHPIFGNIVDEVAYHEKYPTIYHLRKKLVDSTDKADLRLIYLALAHMIKFRGHFLIEGDLNPDNSDVDKLFIQLVQTYNQLFEENPINASGVDAKAILSARLSKSRRLENLIAQLPGEKKNGLFGNLIALSLGLTPNFKSNFDLAEDAKLQLSKDTYDDDLDNLLAQIGDQYADLFLAAKNLSDAILLSDILRVNTEITKAPLSASMIKRYDEHHQDLTLLKALVRQQLPEKYKEIFFDQSKNGYAGYIDGGASQEEFYKFIKPILEKMDGTEELLVKLNREDLLRKQRTFDNGSIPHQIHLGELHAILRRQEDFYPFLKDNREKIEKILTFRIPYYVGPLARGNSRFAWMTRKSEETITPWNFEEVVDKGASAQSFIERMTNFDKNLPNEKVLPKHSLLYEYFTVYNELTKVKYVTEGMRKPAFLSGEQKKAIVDLLFKTNRKVTVKQLKEDYFKKIECFDSVEISGVEDRFNASLGTYHDLLKIIKDKDFLDNEENEDILEDIVLTLTLFEDREMIEERLKTYAHLFDDKVMKQLKRRRYTGWGRLSRKLINGIRDKQSGKTILDFLKSDGFANRNFMQLIHDDSLTFKEDIQKAQVSGQGDSLHEHIANLAGSPAIKKGILQTVKVVDELVKVMGRHKPENIVIEMARENQTTQKGQKNSRERMKRIEEGIKELGSQILKEHPVENTQLQNEKLYLYYLQNGRDMYVDQELDINRLSDYDVDHIVPQSFLKDDSIDNKVLTRSDKARGKSDNVPSEEVVKKMKNYWRQLLNAKLITQRKFDNLTKAERGGLSELDKAGFIKRQLVETRQITKHVAQILDSRMNTKYDENDKLIREVKVITLKSKLVSDFRKDFQFYKVREINNYHHAHDAYLNAVVGTALIKKYPKLESEFVYGDYKVYDVRKMIAKSEQEIGKATAKYFFYSNIMNFFKTEITLANGEIRKRPLIETNGETGEIVWDKGRDFATVRKVLSMPQVNIVKKTEVQTGGFSKESILPKRNSDKLIARKKDWDPKKYGGFDSPTVAYSVLVVAKVEKGKSKKLKSVKELLGITIMERSSFEKNPIDFLEAKGYKEVKKDLIIKLPKYSLFELENGRKRMLASAGELQKGNELALPSKYVNFLYLASHYEKLKGSPEDNEQKQLFVEQHKHYLDEIIEQISEFSKRVILADANLDKVLSAYNKHRDKPIREQAENIIHLFTLTNLGAPAAFKYFDTTIDRKRYTSTKEVLDATLIHQSITGLYETRIDLSQLGGDGGGSSPAPGGSGGVLNLEEEYRLHEKPVPSSIDPSWLQLFPTVWAERAGMGLANQVPPVVVELRSGASPVAVRQYPMSKEAREGIRPHIQRFLDLGVLVPCQSPWNTPLLPVKKPGTNDYRPVQDLREINKRVQDIHPTVPNPYNLLSSLPPSHTWYSVLDLKDAFFCLKLHPNSQPLFAFEWRDPEKGNTGQLTWTRLPQGFKNSPTLFNEALHRDLAPFRALNPQVVLLQYVDDLLVAAPTYRDCKEGTQKLLQELSKLGYRVSAKKAQLCQKEVTYLGYLLKEGKRWLTPARKATVMKIPPPTTPRQVREFLGTAGFCRLWIPGFASLAAPLYPLTKPSIPFIWTEEHQKAFDRIKEALLSAPALALPDLTKPFTLYVDERAGVARGVLTQTLGPWRRPVAYLSKKLDPVASGWPTCLKAVAAVALLLKDADKLTLGQNVTVIASHSLESIVRQPPDRWMTNARMTHYQSLLLNERVSFAPPAVLNPATLLPVESEATPVHRCSEILAEETGTRRDLKDQPLPGVPAWYTDGSSFIAEGKRRAGAAIVDGKRTVWASSLPEGTSAQKAELVALTQALRLAEGKDINIYTDSRYAFATAHIHGAIYKQRGWLTSAGKDIKNKEEILALLEAIHLPKRVAIIHCPGHQKGNDPVATGNRRADEAAKQAALSTRVLAETTKPAGKRTADGSEFEKRTADGSEFESPKKKAKVE

SEQ ID NO: 841 - protein, 2094 aa, synthetic construct
MPAAKRVKLDGGDKKYSIGLDIGTNSVGWAVITDEYKVPSKKFKVLGNTDRHSIKKNLIGALLFDSGETAEATRLKRTARRRYTRRKNRICYLQEIFSNEMAKVDDSFFHRLEESFLVEEDKKHERHPIFGNIVDEVAYHEKYPTIYHLRKKLVDSTDKADLRLIYLALAHMIKFRGHFLIEGDLNPDNSDVDKLFIQLVQTYNQLFEENPINASGVDAKAILSARLSKSRRLENLIAQLPGEKKNGLFGNLIALSLGLTPNFKSNFDLAEDAKLQLSKDTYDDDLDNLLAQIGDQYADLFLAAKNLSDAILLSDILRVNTEITKAPLSASMIKRYDEHHQDLTLLKALVRQQLPEKYKEIFFDQSKNGYAGYIDGGASQEEFYKFIKPILEKMDGTEELLVKLNREDLLRKQRTFDNGSIPHQIHLGELHAILRRQEDFYPFLKDNREKIEKILTFRIPYYVGPLARGNSRFAWMTRKSEETITPWNFEEVVDKGASAQSFIERMTNFDKNLPNEKVLPKHSLLYEYFTVYNELTKVKYVTEGMRKPAFLSGEQKKAIVDLLFKTNRKVTVKQLKEDYFKKIECFDSVEISGVEDRFNASLGTYHDLLKIIKDKDFLDNEENEDILEDIVLTLTLFEDREMIEERLKTYAHLFDDKVMKQLKRRRYTGWGRLSRKLINGIRDKQSGKTILDFLKSDGFANRNFMQLIHDDSLTFKEDIQKAQVSGQGDSLHEHIANLAGSPAIKKGILQTVKVVDELVKVMGRHKPENIVIEMARENQTTQKGQKNSRERMKRIEEGIKELGSQILKEHPVENTQLQNEKLYLYYLQNGRDMYVDQELDINRLSDYDVDHIVPQSFLKDDSIDNKVLTRSDKARGKSDNVPSEEVVKKMKNYWRQLLNAKLITQRKFDNLTKAERGGLSELDKAGFIKRQLVETRQITKHVAQILDSRMNTKYDENDKLIREVKVITLKSKLVSDFRKDFQFYKVREINNYHHAHDAYLNAVVGTALIKKYPKLESEFVYGDYKVYDVRKMIAKSEQEIGKATAKYFFYSNIMNFFKTEITLANGEIRKRPLIETNGETGEIVWDKGRDFATVRKVLSMPQVNIVKKTEVQTGGFSKESILPKRNSDKLIARKKDWDPKKYGGFDSPTVAYSVLVVAKVEKGKSKKLKSVKELLGITIMERSSFEKNPIDFLEAKGYKEVKKDLIIKLPKYSLFELENGRKRMLASAGELQKGNELALPSKYVNFLYLASHYEKLKGSPEDNEQKQLFVEQHKHYLDEIIEQISEFSKRVILADANLDKVLSAYNKHRDKPIREQAENIIHLFTLTNLGAPAAFKYFDTTIDRKRYTSTKEVLDATLIHQSITGLYETRIDLSQLGGDGGGGGEAAAKGGSGGVLNLEEEYRLHEKPVPSSIDPSWLQLFPTVWAERAGMGLANQVPPVVVELRSGASPVAVRQYPMSKEAREGIRPHIQRFLDLGVLVPCQSPWNTPLLPVKKPGTNDYRPVQDLREINKRVQDIHPTVPNPYNLLSSLPPSHTWYSVLDLKDAFFCLKLHPNSQPLFAFEWRDPEKGNTGQLTWTRLPQGFKNSPTLFNEALHRDLAPFRALNPQVVLLQYVDDLLVAAPTYRDCKEGTQKLLQELSKLGYRVSAKKAQLCQKEVTYLGYLLKEGKRWLTPARKATVMKIPPPTTPRQVREFLGTAGFCRLWIPGFASLAAPLYPLTKPSIPFIWTEEHQKAFDRIKEALLSAPALALPDLTKPFTLYVDERAGVARGVLTQTLGPWRRPVAYLSKKLDPVASGWPTCLKAVAAVALLLKDADKLTLGQNVTVIASHSLESIVRQPPDRWMTNARMTHYQSLLLNERVSFAPPAVLNPATLLPVESEATPVHRCSEILAEETGTRRDLKDQPLPGVPAWYTDGSSFIAEGKRRAGAAIVDGKRTVWASSLPEGTSAQKAELVALTQALRLAEGKDINIYTDSRYAFATAHIHGAIYKQRGWLTSAGKDIKNKEEILALLEAIHLPKRVAIIHCPGHQKGNDPVATGNRRADEAAKQAALSTRVLAETTKPAGKRTADGSEFEKRTADGSEFESPKKKAKVE

SEQ ID NO: 842 - protein, 2091 aa, synthetic construct
MPAAKRVKLDGGDKKYSIGLDIGTNSVGWAVITDEYKVPSKKFKVLGNTDRHSIKKNLIGALLFDSGETAEATRLKRTARRRYTRRKNRICYLQEIFSNEMAKVDDSFFHRLEESFLVEEDKKHERHPIFGNIVDEVAYHEKYPTIYHLRKKLVDSTDKADLRLIYLALAHMIKFRGHFLIEGDLNPDNSDVDKLFIQLVQTYNQLFEENPINASGVDAKAILSARLSKSRRLENLIAQLPGEKKNGLFGNLIALSLGLTPNFKSNFDLAEDAKLQLSKDTYDDDLDNLLAQIGDQYADLFLAAKNLSDAILLSDILRVNTEITKAPLSASMIKRYDEHHQDLTLLKALVRQQLPEKYKEIFFDQSKNGYAGYIDGGASQEEFYKFIKPILEKMDGTEELLVKLNREDLLRKQRTFDNGSIPHQIHLGELHAILRRQEDFYPFLKDNREKIEKILTFRIPYYVGPLARGNSRFAWMTRKSEETITPWNFEEVVDKGASAQSFIERMTNFDKNLPNEKVLPKHSLLYEYFTVYNELTKVKYVTEGMRKPAFLSGEQKKAIVDLLFKTNRKVTVKQLKEDYFKKIECFDSVEISGVEDRFNASLGTYHDLLKIIKDKDFLDNEENEDILEDIVLTLTLFEDREMIEERLKTYAHLFDDKVMKQLKRRRYTGWGRLSRKLINGIRDKQSGKTILDFLKSDGFANRNFMQLIHDDSLTFKEDIQKAQVSGQGDSLHEHIANLAGSPAIKKGILQTVKVVDELVKVMGRHKPENIVIEMARENQTTQKGQKNSRERMKRIEEGIKELGSQILKEHPVENTQLQNEKLYLYYLQNGRDMYVDQELDINRLSDYDVDHIVPQSFLKDDSIDNKVLTRSDKARGKSDNVPSEEVVKKMKNYWRQLLNAKLITQRKFDNLTKAERGGLSELDKAGFIKRQLVETRQITKHVAQILDSRMNTKYDENDKLIREVKVITLKSKLVSDFRKDFQFYKVREINNYHHAHDAYLNAVVGTALIKKYPKLESEFVYGDYKVYDVRKMIAKSEQEIGKATAKYFFYSNIMNFFKTEITLANGEIRKRPLIETNGETGEIVWDKGRDFATVRKVLSMPQVNIVKKTEVQTGGFSKESILPKRNSDKLIARKKDWDPKKYGGFDSPTVAYSVLVVAKVEKGKSKKLKSVKELLGITIMERSSFEKNPIDFLEAKGYKEVKKDLIIKLPKYSLFELENGRKRMLASAGELQKGNELALPSKYVNFLYLASHYEKLKGSPEDNEQKQLFVEQHKHYLDEIIEQISEFSKRVILADANLDKVLSAYNKHRDKPIREQAENIIHLFTLTNLGAPAAFKYFDTTIDRKRYTSTKEVLDATLIHQSITGLYETRIDLSQLGGDGGGGGGGGGGGGVLNLEEEYRLHEKPVPSSIDPSWLQLFPTVWAERAGMGLANQVPPVVVELRSGASPVAVRQYPMSKEAREGIRPHIQRFLDLGVLVPCQSPWNTPLLPVKKPGTNDYRPVQDLREINKRVQDIHPTVPNPYNLLSSLPPSHTWYSVLDLKDAFFCLKLHPNSQPLFAFEWRDPEKGNTGQLTWTRLPQGFKNSPTLFNEALHRDLAPFRALNPQVVLLQYVDDLLVAAPTYRDCKEGTQKLLQELSKLGYRVSAKKAQLCQKEVTYLGYLLKEGKRWLTPARKATVMKIPPPTTPRQVREFLGTAGFCRLWIPGFASLAAPLYPLTKPSIPFIWTEEHQKAFDRIKEALLSAPALALPDLTKPFTLYVDERAGVARGVLTQTLGPWRRPVAYLSKKLDPVASGWPTCLKAVAAVALLLKDADKLTLGQNVTVIASHSLESIVRQPPDRWMTNARMTHYQSLLLNERVSFAPPAVLNPATLLPVESEATPVHRCSEILAEETGTRRDLKDQPLPGVPAWYTDGSSFIAEGKRRAGAAIVDGKRTVWASSLPEGTSAQKAELVALTQALRLAEGKDINIYTDSRYAFATAHIHGAIYKQRGWLTSAGKDIKNKEEILALLEAIHLPKRVAIIHCPGHQKGNDPVATGNRRADEAAKQAALSTRVLAETTKPAGKRTADGSEFEKRTADGSEFESPKKKAKVE

SEQ ID NO: 843 - protein, 2103 aa, synthetic construct
MPAAKRVKLDGGDKKYSIGLDIGTNSVGWAVITDEYKVPSKKFKVLGNTDRHSIKKNLIGALLFDSGETAEATRLKRTARRRYTRRKNRICYLQEIFSNEMAKVDDSFFHRLEESFLVEEDKKHERHPIFGNIVDEVAYHEKYPTIYHLRKKLVDSTDKADLRLIYLALAHMIKFRGHFLIEGDLNPDNSDVDKLFIQLVQTYNQLFEENPINASGVDAKAILSARLSKSRRLENLIAQLPGEKKNGLFGNLIALSLGLTPNFKSNFDLAEDAKLQLSKDTYDDDLDNLLAQIGDQYADLFLAAKNLSDAILLSDILRVNTEITKAPLSASMIKRYDEHHQDLTLLKALVRQQLPEKYKEIFFDQSKNGYAGYIDGGASQEEFYKFIKPILEKMDGTEELLVKLNREDLLRKQRTFDNGSIPHQIHLGELHAILRRQEDFYPFLKDNREKIEKILTFRIPYYVGPLARGNSRFAWMTRKSEETITPWNFEEVVDKGASAQSFIERMTNFDKNLPNEKVLPKHSLLYEYFTVYNELTKVKYVTEGMRKPAFLSGEQKKAIVDLLFKTNRKVTVKQLKEDYFKKIECFDSVEISGVEDRFNASLGTYHDLLKIIKDKDFLDNEENEDILEDIVLTLTLFEDREMIEERLKTYAHLFDDKVMKQLKRRRYTGWGRLSRKLINGIRDKQSGKTILDFLKSDGFANRNFMQLIHDDSLTFKEDIQKAQVSGQGDSLHEHIANLAGSPAIKKGILQTVKVVDELVKVMGRHKPENIVIEMARENQTTQKGQKNSRERMKRIEEGIKELGSQILKEHPVENTQLQNEKLYLYYLQNGRDMYVDQELDINRLSDYDVDHIVPQSFLKDDSIDNKVLTRSDKARGKSDNVPSEEVVKKMKNYWRQLLNAKLITQRKFDNLTKAERGGLSELDKAGFIKRQLVETRQITKHVAQILDSRMNTKYDENDKLIREVKVITLKSKLVSDFRKDFQFYKVREINNYHHAHDAYLNAVVGTALIKKYPKLESEFVYGDYKVYDVRKMIAKSEQEIGKATAKYFFYSNIMNFFKTEITLANGEIRKRPLIETNGETGEIVWDKGRDFATVRKVLSMPQVNIVKKTEVQTGGFSKESILPKRNSDKLIARKKDWDPKKYGGFDSPTVAYSVLVVAKVEKGKSKKLKSVKELLGITIMERSSFEKNPIDFLEAKGYKEVKKDLIIKLPKYSLFELENGRKRMLASAGELQKGNELALPSKYVNFLYLASHYEKLKGSPEDNEQKQLFVEQHKHYLDEIIEQISEFSKRVILADANLDKVLSAYNKHRDKPIREQAENIIHLFTLTNLGAPAAFKYFDTTIDRKRYTSTKEVLDATLIHQSITGLYETRIDLSQLGGDGGGGGGSGGGGSGGGGSGGGGSGGVLNLEEEYRLHEKPVPSSIDPSWLQLFPTVWAERAGMGLANQVPPVVVELRSGASPVAVRQYPMSKEAREGIRPHIQRFLDLGVLVPCQSPWNTPLLPVKKPGTNDYRPVQDLREINKRVQDIHPTVPNPYNLLSSLPPSHTWYSVLDLKDAFFCLKLHPNSQPLFAFEWRDPEKGNTGQLTWTRLPQGFKNSPTLFNEALHRDLAPFRALNPQVVLLQYVDDLLVAAPTYRDCKEGTQKLLQELSKLGYRVSAKKAQLCQKEVTYLGYLLKEGKRWLTPARKATVMKIPPPTTPRQVREFLGTAGFCRLWIPGFASLAAPLYPLTKPSIPFIWTEEHQKAFDRIKEALLSAPALALPDLTKPFTLYVDERAGVARGVLTQTLGPWRRPVAYLSKKLDPVASGWPTCLKAVAAVALLLKDADKLTLGQNVTVIASHSLESIVRQPPDRWMTNARMTHYQSLLLNERVSFAPPAVLNPATLLPVESEATPVHRCSEILAEETGTRRDLKDQPLPGVPAWYTDGSSFIAEGKRRAGAAIVDGKRTVWASSLPEGTSAQKAELVALTQALRLAEGKDINIYTDSRYAFATAHIHGAIYKQRGWLTSAGKDIKNKEEILALLEAIHLPKRVAIIHCPGHQKGNDPVATGNRRADEAAKQAALSTRVLAETTKPAGKRTADGSEFEKRTADGSEFESPKKKAKVE

SEQ ID NO: 844 - protein, 2094 aa, synthetic construct
MPAAKRVKLDGGDKKYSIGLDIGTNSVGWAVITDEYKVPSKKFKVLGNTDRHSIKKNLIGALLFDSGETAEATRLKRTARRRYTRRKNRICYLQEIFSNEMAKVDDSFFHRLEESFLVEEDKKHERHPIFGNIVDEVAYHEKYPTIYHLRKKLVDSTDKADLRLIYLALAHMIKFRGHFLIEGDLNPDNSDVDKLFIQLVQTYNQLFEENPINASGVDAKAILSARLSKSRRLENLIAQLPGEKKNGLFGNLIALSLGLTPNFKSNFDLAEDAKLQLSKDTYDDDLDNLLAQIGDQYADLFLAAKNLSDAILLSDILRVNTEITKAPLSASMIKRYDEHHQDLTLLKALVRQQLPEKYKEIFFDQSKNGYAGYIDGGASQEEFYKFIKPILEKMDGTEELLVKLNREDLLRKQRTFDNGSIPHQIHLGELHAILRRQEDFYPFLKDNREKIEKILTFRIPYYVGPLARGNSRFAWMTRKSEETITPWNFEEVVDKGASAQSFIERMTNFDKNLPNEKVLPKHSLLYEYFTVYNELTKVKYVTEGMRKPAFLSGEQKKAIVDLLFKTNRKVTVKQLKEDYFKKIECFDSVEISGVEDRFNASLGTYHDLLKIIKDKDFLDNEENEDILEDIVLTLTLFEDREMIEERLKTYAHLFDDKVMKQLKRRRYTGWGRLSRKLINGIRDKQSGKTILDFLKSDGFANRNFMQLIHDDSLTFKEDIQKAQVSGQGDSLHEHIANLAGSPAIKKGILQTVKVVDELVKVMGRHKPENIVIEMARENQTTQKGQKNSRERMKRIEEGIKELGSQILKEHPVENTQLQNEKLYLYYLQNGRDMYVDQELDINRLSDYDVDHIVPQSFLKDDSIDNKVLTRSDKARGKSDNVPSEEVVKKMKNYWRQLLNAKLITQRKFDNLTKAERGGLSELDKAGFIKRQLVETRQITKHVAQILDSRMNTKYDENDKLIREVKVITLKSKLVSDFRKDFQFYKVREINNYHHAHDAYLNAVVGTALIKKYPKLESEFVYGDYKVYDVRKMIAKSEQEIGKATAKYFFYSNIMNFFKTEITLANGEIRKRPLIETNGETGEIVWDKGRDFATVRKVLSMPQVNIVKKTEVQTGGFSKESILPKRNSDKLIARKKDWDPKKYGGFDSPTVAYSVLVVAKVEKGKSKKLKSVKELLGITIMERSSFEKNPIDFLEAKGYKEVKKDLIIKLPKYSLFELENGRKRMLASAGELQKGNELALPSKYVNFLYLASHYEKLKGSPEDNEQKQLFVEQHKHYLDEIIEQISEFSKRVILADANLDKVLSAYNKHRDKPIREQAENIIHLFTLTNLGAPAAFKYFDTTIDRKRYTSTKEVLDATLIHQSITGLYETRIDLSQLGGDGGGGSEAAAKPAPGGVLNLEEEYRLHEKPVPSSIDPSWLQLFPTVWAERAGMGLANQVPPVVVELRSGASPVAVRQYPMSKEAREGIRPHIQRFLDLGVLVPCQSPWNTPLLPVKKPGTNDYRPVQDLREINKRVQDIHPTVPNPYNLLSSLPPSHTWYSVLDLKDAFFCLKLHPNSQPLFAFEWRDPEKGNTGQLTWTRLPQGFKNSPTLFNEALHRDLAPFRALNPQVVLLQYVDDLLVAAPTYRDCKEGTQKLLQELSKLGYRVSAKKAQLCQKEVTYLGYLLKEGKRWLTPARKATVMKIPPPTTPRQVREFLGTAGFCRLWIPGFASLAAPLYPLTKPSIPFIWTEEHQKAFDRIKEALLSAPALALPDLTKPFTLYVDERAGVARGVLTQTLGPWRRPVAYLSKKLDPVASGWPTCLKAVAAVALLLKDADKLTLGQNVTVIASHSLESIVRQPPDRWMTNARMTHYQSLLLNERVSFAPPAVLNPATLLPVESEATPVHRCSEILAEETGTRRDLKDQPLPGVPAWYTDGSSFIAEGKRRAGAAIVDGKRTVWASSLPEGTSAQKAELVALTQALRLAEGKDINIYTDSRYAFATAHIHGAIYKQRGWLTSAGKDIKNKEEILALLEAIHLPKRVAIIHCPGHQKGNDPVATGNRRADEAAKQAALSTRVLAETTKPAGKRTADGSEFEKRTADGSEFESPKKKAKVE

SEQ ID NO: 845 - protein, 2092 aa, synthetic construct
MPAAKRVKLDGGDKKYSIGLDIGTNSVGWAVITDEYKVPSKKFKVLGNTDRHSIKKNLIGALLFDSGETAEATRLKRTARRRYTRRKNRICYLQEIFSNEMAKVDDSFFHRLEESFLVEEDKKHERHPIFGNIVDEVAYHEKYPTIYHLRKKLVDSTDKADLRLIYLALAHMIKFRGHFLIEGDLNPDNSDVDKLFIQLVQTYNQLFEENPINASGVDAKAILSARLSKSRRLENLIAQLPGEKKNGLFGNLIALSLGLTPNFKSNFDLAEDAKLQLSKDTYDDDLDNLLAQIGDQYADLFLAAKNLSDAILLSDILRVNTEITKAPLSASMIKRYDEHHQDLTLLKALVRQQLPEKYKEIFFDQSKNGYAGYIDGGASQEEFYKFIKPILEKMDGTEELLVKLNREDLLRKQRTFDNGSIPHQIHLGELHAILRRQEDFYPFLKDNREKIEKILTFRIPYYVGPLARGNSRFAWMTRKSEETITPWNFEEVVDKGASAQSFIERMTNFDKNLPNEKVLPKHSLLYEYFTVYNELTKVKYVTEGMRKPAFLSGEQKKAIVDLLFKTNRKVTVKQLKEDYFKKIECFDSVEISGVEDRFNASLGTYHDLLKIIKDKDFLDNEENEDILEDIVLTLTLFEDREMIEERLKTYAHLFDDKVMKQLKRRRYTGWGRLSRKLINGIRDKQSGKTILDFLKSDGFANRNFMQLIHDDSLTFKEDIQKAQVSGQGDSLHEHIANLAGSPAIKKGILQTVKVVDELVKVMGRHKPENIVIEMARENQTTQKGQKNSRERMKRIEEGIKELGSQILKEHPVENTQLQNEKLYLYYLQNGRDMYVDQELDINRLSDYDVDHIVPQSFLKDDSIDNKVLTRSDKARGKSDNVPSEEVVKKMKNYWRQLLNAKLITQRKFDNLTKAERGGLSELDKAGFIKRQLVETRQITKHVAQILDSRMNTKYDENDKLIREVKVITLKSKLVSDFRKDFQFYKVREINNYHHAHDAYLNAVVGTALIKKYPKLESEFVYGDYKVYDVRKMIAKSEQEIGKATAKYFFYSNIMNFFKTEITLANGEIRKRPLIETNGETGEIVWDKGRDFATVRKVLSMPQVNIVKKTEVQTGGFSKESILPKRNSDKLIARKKDWDPKKYGGFDSPTVAYSVLVVAKVEKGKSKKLKSVKELLGITIMERSSFEKNPIDFLEAKGYKEVKKDLIIKLPKYSLFELENGRKRMLASAGELQKGNELALPSKYVNFLYLASHYEKLKGSPEDNEQKQLFVEQHKHYLDEIIEQISEFSKRVILADANLDKVLSAYNKHRDKPIREQAENIIHLFTLTNLGAPAAFKYFDTTIDRKRYTSTKEVLDATLIHQSITGLYETRIDLSQLGGDGGGSSPAPGGGGGVLNLEEEYRLHEKPVPSSIDPSWLQLFPTVWAERAGMGLANQVPPVVVELRSGASPVAVRQYPMSKEAREGIRPHIQRFLDLGVLVPCQSPWNTPLLPVKKPGTNDYRPVQDLREINKRVQDIHPTVPNPYNLLSSLPPSHTWYSVLDLKDAFFCLKLHPNSQPLFAFEWRDPEKGNTGQLTWTRLPQGFKNSPTLFNEALHRDLAPFRALNPQVVLLQYVDDLLVAAPTYRDCKEGTQKLLQELSKLGYRVSAKKAQLCQKEVTYLGYLLKEGKRWLTPARKATVMKIPPPTTPRQVREFLGTAGFCRLWIPGFASLAAPLYPLTKPSIPFIWTEEHQKAFDRIKEALLSAPALALPDLTKPFTLYVDERAGVARGVLTQTLGPWRRPVAYLSKKLDPVASGWPTCLKAVAAVALLLKDADKLTLGQNVTVIASHSLESIVRQPPDRWMTNARMTHYQSLLLNERVSFAPPAVLNPATLLPVESEATPVHRCSEILAEETGTRRDLKDQPLPGVPAWYTDGSSFIAEGKRRAGAAIVDGKRTVWASSLPEGTSAQKAELVALTQALRLAEGKDINIYTDSRYAFATAHIHGAIYKQRGWLTSAGKDIKNKEEILALLEAIHLPKRVAIIHCPGHQKGNDPVATGNRRADEAAKQAALSTRVLAETTKPAGKRTADGSEFEKRTADGSEFESPKKKAKVE

SEQ ID NO: 846 - protein, 2095 aa, synthetic construct
MPAAKRVKLDGGDKKYSIGLDIGTNSVGWAVITDEYKVPSKKFKVLGNTDRHSIKKNLIGALLFDSGETAEATRLKRTARRRYTRRKNRICYLQEIFSNEMAKVDDSFFHRLEESFLVEEDKKHERHPIFGNIVDEVAYHEKYPTIYHLRKKLVDSTDKADLRLIYLALAHMIKFRGHFLIEGDLNPDNSDVDKLFIQLVQTYNQLFEENPINASGVDAKAILSARLSKSRRLENLIAQLPGEKKNGLFGNLIALSLGLTPNFKSNFDLAEDAKLQLSKDTYDDDLDNLLAQIGDQYADLFLAAKNLSDAILLSDILRVNTEITKAPLSASMIKRYDEHHQDLTLLKALVRQQLPEKYKEIFFDQSKNGYAGYIDGGASQEEFYKFIKPILEKMDGTEELLVKLNREDLLRKQRTFDNGSIPHQIHLGELHAILRRQEDFYPFLKDNREKIEKILTFRIPYYVGPLARGNSRFAWMTRKSEETITPWNFEEVVDKGASAQSFIERMTNFDKNLPNEKVLPKHSLLYEYFTVYNELTKVKYVTEGMRKPAFLSGEQKKAIVDLLFKTNRKVTVKQLKEDYFKKIECFDSVEISGVEDRFNASLGTYHDLLKIIKDKDFLDNEENEDILEDIVLTLTLFEDREMIEERLKTYAHLFDDKVMKQLKRRRYTGWGRLSRKLINGIRDKQSGKTILDFLKSDGFANRNFMQLIHDDSLTFKEDIQKAQVSGQGDSLHEHIANLAGSPAIKKGILQTVKVVDELVKVMGRHKPENIVIEMARENQTTQKGQKNSRERMKRIEEGIKELGSQILKEHPVENTQLQNEKLYLYYLQNGRDMYVDQELDINRLSDYDVDHIVPQSFLKDDSIDNKVLTRSDKARGKSDNVPSEEVVKKMKNYWRQLLNAKLITQRKFDNLTKAERGGLSELDKAGFIKRQLVETRQITKHVAQILDSRMNTKYDENDKLIREVKVITLKSKLVSDFRKDFQFYKVREINNYHHAHDAYLNAVVGTALIKKYPKLESEFVYGDYKVYDVRKMIAKSEQEIGKATAKYFFYSNIMNFFKTEITLANGEIRKRPLIETNGETGEIVWDKGRDFATVRKVLSMPQVNIVKKTEVQTGGFSKESILPKRNSDKLIARKKDWDPKKYGGFDSPTVAYSVLVVAKVEKGKSKKLKSVKELLGITIMERSSFEKNPIDFLEAKGYKEVKKDLIIKLPKYSLFELENGRKRMLASAGELQKGNELALPSKYVNFLYLASHYEKLKGSPEDNEQKQLFVEQHKHYLDEIIEQISEFSKRVILADANLDKVLSAYNKHRDKPIREQAENIIHLFTLTNLGAPAAFKYFDTTIDRKRYTSTKEVLDATLIHQSITGLYETRIDLSQLGGDGGGSSGSSGSSGSSGGVLNLEEEYRLHEKPVPSSIDPSWLQLFPTVWAERAGMGLANQVPPVVVELRSGASPVAVRQYPMSKEAREGIRPHIQRFLDLGVLVPCQSPWNTPLLPVKKPGTNDYRPVQDLREINKRVQDIHPTVPNPYNLLSSLPPSHTWYSVLDLKDAFFCLKLHPNSQPLFAFEWRDPEKGNTGQLTWTRLPQGFKNSPTLFNEALHRDLAPFRALNPQVVLLQYVDDLLVAAPTYRDCKEGTQKLLQELSKLGYRVSAKKAQLCQKEVTYLGYLLKEGKRWLTPARKATVMKIPPPTTPRQVREFLGTAGFCRLWIPGFASLAAPLYPLTKPSIPFIWTEEHQKAFDRIKEALLSAPALALPDLTKPFTLYVDERAGVARGVLTQTLGPWRRPVAYLSKKLDPVASGWPTCLKAVAAVALLLKDADKLTLGQNVTVIASHSLESIVRQPPDRWMTNARMTHYQSLLLNERVSFAPPAVLNPATLLPVESEATPVHRCSEILAEETGTRRDLKDQPLPGVPAWYTDGSSFIAEGKRRAGAAIVDGKRTVWASSLPEGTSAQKAELVALTQALRLAEGKDINIYTDSRYAFATAHIHGAIYKQRGWLTSAGKDIKNKEEILALLEAIHLPKRVAIIHCPGHQKGNDPVATGNRRADEAAKQAALSTRVLAETTKPAGKRTADGSEFEKRTADGSEFESPKKKAKVE

SEQ ID NO: 847 - protein, 2094 aa, synthetic construct
MPAAKRVKLDGGDKKYSIGLDIGTNSVGWAVITDEYKVPSKKFKVLGNTDRHSIKKNLIGALLFDSGETAEATRLKRTARRRYTRRKNRICYLQEIFSNEMAKVDDSFFHRLEESFLVEEDKKHERHPIFGNIVDEVAYHEKYPTIYHLRKKLVDSTDKADLRLIYLALAHMIKFRGHFLIEGDLNPDNSDVDKLFIQLVQTYNQLFEENPINASGVDAKAILSARLSKSRRLENLIAQLPGEKKNGLFGNLIALSLGLTPNFKSNFDLAEDAKLQLSKDTYDDDLDNLLAQIGDQYADLFLAAKNLSDAILLSDILRVNTEITKAPLSASMIKRYDEHHQDLTLLKALVRQQLPEKYKEIFFDQSKNGYAGYIDGGASQEEFYKFIKPILEKMDGTEELLVKLNREDLLRKQRTFDNGSIPHQIHLGELHAILRRQEDFYPFLKDNREKIEKILTFRIPYYVGPLARGNSRFAWMTRKSEETITPWNFEEVVDKGASAQSFIERMTNFDKNLPNEKVLPKHSLLYEYFTVYNELTKVKYVTEGMRKPAFLSGEQKKAIVDLLFKTNRKVTVKQLKEDYFKKIECFDSVEISGVEDRFNASLGTYHDLLKIIKDKDFLDNEENEDILEDIVLTLTLFEDREMIEERLKTYAHLFDDKVMKQLKRRRYTGWGRLSRKLINGIRDKQSGKTILDFLKSDGFANRNFMQLIHDDSLTFKEDIQKAQVSGQGDSLHEHIANLAGSPAIKKGILQTVKVVDELVKVMGRHKPENIVIEMARENQTTQKGQKNSRERMKRIEEGIKELGSQILKEHPVENTQLQNEKLYLYYLQNGRDMYVDQELDINRLSDYDVDHIVPQSFLKDDSIDNKVLTRSDKARGKSDNVPSEEVVKKMKNYWRQLLNAKLITQRKFDNLTKAERGGLSELDKAGFIKRQLVETRQITKHVAQILDSRMNTKYDENDKLIREVKVITLKSKLVSDFRKDFQFYKVREINNYHHAHDAYLNAVVGTALIKKYPKLESEFVYGDYKVYDVRKMIAKSEQEIGKATAKYFFYSNIMNFFKTEITLANGEIRKRPLIETNGETGEIVWDKGRDFATVRKVLSMPQVNIVKKTEVQTGGFSKESILPKRNSDKLIARKKDWDPKKYGGFDSPTVAYSVLVVAKVEKGKSKKLKSVKELLGITIMERSSFEKNPIDFLEAKGYKEVKKDLIIKLPKYSLFELENGRKRMLASAGELQKGNELALPSKYVNFLYLASHYEKLKGSPEDNEQKQLFVEQHKHYLDEIIEQISEFSKRVILADANLDKVLSAYNKHRDKPIREQAENIIHLFTLTNLGAPAAFKYFDTTIDRKRYTSTKEVLDATLIHQSITGLYETRIDLSQLGGDGGPAPGGSEAAAKGGVLNLEEEYRLHEKPVPSSIDPSWLQLFPTVWAERAGMGLANQVPPVVVELRSGASPVAVRQYPMSKEAREGIRPHIQRFLDLGVLVPCQSPWNTPLLPVKKPGTNDYRPVQDLREINKRVQDIHPTVPNPYNLLSSLPPSHTWYSVLDLKDAFFCLKLHPNSQPLFAFEWRDPEKGNTGQLTWTRLPQGFKNSPTLFNEALHRDLAPFRALNPQVVLLQYVDDLLVAAPTYRDCKEGTQKLLQELSKLGYRVSAKKAQLCQKEVTYLGYLLKEGKRWLTPARKATVMKIPPPTTPRQVREFLGTAGFCRLWIPGFASLAAPLYPLTKPSIPFIWTEEHQKAFDRIKEALLSAPALALPDLTKPFTLYVDERAGVARGVLTQTLGPWRRPVAYLSKKLDPVASGWPTCLKAVAAVALLLKDADKLTLGQNVTVIASHSLESIVRQPPDRWMTNARMTHYQSLLLNERVSFAPPAVLNPATLLPVESEATPVHRCSEILAEETGTRRDLKDQPLPGVPAWYTDGSSFIAEGKRRAGAAIVDGKRTVWASSLPEGTSAQKAELVALTQALRLAEGKDINIYTDSRYAFATAHIHGAIYKQRGWLTSAGKDIKNKEEILALLEAIHLPKRVAIIHCPGHQKGNDPVATGNRRADEAAKQAALSTRVLAETTKPAGKRTADGSEFEKRTADGSEFESPKKKAKVE

SEQ ID NO: 848 - protein, 2088 aa, synthetic construct
MPAAKRVKLDGGDKKYSIGLDIGTNSVGWAVITDEYKVPSKKFKVLGNTDRHSIKKNLIGALLFDSGETAEATRLKRTARRRYTRRKNRICYLQEIFSNEMAKVDDSFFHRLEESFLVEEDKKHERHPIFGNIVDEVAYHEKYPTIYHLRKKLVDSTDKADLRLIYLALAHMIKFRGHFLIEGDLNPDNSDVDKLFIQLVQTYNQLFEENPINASGVDAKAILSARLSKSRRLENLIAQLPGEKKNGLFGNLIALSLGLTPNFKSNFDLAEDAKLQLSKDTYDDDLDNLLAQIGDQYADLFLAAKNLSDAILLSDILRVNTEITKAPLSASMIKRYDEHHQDLTLLKALVRQQLPEKYKEIFFDQSKNGYAGYIDGGASQEEFYKFIKPILEKMDGTEELLVKLNREDLLRKQRTFDNGSIPHQIHLGELHAILRRQEDFYPFLKDNREKIEKILTFRIPYYVGPLARGNSRFAWMTRKSEETITPWNFEEVVDKGASAQSFIERMTNFDKNLPNEKVLPKHSLLYEYFTVYNELTKVKYVTEGMRKPAFLSGEQKKAIVDLLFKTNRKVTVKQLKEDYFKKIECFDSVEISGVEDRFNASLGTYHDLLKIIKDKDFLDNEENEDILEDIVLTLTLFEDREMIEERLKTYAHLFDDKVMKQLKRRRYTGWGRLSRKLINGIRDKQSGKTILDFLKSDGFANRNFMQLIHDDSLTFKEDIQKAQVSGQGDSLHEHIANLAGSPAIKKGILQTVKVVDELVKVMGRHKPENIVIEMARENQTTQKGQKNSRERMKRIEEGIKELGSQILKEHPVENTQLQNEKLYLYYLQNGRDMYVDQELDINRLSDYDVDHIVPQSFLKDDSIDNKVLTRSDKARGKSDNVPSEEVVKKMKNYWRQLLNAKLITQRKFDNLTKAERGGLSELDKAGFIKRQLVETRQITKHVAQILDSRMNTKYDENDKLIREVKVITLKSKLVSDFRKDFQFYKVREINNYHHAHDAYLNAVVGTALIKKYPKLESEFVYGDYKVYDVRKMIAKSEQEIGKATAKYFFYSNIMNFFKTEITLANGEIRKRPLIETNGETGEIVWDKGRDFATVRKVLSMPQVNIVKKTEVQTGGFSKESILPKRNSDKLIARKKDWDPKKYGGFDSPTVAYSVLVVAKVEKGKSKKLKSVKELLGITIMERSSFEKNPIDFLEAKGYKEVKKDLIIKLPKYSLFELENGRKRMLASAGELQKGNELALPSKYVNFLYLASHYEKLKGSPEDNEQKQLFVEQHKHYLDEIIEQISEFSKRVILADANLDKVLSAYNKHRDKPIREQAENIIHLFTLTNLGAPAAFKYFDTTIDRKRYTSTKEVLDATLIHQSITGLYETRIDLSQLGGDGGPAPAPGGVLNLEEEYRLHEKPVPSSIDPSWLQLFPTVWAERAGMGLANQVPPVVVELRSGASPVAVRQYPMSKEAREGIRPHIQRFLDLGVLVPCQSPWNTPLLPVKKPGTNDYRPVQDLREINKRVQDIHPTVPNPYNLLSSLPPSHTWYSVLDLKDAFFCLKLHPNSQPLFAFEWRDPEKGNTGQLTWTRLPQGFKNSPTLFNEALHRDLAPFRALNPQVVLLQYVDDLLVAAPTYRDCKEGTQKLLQELSKLGYRVSAKKAQLCQKEVTYLGYLLKEGKRWLTPARKATVMKIPPPTTPRQVREFLGTAGFCRLWIPGFASLAAPLYPLTKPSIPFIWTEEHQKAFDRIKEALLSAPALALPDLTKPFTLYVDERAGVARGVLTQTLGPWRRPVAYLSKKLDPVASGWPTCLKAVAAVALLLKDADKLTLGQNVTVIASHSLESIVRQPPDRWMTNARMTHYQSLLLNERVSFAPPAVLNPATLLPVESEATPVHRCSEILAEETGTRRDLKDQPLPGVPAWYTDGSSFIAEGKRRAGAAIVDGKRTVWASSLPEGTSAQKAELVALTQALRLAEGKDINIYTDSRYAFATAHIHGAIYKQRGWLTSAGKDIKNKEEILALLEAIHLPKRVAIIHCPGHQKGNDPVATGNRRADEAAKQAALSTRVLAETTKPAGKRTADGSEFEKRTADGSEFESPKKKAKVE

SEQ ID NO: 849 - protein, 2092 aa, synthetic construct
MPAAKRVKLDGGDKKYSIGLDIGTNSVGWAVITDEYKVPSKKFKVLGNTDRHSIKKNLIGALLFDSGETAEATRLKRTARRRYTRRKNRICYLQEIFSNEMAKVDDSFFHRLEESFLVEEDKKHERHPIFGNIVDEVAYHEKYPTIYHLRKKLVDSTDKADLRLIYLALAHMIKFRGHFLIEGDLNPDNSDVDKLFIQLVQTYNQLFEENPINASGVDAKAILSARLSKSRRLENLIAQLPGEKKNGLFGNLIALSLGLTPNFKSNFDLAEDAKLQLSKDTYDDDLDNLLAQIGDQYADLFLAAKNLSDAILLSDILRVNTEITKAPLSASMIKRYDEHHQDLTLLKALVRQQLPEKYKEIFFDQSKNGYAGYIDGGASQEEFYKFIKPILEKMDGTEELLVKLNREDLLRKQRTFDNGSIPHQIHLGELHAILRRQEDFYPFLKDNREKIEKILTFRIPYYVGPLARGNSRFAWMTRKSEETITPWNFEEVVDKGASAQSFIERMTNFDKNLPNEKVLPKHSLLYEYFTVYNELTKVKYVTEGMRKPAFLSGEQKKAIVDLLFKTNRKVTVKQLKEDYFKKIECFDSVEISGVEDRFNASLGTYHDLLKIIKDKDFLDNEENEDILEDIVLTLTLFEDREMIEERLKTYAHLFDDKVMKQLKRRRYTGWGRLSRKLINGIRDKQSGKTILDFLKSDGFANRNFMQLIHDDSLTFKEDIQKAQVSGQGDSLHEHIANLAGSPAIKKGILQTVKVVDELVKVMGRHKPENIVIEMARENQTTQKGQKNSRERMKRIEEGIKELGSQILKEHPVENTQLQNEKLYLYYLQNGRDMYVDQELDINRLSDYDVDHIVPQSFLKDDSIDNKVLTRSDKARGKSDNVPSEEVVKKMKNYWRQLLNAKLITQRKFDNLTKAERGGLSELDKAGFIKRQLVETRQITKHVAQILDSRMNTKYDENDKLIREVKVITLKSKLVSDFRKDFQFYKVREINNYHHAHDAYLNAVVGTALIKKYPKLESEFVYGDYKVYDVRKMIAKSEQEIGKATAKYFFYSNIMNFFKTEITLANGEIRKRPLIETNGETGEIVWDKGRDFATVRKVLSMPQVNIVKKTEVQTGGFSKESILPKRNSDKLIARKKDWDPKKYGGFDSPTVAYSVLVVAKVEKGKSKKLKSVKELLGITIMERSSFEKNPIDFLEAKGYKEVKKDLIIKLPKYSLFELENGRKRMLASAGELQKGNELALPSKYVNFLYLASHYEKLKGSPEDNEQKQLFVEQHKHYLDEIIEQISEFSKRVILADANLDKVLSAYNKHRDKPIREQAENIIHLFTLTNLGAPAAFKYFDTTIDRKRYTSTKEVLDATLIHQSITGLYETRIDLSQLGGDGGGSSGGGGGSGGVLNLEEEYRLHEKPVPSSIDPSWLQLFPTVWAERAGMGLANQVPPVVVELRSGASPVAVRQYPMSKEAREGIRPHIQRFLDLGVLVPCQSPWNTPLLPVKKPGTNDYRPVQDLREINKRVQDIHPTVPNPYNLLSSLPPSHTWYSVLDLKDAFFCLKLHPNSQPLFAFEWRDPEKGNTGQLTWTRLPQGFKNSPTLFNEALHRDLAPFRALNPQVVLLQYVDDLLVAAPTYRDCKEGTQKLLQELSKLGYRVSAKKAQLCQKEVTYLGYLLKEGKRWLTPARKATVMKIPPPTTPRQVREFLGTAGFCRLWIPGFASLAAPLYPLTKPSIPFIWTEEHQKAFDRIKEALLSAPALALPDLTKPFTLYVDERAGVARGVLTQTLGPWRRPVAYLSKKLDPVASGWPTCLKAVAAVALLLKDADKLTLGQNVTVIASHSLESIVRQPPDRWMTNARMTHYQSLLLNERVSFAPPAVLNPATLLPVESEATPVHRCSEILAEETGTRRDLKDQPLPGVPAWYTDGSSFIAEGKRRAGAAIVDGKRTVWASSLPEGTSAQKAELVALTQALRLAEGKDINIYTDSRYAFATAHIHGAIYKQRGWLTSAGKDIKNKEEILALLEAIHLPKRVAIIHCPGHQKGNDPVATGNRRADEAAKQAALSTRVLAETTKPAGKRTADGSEFEKRTADGSEFESPKKKAKVE

SEQ ID NO: 850 - protein, 2092 aa, synthetic construct
MPAAKRVKLDGGDKKYSIGLDIGTNSVGWAVITDEYKVPSKKFKVLGNTDRHSIKKNLIGALLFDSGETAEATRLKRTARRRYTRRKNRICYLQEIFSNEMAKVDDSFFHRLEESFLVEEDKKHERHPIFGNIVDEVAYHEKYPTIYHLRKKLVDSTDKADLRLIYLALAHMIKFRGHFLIEGDLNPDNSDVDKLFIQLVQTYNQLFEENPINASGVDAKAILSARLSKSRRLENLIAQLPGEKKNGLFGNLIALSLGLTPNFKSNFDLAEDAKLQLSKDTYDDDLDNLLAQIGDQYADLFLAAKNLSDAILLSDILRVNTEITKAPLSASMIKRYDEHHQDLTLLKALVRQQLPEKYKEIFFDQSKNGYAGYIDGGASQEEFYKFIKPILEKMDGTEELLVKLNREDLLRKQRTFDNGSIPHQIHLGELHAILRRQEDFYPFLKDNREKIEKILTFRIPYYVGPLARGNSRFAWMTRKSEETITPWNFEEVVDKGASAQSFIERMTNFDKNLPNEKVLPKHSLLYEYFTVYNELTKVKYVTEGMRKPAFLSGEQKKAIVDLLFKTNRKVTVKQLKEDYFKKIECFDSVEISGVEDRFNASLGTYHDLLKIIKDKDFLDNEENEDILEDIVLTLTLFEDREMIEERLKTYAHLFDDKVMKQLKRRRYTGWGRLSRKLINGIRDKQSGKTILDFLKSDGFANRNFMQLIHDDSLTFKEDIQKAQVSGQGDSLHEHIANLAGSPAIKKGILQTVKVVDELVKVMGRHKPENIVIEMARENQTTQKGQKNSRERMKRIEEGIKELGSQILKEHPVENTQLQNEKLYLYYLQNGRDMYVDQELDINRLSDYDVDHIVPQSFLKDDSIDNKVLTRSDKARGKSDNVPSEEVVKKMKNYWRQLLNAKLITQRKFDNLTKAERGGLSELDKAGFIKRQLVETRQITKHVAQILDSRMNTKYDENDKLIREVKVITLKSKLVSDFRKDFQFYKVREINNYHHAHDAYLNAVVGTALIKKYPKLESEFVYGDYKVYDVRKMIAKSEQEIGKATAKYFFYSNIMNFFKTEITLANGEIRKRPLIETNGETGEIVWDKGRDFATVRKVLSMPQVNIVKKTEVQTGGFSKESILPKRNSDKLIARKKDWDPKKYGGFDSPTVAYSVLVVAKVEKGKSKKLKSVKELLGITIMERSSFEKNPIDFLEAKGYKEVKKDLIIKLPKYSLFELENGRKRMLASAGELQKGNELALPSKYVNFLYLASHYEKLKGSPEDNEQKQLFVEQHKHYLDEIIEQISEFSKRVILADANLDKVLSAYNKHRDKPIREQAENIIHLFTLTNLGAPAAFKYFDTTIDRKRYTSTKEVLDATLIHQSITGLYETRIDLSQLGGDGGGGSGGSGGSGGVLNLEEEYRLHEKPVPSSIDPSWLQLFPTVWAERAGMGLANQVPPVVVELRSGASPVAVRQYPMSKEAREGIRPHIQRFLDLGVLVPCQSPWNTPLLPVKKPGTNDYRPVQDLREINKRVQDIHPTVPNPYNLLSSLPPSHTWYSVLDLKDAFFCLKLHPNSQPLFAFEWRDPEKGNTGQLTWTRLPQGFKNSPTLFNEALHRDLAPFRALNPQVVLLQYVDDLLVAAPTYRDCKEGTQKLLQELSKLGYRVSAKKAQLCQKEVTYLGYLLKEGKRWLTPARKATVMKIPPPTTPRQVREFLGTAGFCRLWIPGFASLAAPLYPLTKPSIPFIWTEEHQKAFDRIKEALLSAPALALPDLTKPFTLYVDERAGVARGVLTQTLGPWRRPVAYLSKKLDPVASGWPTCLKAVAAVALLLKDADKLTLGQNVTVIASHSLESIVRQPPDRWMTNARMTHYQSLLLNERVSFAPPAVLNPATLLPVESEATPVHRCSEILAEETGTRRDLKDQPLPGVPAWYTDGSSFIAEGKRRAGAAIVDGKRTVWASSLPEGTSAQKAELVALTQALRLAEGKDINIYTDSRYAFATAHIHGAIYKQRGWLTSAGKDIKNKEEILALLEAIHLPKRVAIIHCPGHQKGNDPVATGNRRADEAAKQAALSTRVLAETTKPAGKRTADGSEFEKRTADGSEFESPKKKAKVE

SEQ ID NO: 851 - protein, 2086 aa, synthetic construct
MPAAKRVKLDGGDKKYSIGLDIGTNSVGWAVITDEYKVPSKKFKVLGNTDRHSIKKNLIGALLFDSGETAEATRLKRTARRRYTRRKNRICYLQEIFSNEMAKVDDSFFHRLEESFLVEEDKKHERHPIFGNIVDEVAYHEKYPTIYHLRKKLVDSTDKADLRLIYLALAHMIKFRGHFLIEGDLNPDNSDVDKLFIQLVQTYNQLFEENPINASGVDAKAILSARLSKSRRLENLIAQLPGEKKNGLFGNLIALSLGLTPNFKSNFDLAEDAKLQLSKDTYDDDLDNLLAQIGDQYADLFLAAKNLSDAILLSDILRVNTEITKAPLSASMIKRYDEHHQDLTLLKALVRQQLPEKYKEIFFDQSKNGYAGYIDGGASQEEFYKFIKPILEKMDGTEELLVKLNREDLLRKQRTFDNGSIPHQIHLGELHAILRRQEDFYPFLKDNREKIEKILTFRIPYYVGPLARGNSRFAWMTRKSEETITPWNFEEVVDKGASAQSFIERMTNFDKNLPNEKVLPKHSLLYEYFTVYNELTKVKYVTEGMRKPAFLSGEQKKAIVDLLFKTNRKVTVKQLKEDYFKKIECFDSVEISGVEDRFNASLGTYHDLLKIIKDKDFLDNEENEDILEDIVLTLTLFEDREMIEERLKTYAHLFDDKVMKQLKRRRYTGWGRLSRKLINGIRDKQSGKTILDFLKSDGFANRNFMQLIHDDSLTFKEDIQKAQVSGQGDSLHEHIANLAGSPAIKKGILQTVKVVDELVKVMGRHKPENIVIEMARENQTTQKGQKNSRERMKRIEEGIKELGSQILKEHPVENTQLQNEKLYLYYLQNGRDMYVDQELDINRLSDYDVDHIVPQSFLKDDSIDNKVLTRSDKARGKSDNVPSEEVVKKMKNYWRQLLNAKLITQRKFDNLTKAERGGLSELDKAGFIKRQLVETRQITKHVAQILDSRMNTKYDENDKLIREVKVITLKSKLVSDFRKDFQFYKVREINNYHHAHDAYLNAVVGTALIKKYPKLESEFVYGDYKVYDVRKMIAKSEQEIGKATAKYFFYSNIMNFFKTEITLANGEIRKRPLIETNGETGEIVWDKGRDFATVRKVLSMPQVNIVKKTEVQTGGFSKESILPKRNSDKLIARKKDWDPKKYGGFDSPTVAYSVLVVAKVEKGKSKKLKSVKELLGITIMERSSFEKNPIDFLEAKGYKEVKKDLIIKLPKYSLFELENGRKRMLASAGELQKGNELALPSKYVNFLYLASHYEKLKGSPEDNEQKQLFVEQHKHYLDEIIEQISEFSKRVILADANLDKVLSAYNKHRDKPIREQAENIIHLFTLTNLGAPAAFKYFDTTIDRKRYTSTKEVLDATLIHQSITGLYETRIDLSQLGGDGGGGSGGVLNLEEEYRLHEKPVPSSIDPSWLQLFPTVWAERAGMGLANQVPPVVVELRSGASPVAVRQYPMSKEAREGIRPHIQRFLDLGVLVPCQSPWNTPLLPVKKPGTNDYRPVQDLREINKRVQDIHPTVPNPYNLLSSLPPSHTWYSVLDLKDAFFCLKLHPNSQPLFAFEWRDPEKGNTGQLTWTRLPQGFKNSPTLFNEALHRDLAPFRALNPQVVLLQYVDDLLVAAPTYRDCKEGTQKLLQELSKLGYRVSAKKAQLCQKEVTYLGYLLKEGKRWLTPARKATVMKIPPPTTPRQVREFLGTAGFCRLWIPGFASLAAPLYPLTKPSIPFIWTEEHQKAFDRIKEALLSAPALALPDLTKPFTLYVDERAGVARGVLTQTLGPWRRPVAYLSKKLDPVASGWPTCLKAVAAVALLLKDADKLTLGQNVTVIASHSLESIVRQPPDRWMTNARMTHYQSLLLNERVSFAPPAVLNPATLLPVESEATPVHRCSEILAEETGTRRDLKDQPLPGVPAWYTDGSSFIAEGKRRAGAAIVDGKRTVWASSLPEGTSAQKAELVALTQALRLAEGKDINIYTDSRYAFATAHIHGAIYKQRGWLTSAGKDIKNKEEILALLEAIHLPKRVAIIHCPGHQKGNDPVATGNRRADEAAKQAALSTRVLAETTKPAGKRTADGSEFEKRTADGSEFESPKKKAKVE

SEQ ID NO: 852 - protein, 2091 aa, synthetic construct
MPAAKRVKLDGGDKKYSIGLDIGTNSVGWAVITDEYKVPSKKFKVLGNTDRHSIKKNLIGALLFDSGETAEATRLKRTARRRYTRRKNRICYLQEIFSNEMAKVDDSFFHRLEESFLVEEDKKHERHPIFGNIVDEVAYHEKYPTIYHLRKKLVDSTDKADLRLIYLALAHMIKFRGHFLIEGDLNPDNSDVDKLFIQLVQTYNQLFEENPINASGVDAKAILSARLSKSRRLENLIAQLPGEKKNGLFGNLIALSLGLTPNFKSNFDLAEDAKLQLSKDTYDDDLDNLLAQIGDQYADLFLAAKNLSDAILLSDILRVNTEITKAPLSASMIKRYDEHHQDLTLLKALVRQQLPEKYKEIFFDQSKNGYAGYIDGGASQEEFYKFIKPILEKMDGTEELLVKLNREDLLRKQRTFDNGSIPHQIHLGELHAILRRQEDFYPFLKDNREKIEKILTFRIPYYVGPLARGNSRFAWMTRKSEETITPWNFEEVVDKGASAQSFIERMTNFDKNLPNEKVLPKHSLLYEYFTVYNELTKVKYVTEGMRKPAFLSGEQKKAIVDLLFKTNRKVTVKQLKEDYFKKIECFDSVEISGVEDRFNASLGTYHDLLKIIKDKDFLDNEENEDILEDIVLTLTLFEDREMIEERLKTYAHLFDDKVMKQLKRRRYTGWGRLSRKLINGIRDKQSGKTILDFLKSDGFANRNFMQLIHDDSLTFKEDIQKAQVSGQGDSLHEHIANLAGSPAIKKGILQTVKVVDELVKVMGRHKPENIVIEMARENQTTQKGQKNSRERMKRIEEGIKELGSQILKEHPVENTQLQNEKLYLYYLQNGRDMYVDQELDINRLSDYDVDHIVPQSFLKDDSIDNKVLTRSDKARGKSDNVPSEEVVKKMKNYWRQLLNAKLITQRKFDNLTKAERGGLSELDKAGFIKRQLVETRQITKHVAQILDSRMNTKYDENDKLIREVKVITLKSKLVSDFRKDFQFYKVREINNYHHAHDAYLNAVVGTALIKKYPKLESEFVYGDYKVYDVRKMIAKSEQEIGKATAKYFFYSNIMNFFKTEITLANGEIRKRPLIETNGETGEIVWDKGRDFATVRKVLSMPQVNIVKKTEVQTGGFSKESILPKRNSDKLIARKKDWDPKKYGGFDSPTVAYSVLVVAKVEKGKSKKLKSVKELLGITIMERSSFEKNPIDFLEAKGYKEVKKDLIIKLPKYSLFELENGRKRMLASAGELQKGNELALPSKYVNFLYLASHYEKLKGSPEDNEQKQLFVEQHKHYLDEIIEQISEFSKRVILADANLDKVLSAYNKHRDKPIREQAENIIHLFTLTNLGAPAAFKYFDTTIDRKRYTSTKEVLDATLIHQSITGLYETRIDLSQLGGDGGGGSEAAAKGGVLNLEEEYRLHEKPVPSSIDPSWLQLFPTVWAERAGMGLANQVPPVVVELRSGASPVAVRQYPMSKEAREGIRPHIQRFLDLGVLVPCQSPWNTPLLPVKKPGTNDYRPVQDLREINKRVQDIHPTVPNPYNLLSSLPPSHTWYSVLDLKDAFFCLKLHPNSQPLFAFEWRDPEKGNTGQLTWTRLPQGFKNSPTLFNEALHRDLAPFRALNPQVVLLQYVDDLLVAAPTYRDCKEGTQKLLQELSKLGYRVSAKKAQLCQKEVTYLGYLLKEGKRWLTPARKATVMKIPPPTTPRQVREFLGTAGFCRLWIPGFASLAAPLYPLTKPSIPFIWTEEHQKAFDRIKEALLSAPALALPDLTKPFTLYVDERAGVARGVLTQTLGPWRRPVAYLSKKLDPVASGWPTCLKAVAAVALLLKDADKLTLGQNVTVIASHSLESIVRQPPDRWMTNARMTHYQSLLLNERVSFAPPAVLNPATLLPVESEATPVHRCSEILAEETGTRRDLKDQPLPGVPAWYTDGSSFIAEGKRRAGAAIVDGKRTVWASSLPEGTSAQKAELVALTQALRLAEGKDINIYTDSRYAFATAHIHGAIYKQRGWLTSAGKDIKNKEEILALLEAIHLPKRVAIIHCPGHQKGNDPVATGNRRADEAAKQAALSTRVLAETTKPAGKRTADGSEFEKRTADGSEFESPKKKAKVE

SEQ ID NO: 853 - protein, 2094 aa, synthetic construct
MPAAKRVKLDGGDKKYSIGLDIGTNSVGWAVITDEYKVPSKKFKVLGNTDRHSIKKNLIGALLFDSGETAEATRLKRTARRRYTRRKNRICYLQEIFSNEMAKVDDSFFHRLEESFLVEEDKKHERHPIFGNIVDEVAYHEKYPTIYHLRKKLVDSTDKADLRLIYLALAHMIKFRGHFLIEGDLNPDNSDVDKLFIQLVQTYNQLFEENPINASGVDAKAILSARLSKSRRLENLIAQLPGEKKNGLFGNLIALSLGLTPNFKSNFDLAEDAKLQLSKDTYDDDLDNLLAQIGDQYADLFLAAKNLSDAILLSDILRVNTEITKAPLSASMIKRYDEHHQDLTLLKALVRQQLPEKYKEIFFDQSKNGYAGYIDGGASQEEFYKFIKPILEKMDGTEELLVKLNREDLLRKQRTFDNGSIPHQIHLGELHAILRRQEDFYPFLKDNREKIEKILTFRIPYYVGPLARGNSRFAWMTRKSEETITPWNFEEVVDKGASAQSFIERMTNFDKNLPNEKVLPKHSLLYEYFTVYNELTKVKYVTEGMRKPAFLSGEQKKAIVDLLFKTNRKVTVKQLKEDYFKKIECFDSVEISGVEDRFNASLGTYHDLLKIIKDKDFLDNEENEDILEDIVLTLTLFEDREMIEERLKTYAHLFDDKVMKQLKRRRYTGWGRLSRKLINGIRDKQSGKTILDFLKSDGFANRNFMQLIHDDSLTFKEDIQKAQVSGQGDSLHEHIANLAGSPAIKKGILQTVKVVDELVKVMGRHKPENIVIEMARENQTTQKGQKNSRERMKRIEEGIKELGSQILKEHPVENTQLQNEKLYLYYLQNGRDMYVDQELDINRLSDYDVDHIVPQSFLKDDSIDNKVLTRSDKARGKSDNVPSEEVVKKMKNYWRQLLNAKLITQRKFDNLTKAERGGLSELDKAGFIKRQLVETRQITKHVAQILDSRMNTKYDENDKLIREVKVITLKSKLVSDFRKDFQFYKVREINNYHHAHDAYLNAVVGTALIKKYPKLESEFVYGDYKVYDVRKMIAKSEQEIGKATAKYFFYSNIMNFFKTEITLANGEIRKRPLIETNGETGEIVWDKGRDFATVRKVLSMPQVNIVKKTEVQTGGFSKESILPKRNSDKLIARKKDWDPKKYGGFDSPTVAYSVLVVAKVEKGKSKKLKSVKELLGITIMERSSFEKNPIDFLEAKGYKEVKKDLIIKLPKYSLFELENGRKRMLASAGELQKGNELALPSKYVNFLYLASHYEKLKGSPEDNEQKQLFVEQHKHYLDEIIEQISEFSKRVILADANLDKVLSAYNKHRDKPIREQAENIIHLFTLTNLGAPAAFKYFDTTIDRKRYTSTKEVLDATLIHQSITGLYETRIDLSQLGGDGGGSSEAAAKGGGGGVLNLEEEYRLHEKPVPSSIDPSWLQLFPTVWAERAGMGLANQVPPVVVELRSGASPVAVRQYPMSKEAREGIRPHIQRFLDLGVLVPCQSPWNTPLLPVKKPGTNDYRPVQDLREINKRVQDIHPTVPNPYNLLSSLPPSHTWYSVLDLKDAFFCLKLHPNSQPLFAFEWRDPEKGNTGQLTWTRLPQGFKNSPTLFNEALHRDLAPFRALNPQVVLLQYVDDLLVAAPTYRDCKEGTQKLLQELSKLGYRVSAKKAQLCQKEVTYLGYLLKEGKRWLTPARKATVMKIPPPTTPRQVREFLGTAGFCRLWIPGFASLAAPLYPLTKPSIPFIWTEEHQKAFDRIKEALLSAPALALPDLTKPFTLYVDERAGVARGVLTQTLGPWRRPVAYLSKKLDPVASGWPTCLKAVAAVALLLKDADKLTLGQNVTVIASHSLESIVRQPPDRWMTNARMTHYQSLLLNERVSFAPPAVLNPATLLPVESEATPVHRCSEILAEETGTRRDLKDQPLPGVPAWYTDGSSFIAEGKRRAGAAIVDGKRTVWASSLPEGTSAQKAELVALTQALRLAEGKDINIYTDSRYAFATAHIHGAIYKQRGWLTSAGKDIKNKEEILALLEAIHLPKRVAIIHCPGHQKGNDPVATGNRRADEAAKQAALSTRVLAETTKPAGKRTADGSEFEKRTADGSEFESPKKKAKVE

SEQ ID NO: 854 - protein, 2094 aa, synthetic construct
MPAAKRVKLDGGDKKYSIGLDIGTNSVGWAVITDEYKVPSKKFKVLGNTDRHSIKKNLIGALLFDSGETAEATRLKRTARRRYTRRKNRICYLQEIFSNEMAKVDDSFFHRLEESFLVEEDKKHERHPIFGNIVDEVAYHEKYPTIYHLRKKLVDSTDKADLRLIYLALAHMIKFRGHFLIEGDLNPDNSDVDKLFIQLVQTYNQLFEENPINASGVDAKAILSARLSKSRRLENLIAQLPGEKKNGLFGNLIALSLGLTPNFKSNFDLAEDAKLQLSKDTYDDDLDNLLAQIGDQYADLFLAAKNLSDAILLSDILRVNTEITKAPLSASMIKRYDEHHQDLTLLKALVRQQLPEKYKEIFFDQSKNGYAGYIDGGASQEEFYKFIKPILEKMDGTEELLVKLNREDLLRKQRTFDNGSIPHQIHLGELHAILRRQEDFYPFLKDNREKIEKILTFRIPYYVGPLARGNSRFAWMTRKSEETITPWNFEEVVDKGASAQSFIERMTNFDKNLPNEKVLPKHSLLYEYFTVYNELTKVKYVTEGMRKPAFLSGEQKKAIVDLLFKTNRKVTVKQLKEDYFKKIECFDSVEISGVEDRFNASLGTYHDLLKIIKDKDFLDNEENEDILEDIVLTLTLFEDREMIEERLKTYAHLFDDKVMKQLKRRRYTGWGRLSRKLINGIRDKQSGKTILDFLKSDGFANRNFMQLIHDDSLTFKEDIQKAQVSGQGDSLHEHIANLAGSPAIKKGILQTVKVVDELVKVMGRHKPENIVIEMARENQTTQKGQKNSRERMKRIEEGIKELGSQILKEHPVENTQLQNEKLYLYYLQNGRDMYVDQELDINRLSDYDVDHIVPQSFLKDDSIDNKVLTRSDKARGKSDNVPSEEVVKKMKNYWRQLLNAKLITQRKFDNLTKAERGGLSELDKAGFIKRQLVETRQITKHVAQILDSRMNTKYDENDKLIREVKVITLKSKLVSDFRKDFQFYKVREINNYHHAHDAYLNAVVGTALIKKYPKLESEFVYGDYKVYDVRKMIAKSEQEIGKATAKYFFYSNIMNFFKTEITLANGEIRKRPLIETNGETGEIVWDKGRDFATVRKVLSMPQVNIVKKTEVQTGGFSKESILPKRNSDKLIARKKDWDPKKYGGFDSPTVAYSVLVVAKVEKGKSKKLKSVKELLGITIMERSSFEKNPIDFLEAKGYKEVKKDLIIKLPKYSLFELENGRKRMLASAGELQKGNELALPSKYVNFLYLASHYEKLKGSPEDNEQKQLFVEQHKHYLDEIIEQISEFSKRVILADANLDKVLSAYNKHRDKPIREQAENIIHLFTLTNLGAPAAFKYFDTTIDRKRYTSTKEVLDATLIHQSITGLYETRIDLSQLGGDGGGGSEAAAKGGGGGVLNLEEEYRLHEKPVPSSIDPSWLQLFPTVWAERAGMGLANQVPPVVVELRSGASPVAVRQYPMSKEAREGIRPHIQRFLDLGVLVPCQSPWNTPLLPVKKPGTNDYRPVQDLREINKRVQDIHPTVPNPYNLLSSLPPSHTWYSVLDLKDAFFCLKLHPNSQPLFAFEWRDPEKGNTGQLTWTRLPQGFKNSPTLFNEALHRDLAPFRALNPQVVLLQYVDDLLVAAPTYRDCKEGTQKLLQELSKLGYRVSAKKAQLCQKEVTYLGYLLKEGKRWLTPARKATVMKIPPPTTPRQVREFLGTAGFCRLWIPGFASLAAPLYPLTKPSIPFIWTEEHQKAFDRIKEALLSAPALALPDLTKPFTLYVDERAGVARGVLTQTLGPWRRPVAYLSKKLDPVASGWPTCLKAVAAVALLLKDADKLTLGQNVTVIASHSLESIVRQPPDRWMTNARMTHYQSLLLNERVSFAPPAVLNPATLLPVESEATPVHRCSEILAEETGTRRDLKDQPLPGVPAWYTDGSSFIAEGKRRAGAAIVDGKRTVWASSLPEGTSAQKAELVALTQALRLAEGKDINIYTDSRYAFATAHIHGAIYKQRGWLTSAGKDIKNKEEILALLEAIHLPKRVAIIHCPGHQKGNDPVATGNRRADEAAKQAALSTRVLAETTKPAGKRTADGSEFEKRTADGSEFESPKKKAKVE

SEQ ID NO: 855 - protein, 2089 aa, synthetic construct
MPAAKRVKLDGGDKKYSIGLDIGTNSVGWAVITDEYKVPSKKFKVLGNTDRHSIKKNLIGALLFDSGETAEATRLKRTARRRYTRRKNRICYLQEIFSNEMAKVDDSFFHRLEESFLVEEDKKHERHPIFGNIVDEVAYHEKYPTIYHLRKKLVDSTDKADLRLIYLALAHMIKFRGHFLIEGDLNPDNSDVDKLFIQLVQTYNQLFEENPINASGVDAKAILSARLSKSRRLENLIAQLPGEKKNGLFGNLIALSLGLTPNFKSNFDLAEDAKLQLSKDTYDDDLDNLLAQIGDQYADLFLAAKNLSDAILLSDILRVNTEITKAPLSASMIKRYDEHHQDLTLLKALVRQQLPEKYKEIFFDQSKNGYAGYIDGGASQEEFYKFIKPILEKMDGTEELLVKLNREDLLRKQRTFDNGSIPHQIHLGELHAILRRQEDFYPFLKDNREKIEKILTFRIPYYVGPLARGNSRFAWMTRKSEETITPWNFEEVVDKGASAQSFIERMTNFDKNLPNEKVLPKHSLLYEYFTVYNELTKVKYVTEGMRKPAFLSGEQKKAIVDLLFKTNRKVTVKQLKEDYFKKIECFDSVEISGVEDRFNASLGTYHDLLKIIKDKDFLDNEENEDILEDIVLTLTLFEDREMIEERLKTYAHLFDDKVMKQLKRRRYTGWGRLSRKLINGIRDKQSGKTILDFLKSDGFANRNFMQLIHDDSLTFKEDIQKAQVSGQGDSLHEHIANLAGSPAIKKGILQTVKVVDELVKVMGRHKPENIVIEMARENQTTQKGQKNSRERMKRIEEGIKELGSQILKEHPVENTQLQNEKLYLYYLQNGRDMYVDQELDINRLSDYDVDHIVPQSFLKDDSIDNKVLTRSDKARGKSDNVPSEEVVKKMKNYWRQLLNAKLITQRKFDNLTKAERGGLSELDKAGFIKRQLVETRQITKHVAQILDSRMNTKYDENDKLIREVKVITLKSKLVSDFRKDFQFYKVREINNYHHAHDAYLNAVVGTALIKKYPKLESEFVYGDYKVYDVRKMIAKSEQEIGKATAKYFFYSNIMNFFKTEITLANGEIRKRPLIETNGETGEIVWDKGRDFATVRKVLSMPQVNIVKKTEVQTGGFSKESILPKRNSDKLIARKKDWDPKKYGGFDSPTVAYSVLVVAKVEKGKSKKLKSVKELLGITIMERSSFEKNPIDFLEAKGYKEVKKDLIIKLPKYSLFELENGRKRMLASAGELQKGNELALPSKYVNFLYLASHYEKLKGSPEDNEQKQLFVEQHKHYLDEIIEQISEFSKRVILADANLDKVLSAYNKHRDKPIREQAENIIHLFTLTNLGAPAAFKYFDTTIDRKRYTSTKEVLDATLIHQSITGLYETRIDLSQLGGDGGGGSGGGGGVLNLEEEYRLHEKPVPSSIDPSWLQLFPTVWAERAGMGLANQVPPVVVELRSGASPVAVRQYPMSKEAREGIRPHIQRFLDLGVLVPCQSPWNTPLLPVKKPGTNDYRPVQDLREINKRVQDIHPTVPNPYNLLSSLPPSHTWYSVLDLKDAFFCLKLHPNSQPLFAFEWRDPEKGNTGQLTWTRLPQGFKNSPTLFNEALHRDLAPFRALNPQVVLLQYVDDLLVAAPTYRDCKEGTQKLLQELSKLGYRVSAKKAQLCQKEVTYLGYLLKEGKRWLTPARKATVMKIPPPTTPRQVREFLGTAGFCRLWIPGFASLAAPLYPLTKPSIPFIWTEEHQKAFDRIKEALLSAPALALPDLTKPFTLYVDERAGVARGVLTQTLGPWRRPVAYLSKKLDPVASGWPTCLKAVAAVALLLKDADKLTLGQNVTVIASHSLESIVRQPPDRWMTNARMTHYQSLLLNERVSFAPPAVLNPATLLPVESEATPVHRCSEILAEETGTRRDLKDQPLPGVPAWYTDGSSFIAEGKRRAGAAIVDGKRTVWASSLPEGTSAQKAELVALTQALRLAEGKDINIYTDSRYAFATAHIHGAIYKQRGWLTSAGKDIKNKEEILALLEAIHLPKRVAIIHCPGHQKGNDPVATGNRRADEAAKQAALSTRVLAETTKPAGKRTADGSEFEKRTADGSEFESPKKKAKVE

SEQ ID NO: 856 - protein, 2094 aa, synthetic construct
MPAAKRVKLDGGDKKYSIGLDIGTNSVGWAVITDEYKVPSKKFKVLGNTDRHSIKKNLIGALLFDSGETAEATRLKRTARRRYTRRKNRICYLQEIFSNEMAKVDDSFFHRLEESFLVEEDKKHERHPIFGNIVDEVAYHEKYPTIYHLRKKLVDSTDKADLRLIYLALAHMIKFRGHFLIEGDLNPDNSDVDKLFIQLVQTYNQLFEENPINASGVDAKAILSARLSKSRRLENLIAQLPGEKKNGLFGNLIALSLGLTPNFKSNFDLAEDAKLQLSKDTYDDDLDNLLAQIGDQYADLFLAAKNLSDAILLSDILRVNTEITKAPLSASMIKRYDEHHQDLTLLKALVRQQLPEKYKEIFFDQSKNGYAGYIDGGASQEEFYKFIKPILEKMDGTEELLVKLNREDLLRKQRTFDNGSIPHQIHLGELHAILRRQEDFYPFLKDNREKIEKILTFRIPYYVGPLARGNSRFAWMTRKSEETITPWNFEEVVDKGASAQSFIERMTNFDKNLPNEKVLPKHSLLYEYFTVYNELTKVKYVTEGMRKPAFLSGEQKKAIVDLLFKTNRKVTVKQLKEDYFKKIECFDSVEISGVEDRFNASLGTYHDLLKIIKDKDFLDNEENEDILEDIVLTLTLFEDREMIEERLKTYAHLFDDKVMKQLKRRRYTGWGRLSRKLINGIRDKQSGKTILDFLKSDGFANRNFMQLIHDDSLTFKEDIQKAQVSGQGDSLHEHIANLAGSPAIKKGILQTVKVVDELVKVMGRHKPENIVIEMARENQTTQKGQKNSRERMKRIEEGIKELGSQILKEHPVENTQLQNEKLYLYYLQNGRDMYVDQELDINRLSDYDVDHIVPQSFLKDDSIDNKVLTRSDKARGKSDNVPSEEVVKKMKNYWRQLLNAKLITQRKFDNLTKAERGGLSELDKAGFIKRQLVETRQITKHVAQILDSRMNTKYDENDKLIREVKVITLKSKLVSDFRKDFQFYKVREINNYHHAHDAYLNAVVGTALIKKYPKLESEFVYGDYKVYDVRKMIAKSEQEIGKATAKYFFYSNIMNFFKTEITLANGEIRKRPLIETNGETGEIVWDKGRDFATVRKVLSMPQVNIVKKTEVQTGGFSKESILPKRNSDKLIARKKDWDPKKYGGFDSPTVAYSVLVVAKVEKGKSKKLKSVKELLGITIMERSSFEKNPIDFLEAKGYKEVKKDLIIKLPKYSLFELENGRKRMLASAGELQKGNELALPSKYVNFLYLASHYEKLKGSPEDNEQKQLFVEQHKHYLDEIIEQISEFSKRVILADANLDKVLSAYNKHRDKPIREQAENIIHLFTLTNLGAPAAFKYFDTTIDRKRYTSTKEVLDATLIHQSITGLYETRIDLSQLGGDGGEAAAKPAPGGGGGVLNLEEEYRLHEKPVPSSIDPSWLQLFPTVWAERAGMGLANQVPPVVVELRSGASPVAVRQYPMSKEAREGIRPHIQRFLDLGVLVPCQSPWNTPLLPVKKPGTNDYRPVQDLREINKRVQDIHPTVPNPYNLLSSLPPSHTWYSVLDLKDAFFCLKLHPNSQPLFAFEWRDPEKGNTGQLTWTRLPQGFKNSPTLFNEALHRDLAPFRALNPQVVLLQYVDDLLVAAPTYRDCKEGTQKLLQELSKLGYRVSAKKAQLCQKEVTYLGYLLKEGKRWLTPARKATVMKIPPPTTPRQVREFLGTAGFCRLWIPGFASLAAPLYPLTKPSIPFIWTEEHQKAFDRIKEALLSAPALALPDLTKPFTLYVDERAGVARGVLTQTLGPWRRPVAYLSKKLDPVASGWPTCLKAVAAVALLLKDADKLTLGQNVTVIASHSLESIVRQPPDRWMTNARMTHYQSLLLNERVSFAPPAVLNPATLLPVESEATPVHRCSEILAEETGTRRDLKDQPLPGVPAWYTDGSSFIAEGKRRAGAAIVDGKRTVWASSLPEGTSAQKAELVALTQALRLAEGKDINIYTDSRYAFATAHIHGAIYKQRGWLTSAGKDIKNKEEILALLEAIHLPKRVAIIHCPGHQKGNDPVATGNRRADEAAKQAALSTRVLAETTKPAGKRTADGSEFEKRTADGSEFESPKKKAKVE

SEQ ID NO: 857 - protein, 2094 aa, synthetic construct
MPAAKRVKLDGGDKKYSIGLDIGTNSVGWAVITDEYKVPSKKFKVLGNTDRHSIKKNLIGALLFDSGETAEATRLKRTARRRYTRRKNRICYLQEIFSNEMAKVDDSFFHRLEESFLVEEDKKHERHPIFGNIVDEVAYHEKYPTIYHLRKKLVDSTDKADLRLIYLALAHMIKFRGHFLIEGDLNPDNSDVDKLFIQLVQTYNQLFEENPINASGVDAKAILSARLSKSRRLENLIAQLPGEKKNGLFGNLIALSLGLTPNFKSNFDLAEDAKLQLSKDTYDDDLDNLLAQIGDQYADLFLAAKNLSDAILLSDILRVNTEITKAPLSASMIKRYDEHHQDLTLLKALVRQQLPEKYKEIFFDQSKNGYAGYIDGGASQEEFYKFIKPILEKMDGTEELLVKLNREDLLRKQRTFDNGSIPHQIHLGELHAILRRQEDFYPFLKDNREKIEKILTFRIPYYVGPLARGNSRFAWMTRKSEETITPWNFEEVVDKGASAQSFIERMTNFDKNLPNEKVLPKHSLLYEYFTVYNELTKVKYVTEGMRKPAFLSGEQKKAIVDLLFKTNRKVTVKQLKEDYFKKIECFDSVEISGVEDRFNASLGTYHDLLKIIKDKDFLDNEENEDILEDIVLTLTLFEDREMIEERLKTYAHLFDDKVMKQLKRRRYTGWGRLSRKLINGIRDKQSGKTILDFLKSDGFANRNFMQLIHDDSLTFKEDIQKAQVSGQGDSLHEHIANLAGSPAIKKGILQTVKVVDELVKVMGRHKPENIVIEMARENQTTQKGQKNSRERMKRIEEGIKELGSQILKEHPVENTQLQNEKLYLYYLQNGRDMYVDQELDINRLSDYDVDHIVPQSFLKDDSIDNKVLTRSDKARGKSDNVPSEEVVKKMKNYWRQLLNAKLITQRKFDNLTKAERGGLSELDKAGFIKRQLVETRQITKHVAQILDSRMNTKYDENDKLIREVKVITLKSKLVSDFRKDFQFYKVREINNYHHAHDAYLNAVVGTALIKKYPKLESEFVYGDYKVYDVRKMIAKSEQEIGKATAKYFFYSNIMNFFKTEITLANGEIRKRPLIETNGETGEIVWDKGRDFATVRKVLSMPQVNIVKKTEVQTGGFSKESILPKRNSDKLIARKKDWDPKKYGGFDSPTVAYSVLVVAKVEKGKSKKLKSVKELLGITIMERSSFEKNPIDFLEAKGYKEVKKDLIIKLPKYSLFELENGRKRMLASAGELQKGNELALPSKYVNFLYLASHYEKLKGSPEDNEQKQLFVEQHKHYLDEIIEQISEFSKRVILADANLDKVLSAYNKHRDKPIREQAENIIHLFTLTNLGAPAAFKYFDTTIDRKRYTSTKEVLDATLIHQSITGLYETRIDLSQLGGDGGGSSEAAAKGGSGGVLNLEEEYRLHEKPVPSSIDPSWLQLFPTVWAERAGMGLANQVPPVVVELRSGASPVAVRQYPMSKEAREGIRPHIQRFLDLGVLVPCQSPWNTPLLPVKKPGTNDYRPVQDLREINKRVQDIHPTVPNPYNLLSSLPPSHTWYSVLDLKDAFFCLKLHPNSQPLFAFEWRDPEKGNTGQLTWTRLPQGFKNSPTLFNEALHRDLAPFRALNPQVVLLQYVDDLLVAAPTYRDCKEGTQKLLQELSKLGYRVSAKKAQLCQKEVTYLGYLLKEGKRWLTPARKATVMKIPPPTTPRQVREFLGTAGFCRLWIPGFASLAAPLYPLTKPSIPFIWTEEHQKAFDRIKEALLSAPALALPDLTKPFTLYVDERAGVARGVLTQTLGPWRRPVAYLSKKLDPVASGWPTCLKAVAAVALLLKDADKLTLGQNVTVIASHSLESIVRQPPDRWMTNARMTHYQSLLLNERVSFAPPAVLNPATLLPVESEATPVHRCSEILAEETGTRRDLKDQPLPGVPAWYTDGSSFIAEGKRRAGAAIVDGKRTVWASSLPEGTSAQKAELVALTQALRLAEGKDINIYTDSRYAFATAHIHGAIYKQRGWLTSAGKDIKNKEEILALLEAIHLPKRVAIIHCPGHQKGNDPVATGNRRADEAAKQAALSTRVLAETTKPAGKRTADGSEFEKRTADGSEFESPKKKAKVE

SEQ ID NO: 858 - protein, 2092 aa, synthetic construct
MPAAKRVKLDGGDKKYSIGLDIGTNSVGWAVITDEYKVPSKKFKVLGNTDRHSIKKNLIGALLFDSGETAEATRLKRTARRRYTRRKNRICYLQEIFSNEMAKVDDSFFHRLEESFLVEEDKKHERHPIFGNIVDEVAYHEKYPTIYHLRKKLVDSTDKADLRLIYLALAHMIKFRGHFLIEGDLNPDNSDVDKLFIQLVQTYNQLFEENPINASGVDAKAILSARLSKSRRLENLIAQLPGEKKNGLFGNLIALSLGLTPNFKSNFDLAEDAKLQLSKDTYDDDLDNLLAQIGDQYADLFLAAKNLSDAILLSDILRVNTEITKAPLSASMIKRYDEHHQDLTLLKALVRQQLPEKYKEIFFDQSKNGYAGYIDGGASQEEFYKFIKPILEKMDGTEELLVKLNREDLLRKQRTFDNGSIPHQIHLGELHAILRRQEDFYPFLKDNREKIEKILTFRIPYYVGPLARGNSRFAWMTRKSEETITPWNFEEVVDKGASAQSFIERMTNFDKNLPNEKVLPKHSLLYEYFTVYNELTKVKYVTEGMRKPAFLSGEQKKAIVDLLFKTNRKVTVKQLKEDYFKKIECFDSVEISGVEDRFNASLGTYHDLLKIIKDKDFLDNEENEDILEDIVLTLTLFEDREMIEERLKTYAHLFDDKVMKQLKRRRYTGWGRLSRKLINGIRDKQSGKTILDFLKSDGFANRNFMQLIHDDSLTFKEDIQKAQVSGQGDSLHEHIANLAGSPAIKKGILQTVKVVDELVKVMGRHKPENIVIEMARENQTTQKGQKNSRERMKRIEEGIKELGSQILKEHPVENTQLQNEKLYLYYLQNGRDMYVDQELDINRLSDYDVDHIVPQSFLKDDSIDNKVLTRSDKARGKSDNVPSEEVVKKMKNYWRQLLNAKLITQRKFDNLTKAERGGLSELDKAGFIKRQLVETRQITKHVAQILDSRMNTKYDENDKLIREVKVITLKSKLVSDFRKDFQFYKVREINNYHHAHDAYLNAVVGTALIKKYPKLESEFVYGDYKVYDVRKMIAKSEQEIGKATAKYFFYSNIMNFFKTEITLANGEIRKRPLIETNGETGEIVWDKGRDFATVRKVLSMPQVNIVKKTEVQTGGFSKESILPKRNSDKLIARKKDWDPKKYGGFDSPTVAYSVLVVAKVEKGKSKKLKSVKELLGITIMERSSFEKNPIDFLEAKGYKEVKKDLIIKLPKYSLFELENGRKRMLASAGELQKGNELALPSKYVNFLYLASHYEKLKGSPEDNEQKQLFVEQHKHYLDEIIEQISEFSKRVILADANLDKVLSAYNKHRDKPIREQAENIIHLFTLTNLGAPAAFKYFDTTIDRKRYTSTKEVLDATLIHQSITGLYETRIDLSQLGGDGGPAPGGSGGGGGVLNLEEEYRLHEKPVPSSIDPSWLQLFPTVWAERAGMGLANQVPPVVVELRSGASPVAVRQYPMSKEAREGIRPHIQRFLDLGVLVPCQSPWNTPLLPVKKPGTNDYRPVQDLREINKRVQDIHPTVPNPYNLLSSLPPSHTWYSVLDLKDAFFCLKLHPNSQPLFAFEWRDPEKGNTGQLTWTRLPQGFKNSPTLFNEALHRDLAPFRALNPQVVLLQYVDDLLVAAPTYRDCKEGTQKLLQELSKLGYRVSAKKAQLCQKEVTYLGYLLKEGKRWLTPARKATVMKIPPPTTPRQVREFLGTAGFCRLWIPGFASLAAPLYPLTKPSIPFIWTEEHQKAFDRIKEALLSAPALALPDLTKPFTLYVDERAGVARGVLTQTLGPWRRPVAYLSKKLDPVASGWPTCLKAVAAVALLLKDADKLTLGQNVTVIASHSLESIVRQPPDRWMTNARMTHYQSLLLNERVSFAPPAVLNPATLLPVESEATPVHRCSEILAEETGTRRDLKDQPLPGVPAWYTDGSSFIAEGKRRAGAAIVDGKRTVWASSLPEGTSAQKAELVALTQALRLAEGKDINIYTDSRYAFATAHIHGAIYKQRGWLTSAGKDIKNKEEILALLEAIHLPKRVAIIHCPGHQKGNDPVATGNRRADEAAKQAALSTRVLAETTKPAGKRTADGSEFEKRTADGSEFESPKKKAKVE

SEQ ID NO: 859 - protein, 2089 aa, synthetic construct
MPAAKRVKLDGGDKKYSIGLDIGTNSVGWAVITDEYKVPSKKFKVLGNTDRHSIKKNLIGALLFDSGETAEATRLKRTARRRYTRRKNRICYLQEIFSNEMAKVDDSFFHRLEESFLVEEDKKHERHPIFGNIVDEVAYHEKYPTIYHLRKKLVDSTDKADLRLIYLALAHMIKFRGHFLIEGDLNPDNSDVDKLFIQLVQTYNQLFEENPINASGVDAKAILSARLSKSRRLENLIAQLPGEKKNGLFGNLIALSLGLTPNFKSNFDLAEDAKLQLSKDTYDDDLDNLLAQIGDQYADLFLAAKNLSDAILLSDILRVNTEITKAPLSASMIKRYDEHHQDLTLLKALVRQQLPEKYKEIFFDQSKNGYAGYIDGGASQEEFYKFIKPILEKMDGTEELLVKLNREDLLRKQRTFDNGSIPHQIHLGELHAILRRQEDFYPFLKDNREKIEKILTFRIPYYVGPLARGNSRFAWMTRKSEETITPWNFEEVVDKGASAQSFIERMTNFDKNLPNEKVLPKHSLLYEYFTVYNELTKVKYVTEGMRKPAFLSGEQKKAIVDLLFKTNRKVTVKQLKEDYFKKIECFDSVEISGVEDRFNASLGTYHDLLKIIKDKDFLDNEENEDILEDIVLTLTLFEDREMIEERLKTYAHLFDDKVMKQLKRRRYTGWGRLSRKLINGIRDKQSGKTILDFLKSDGFANRNFMQLIHDDSLTFKEDIQKAQVSGQGDSLHEHIANLAGSPAIKKGILQTVKVVDELVKVMGRHKPENIVIEMARENQTTQKGQKNSRERMKRIEEGIKELGSQILKEHPVENTQLQNEKLYLYYLQNGRDMYVDQELDINRLSDYDVDHIVPQSFLKDDSIDNKVLTRSDKARGKSDNVPSEEVVKKMKNYWRQLLNAKLITQRKFDNLTKAERGGLSELDKAGFIKRQLVETRQITKHVAQILDSRMNTKYDENDKLIREVKVITLKSKLVSDFRKDFQFYKVREINNYHHAHDAYLNAVVGTALIKKYPKLESEFVYGDYKVYDVRKMIAKSEQEIGKATAKYFFYSNIMNFFKTEITLANGEIRKRPLIETNGETGEIVWDKGRDFATVRKVLSMPQVNIVKKTEVQTGGFSKESILPKRNSDKLIARKKDWDPKKYGGFDSPTVAYSVLVVAKVEKGKSKKLKSVKELLGITIMERSSFEKNPIDFLEAKGYKEVKKDLIIKLPKYSLFELENGRKRMLASAGELQKGNELALPSKYVNFLYLASHYEKLKGSPEDNEQKQLFVEQHKHYLDEIIEQISEFSKRVILADANLDKVLSAYNKHRDKPIREQAENIIHLFTLTNLGAPAAFKYFDTTIDRKRYTSTKEVLDATLIHQSITGLYETRIDLSQLGGDGGPAPGSSGGVLNLEEEYRLHEKPVPSSIDPSWLQLFPTVWAERAGMGLANQVPPVVVELRSGASPVAVRQYPMSKEAREGIRPHIQRFLDLGVLVPCQSPWNTPLLPVKKPGTNDYRPVQDLREINKRVQDIHPTVPNPYNLLSSLPPSHTWYSVLDLKDAFFCLKLHPNSQPLFAFEWRDPEKGNTGQLTWTRLPQGFKNSPTLFNEALHRDLAPFRALNPQVVLLQYVDDLLVAAPTYRDCKEGTQKLLQELSKLGYRVSAKKAQLCQKEVTYLGYLLKEGKRWLTPARKATVMKIPPPTTPRQVREFLGTAGFCRLWIPGFASLAAPLYPLTKPSIPFIWTEEHQKAFDRIKEALLSAPALALPDLTKPFTLYVDERAGVARGVLTQTLGPWRRPVAYLSKKLDPVASGWPTCLKAVAAVALLLKDADKLTLGQNVTVIASHSLESIVRQPPDRWMTNARMTHYQSLLLNERVSFAPPAVLNPATLLPVESEATPVHRCSEILAEETGTRRDLKDQPLPGVPAWYTDGSSFIAEGKRRAGAAIVDGKRTVWASSLPEGTSAQKAELVALTQALRLAEGKDINIYTDSRYAFATAHIHGAIYKQRGWLTSAGKDIKNKEEILALLEAIHLPKRVAIIHCPGHQKGNDPVATGNRRADEAAKQAALSTRVLAETTKPAGKRTADGSEFEKRTADGSEFESPKKKAKVE

SEQ ID NO: 860 - protein, 2090 aa, synthetic construct
MPAAKRVKLDGGDKKYSIGLDIGTNSVGWAVITDEYKVPSKKFKVLGNTDRHSIKKNLIGALLFDSGETAEATRLKRTARRRYTRRKNRICYLQEIFSNEMAKVDDSFFHRLEESFLVEEDKKHERHPIFGNIVDEVAYHEKYPTIYHLRKKLVDSTDKADLRLIYLALAHMIKFRGHFLIEGDLNPDNSDVDKLFIQLVQTYNQLFEENPINASGVDAKAILSARLSKSRRLENLIAQLPGEKKNGLFGNLIALSLGLTPNFKSNFDLAEDAKLQLSKDTYDDDLDNLLAQIGDQYADLFLAAKNLSDAILLSDILRVNTEITKAPLSASMIKRYDEHHQDLTLLKALVRQQLPEKYKEIFFDQSKNGYAGYIDGGASQEEFYKFIKPILEKMDGTEELLVKLNREDLLRKQRTFDNGSIPHQIHLGELHAILRRQEDFYPFLKDNREKIEKILTFRIPYYVGPLARGNSRFAWMTRKSEETITPWNFEEVVDKGASAQSFIERMTNFDKNLPNEKVLPKHSLLYEYFTVYNELTKVKYVTEGMRKPAFLSGEQKKAIVDLLFKTNRKVTVKQLKEDYFKKIECFDSVEISGVEDRFNASLGTYHDLLKIIKDKDFLDNEENEDILEDIVLTLTLFEDREMIEERLKTYAHLFDDKVMKQLKRRRYTGWGRLSRKLINGIRDKQSGKTILDFLKSDGFANRNFMQLIHDDSLTFKEDIQKAQVSGQGDSLHEHIANLAGSPAIKKGILQTVKVVDELVKVMGRHKPENIVIEMARENQTTQKGQKNSRERMKRIEEGIKELGSQILKEHPVENTQLQNEKLYLYYLQNGRDMYVDQELDINRLSDYDVDHIVPQSFLKDDSIDNKVLTRSDKARGKSDNVPSEEVVKKMKNYWRQLLNAKLITQRKFDNLTKAERGGLSELDKAGFIKRQLVETRQITKHVAQILDSRMNTKYDENDKLIREVKVITLKSKLVSDFRKDFQFYKVREINNYHHAHDAYLNAVVGTALIKKYPKLESEFVYGDYKVYDVRKMIAKSEQEIGKATAKYFFYSNIMNFFKTEITLANGEIRKRPLIETNGETGEIVWDKGRDFATVRKVLSMPQVNIVKKTEVQTGGFSKESILPKRNSDKLIARKKDWDPKKYGGFDSPTVAYSVLVVAKVEKGKSKKLKSVKELLGITIMERSSFEKNPIDFLEAKGYKEVKKDLIIKLPKYSLFELENGRKRMLASAGELQKGNELALPSKYVNFLYLASHYEKLKGSPEDNEQKQLFVEQHKHYLDEIIEQISEFSKRVILADANLDKVLSAYNKHRDKPIREQAENIIHLFTLTNLGAPAAFKYFDTTIDRKRYTSTKEVLDATLIHQSITGLYETRIDLSQLGGDGGPAPAPAPGGVLNLEEEYRLHEKPVPSSIDPSWLQLFPTVWAERAGMGLANQVPPVVVELRSGASPVAVRQYPMSKEAREGIRPHIQRFLDLGVLVPCQSPWNTPLLPVKKPGTNDYRPVQDLREINKRVQDIHPTVPNPYNLLSSLPPSHTWYSVLDLKDAFFCLKLHPNSQPLFAFEWRDPEKGNTGQLTWTRLPQGFKNSPTLFNEALHRDLAPFRALNPQVVLLQYVDDLLVAAPTYRDCKEGTQKLLQELSKLGYRVSAKKAQLCQKEVTYLGYLLKEGKRWLTPARKATVMKIPPPTTPRQVREFLGTAGFCRLWIPGFASLAAPLYPLTKPSIPFIWTEEHQKAFDRIKEALLSAPALALPDLTKPFTLYVDERAGVARGVLTQTLGPWRRPVAYLSKKLDPVASGWPTCLKAVAAVALLLKDADKLTLGQNVTVIASHSLESIVRQPPDRWMTNARMTHYQSLLLNERVSFAPPAVLNPATLLPVESEATPVHRCSEILAEETGTRRDLKDQPLPGVPAWYTDGSSFIAEGKRRAGAAIVDGKRTVWASSLPEGTSAQKAELVALTQALRLAEGKDINIYTDSRYAFATAHIHGAIYKQRGWLTSAGKDIKNKEEILALLEAIHLPKRVAIIHCPGHQKGNDPVATGNRRADEAAKQAALSTRVLAETTKPAGKRTADGSEFEKRTADGSEFESPKKKAKVE

SEQ ID NO: 861 - protein, 2094 aa, synthetic construct
MPAAKRVKLDGGDKKYSIGLDIGTNSVGWAVITDEYKVPSKKFKVLGNTDRHSIKKNLIGALLFDSGETAEATRLKRTARRRYTRRKNRICYLQEIFSNEMAKVDDSFFHRLEESFLVEEDKKHERHPIFGNIVDEVAYHEKYPTIYHLRKKLVDSTDKADLRLIYLALAHMIKFRGHFLIEGDLNPDNSDVDKLFIQLVQTYNQLFEENPINASGVDAKAILSARLSKSRRLENLIAQLPGEKKNGLFGNLIALSLGLTPNFKSNFDLAEDAKLQLSKDTYDDDLDNLLAQIGDQYADLFLAAKNLSDAILLSDILRVNTEITKAPLSASMIKRYDEHHQDLTLLKALVRQQLPEKYKEIFFDQSKNGYAGYIDGGASQEEFYKFIKPILEKMDGTEELLVKLNREDLLRKQRTFDNGSIPHQIHLGELHAILRRQEDFYPFLKDNREKIEKILTFRIPYYVGPLARGNSRFAWMTRKSEETITPWNFEEVVDKGASAQSFIERMTNFDKNLPNEKVLPKHSLLYEYFTVYNELTKVKYVTEGMRKPAFLSGEQKKAIVDLLFKTNRKVTVKQLKEDYFKKIECFDSVEISGVEDRFNASLGTYHDLLKIIKDKDFLDNEENEDILEDIVLTLTLFEDREMIEERLKTYAHLFDDKVMKQLKRRRYTGWGRLSRKLINGIRDKQSGKTILDFLKSDGFANRNFMQLIHDDSLTFKEDIQKAQVSGQGDSLHEHIANLAGSPAIKKGILQTVKVVDELVKVMGRHKPENIVIEMARENQTTQKGQKNSRERMKRIEEGIKELGSQILKEHPVENTQLQNEKLYLYYLQNGRDMYVDQELDINRLSDYDVDHIVPQSFLKDDSIDNKVLTRSDKARGKSDNVPSEEVVKKMKNYWRQLLNAKLITQRKFDNLTKAERGGLSELDKAGFIKRQLVETRQITKHVAQILDSRMNTKYDENDKLIREVKVITLKSKLVSDFRKDFQFYKVREINNYHHAHDAYLNAVVGTALIKKYPKLESEFVYGDYKVYDVRKMIAKSEQEIGKATAKYFFYSNIMNFFKTEITLANGEIRKRPLIETNGETGEIVWDKGRDFATVRKVLSMPQVNIVKKTEVQTGGFSKESILPKRNSDKLIARKKDWDPKKYGGFDSPTVAYSVLVVAKVEKGKSKKLKSVKELLGITIMERSSFEKNPIDFLEAKGYKEVKKDLIIKLPKYSLFELENGRKRMLASAGELQKGNELALPSKYVNFLYLASHYEKLKGSPEDNEQKQLFVEQHKHYLDEIIEQISEFSKRVILADANLDKVLSAYNKHRDKPIREQAENIIHLFTLTNLGAPAAFKYFDTTIDRKRYTSTKEVLDATLIHQSITGLYETRIDLSQLGGDGGGGSGGGEAAAKGGVLNLEEEYRLHEKPVPSSIDPSWLQLFPTVWAERAGMGLANQVPPVVVELRSGASPVAVRQYPMSKEAREGIRPHIQRFLDLGVLVPCQSPWNTPLLPVKKPGTNDYRPVQDLREINKRVQDIHPTVPNPYNLLSSLPPSHTWYSVLDLKDAFFCLKLHPNSQPLFAFEWRDPEKGNTGQLTWTRLPQGFKNSPTLFNEALHRDLAPFRALNPQVVLLQYVDDLLVAAPTYRDCKEGTQKLLQELSKLGYRVSAKKAQLCQKEVTYLGYLLKEGKRWLTPARKATVMKIPPPTTPRQVREFLGTAGFCRLWIPGFASLAAPLYPLTKPSIPFIWTEEHQKAFDRIKEALLSAPALALPDLTKPFTLYVDERAGVARGVLTQTLGPWRRPVAYLSKKLDPVASGWPTCLKAVAAVALLLKDADKLTLGQNVTVIASHSLESIVRQPPDRWMTNARMTHYQSLLLNERVSFAPPAVLNPATLLPVESEATPVHRCSEILAEETGTRRDLKDQPLPGVPAWYTDGSSFIAEGKRRAGAAIVDGKRTVWASSLPEGTSAQKAELVALTQALRLAEGKDINIYTDSRYAFATAHIHGAIYKQRGWLTSAGKDIKNKEEILALLEAIHLPKRVAIIHCPGHQKGNDPVATGNRRADEAAKQAALSTRVLAETTKPAGKRTADGSEFEKRTADGSEFESPKKKAKVE

SEQ ID NO: 862 - protein, 2095 aa, synthetic construct
MPAAKRVKLDGGDKKYSIGLDIGTNSVGWAVITDEYKVPSKKFKVLGNTDRHSIKKNLIGALLFDSGETAEATRLKRTARRRYTRRKNRICYLQEIFSNEMAKVDDSFFHRLEESFLVEEDKKHERHPIFGNIVDEVAYHEKYPTIYHLRKKLVDSTDKADLRLIYLALAHMIKFRGHFLIEGDLNPDNSDVDKLFIQLVQTYNQLFEENPINASGVDAKAILSARLSKSRRLENLIAQLPGEKKNGLFGNLIALSLGLTPNFKSNFDLAEDAKLQLSKDTYDDDLDNLLAQIGDQYADLFLAAKNLSDAILLSDILRVNTEITKAPLSASMIKRYDEHHQDLTLLKALVRQQLPEKYKEIFFDQSKNGYAGYIDGGASQEEFYKFIKPILEKMDGTEELLVKLNREDLLRKQRTFDNGSIPHQIHLGELHAILRRQEDFYPFLKDNREKIEKILTFRIPYYVGPLARGNSRFAWMTRKSEETITPWNFEEVVDKGASAQSFIERMTNFDKNLPNEKVLPKHSLLYEYFTVYNELTKVKYVTEGMRKPAFLSGEQKKAIVDLLFKTNRKVTVKQLKEDYFKKIECFDSVEISGVEDRFNASLGTYHDLLKIIKDKDFLDNEENEDILEDIVLTLTLFEDREMIEERLKTYAHLFDDKVMKQLKRRRYTGWGRLSRKLINGIRDKQSGKTILDFLKSDGFANRNFMQLIHDDSLTFKEDIQKAQVSGQGDSLHEHIANLAGSPAIKKGILQTVKVVDELVKVMGRHKPENIVIEMARENQTTQKGQKNSRERMKRIEEGIKELGSQILKEHPVENTQLQNEKLYLYYLQNGRDMYVDQELDINRLSDYDVDHIVPQSFLKDDSIDNKVLTRSDKARGKSDNVPSEEVVKKMKNYWRQLLNAKLITQRKFDNLTKAERGGLSELDKAGFIKRQLVETRQITKHVAQILDSRMNTKYDENDKLIREVKVITLKSKLVSDFRKDFQFYKVREINNYHHAHDAYLNAVVGTALIKKYPKLESEFVYGDYKVYDVRKMIAKSEQEIGKATAKYFFYSNIMNFFKTEITLANGEIRKRPLIETNGETGEIVWDKGRDFATVRKVLSMPQVNIVKKTEVQTGGFSKESILPKRNSDKLIARKKDWDPKKYGGFDSPTVAYSVLVVAKVEKGKSKKLKSVKELLGITIMERSSFEKNPIDFLEAKGYKEVKKDLIIKLPKYSLFELENGRKRMLASAGELQKGNELALPSKYVNFLYLASHYEKLKGSPEDNEQKQLFVEQHKHYLDEIIEQISEFSKRVILADANLDKVLSAYNKHRDKPIREQAENIIHLFTLTNLGAPAAFKYFDTTIDRKRYTSTKEVLDATLIHQSITGLYETRIDLSQLGGDGGGSAGSAAGSGEFGGVLNLEEEYRLHEKPVPSSIDPSWLQLFPTVWAERAGMGLANQVPPVVVELRSGASPVAVRQYPMSKEAREGIRPHIQRFLDLGVLVPCQSPWNTPLLPVKKPGTNDYRPVQDLREINKRVQDIHPTVPNPYNLLSSLPPSHTWYSVLDLKDAFFCLKLHPNSQPLFAFEWRDPEKGNTGQLTWTRLPQGFKNSPTLFNEALHRDLAPFRALNPQVVLLQYVDDLLVAAPTYRDCKEGTQKLLQELSKLGYRVSAKKAQLCQKEVTYLGYLLKEGKRWLTPARKATVMKIPPPTTPRQVREFLGTAGFCRLWIPGFASLAAPLYPLTKPSIPFIWTEEHQKAFDRIKEALLSAPALALPDLTKPFTLYVDERAGVARGVLTQTLGPWRRPVAYLSKKLDPVASGWPTCLKAVAAVALLLKDADKLTLGQNVTVIASHSLESIVRQPPDRWMTNARMTHYQSLLLNERVSFAPPAVLNPATLLPVESEATPVHRCSEILAEETGTRRDLKDQPLPGVPAWYTDGSSFIAEGKRRAGAAIVDGKRTVWASSLPEGTSAQKAELVALTQALRLAEGKDINIYTDSRYAFATAHIHGAIYKQRGWLTSAGKDIKNKEEILALLEAIHLPKRVAIIHCPGHQKGNDPVATGNRRADEAAKQAALSTRVLAETTKPAGKRTADGSEFEKRTADGSEFESPKKKAKVE

SEQ ID NO: 863 - protein, 2094 aa, synthetic construct
MPAAKRVKLDGGDKKYSIGLDIGTNSVGWAVITDEYKVPSKKFKVLGNTDRHSIKKNLIGALLFDSGETAEATRLKRTARRRYTRRKNRICYLQEIFSNEMAKVDDSFFHRLEESFLVEEDKKHERHPIFGNIVDEVAYHEKYPTIYHLRKKLVDSTDKADLRLIYLALAHMIKFRGHFLIEGDLNPDNSDVDKLFIQLVQTYNQLFEENPINASGVDAKAILSARLSKSRRLENLIAQLPGEKKNGLFGNLIALSLGLTPNFKSNFDLAEDAKLQLSKDTYDDDLDNLLAQIGDQYADLFLAAKNLSDAILLSDILRVNTEITKAPLSASMIKRYDEHHQDLTLLKALVRQQLPEKYKEIFFDQSKNGYAGYIDGGASQEEFYKFIKPILEKMDGTEELLVKLNREDLLRKQRTFDNGSIPHQIHLGELHAILRRQEDFYPFLKDNREKIEKILTFRIPYYVGPLARGNSRFAWMTRKSEETITPWNFEEVVDKGASAQSFIERMTNFDKNLPNEKVLPKHSLLYEYFTVYNELTKVKYVTEGMRKPAFLSGEQKKAIVDLLFKTNRKVTVKQLKEDYFKKIECFDSVEISGVEDRFNASLGTYHDLLKIIKDKDFLDNEENEDILEDIVLTLTLFEDREMIEERLKTYAHLFDDKVMKQLKRRRYTGWGRLSRKLINGIRDKQSGKTILDFLKSDGFANRNFMQLIHDDSLTFKEDIQKAQVSGQGDSLHEHIANLAGSPAIKKGILQTVKVVDELVKVMGRHKPENIVIEMARENQTTQKGQKNSRERMKRIEEGIKELGSQILKEHPVENTQLQNEKLYLYYLQNGRDMYVDQELDINRLSDYDVDHIVPQSFLKDDSIDNKVLTRSDKARGKSDNVPSEEVVKKMKNYWRQLLNAKLITQRKFDNLTKAERGGLSELDKAGFIKRQLVETRQITKHVAQILDSRMNTKYDENDKLIREVKVITLKSKLVSDFRKDFQFYKVREINNYHHAHDAYLNAVVGTALIKKYPKLESEFVYGDYKVYDVRKMIAKSEQEIGKATAKYFFYSNIMNFFKTEITLANGEIRKRPLIETNGETGEIVWDKGRDFATVRKVLSMPQVNIVKKTEVQTGGFSKESILPKRNSDKLIARKKDWDPKKYGGFDSPTVAYSVLVVAKVEKGKSKKLKSVKELLGITIMERSSFEKNPIDFLEAKGYKEVKKDLIIKLPKYSLFELENGRKRMLASAGELQKGNELALPSKYVNFLYLASHYEKLKGSPEDNEQKQLFVEQHKHYLDEIIEQISEFSKRVILADANLDKVLSAYNKHRDKPIREQAENIIHLFTLTNLGAPAAFKYFDTTIDRKRYTSTKEVLDATLIHQSITGLYETRIDLSQLGGDGGPAPEAAAKGGSGGVLNLEEEYRLHEKPVPSSIDPSWLQLFPTVWAERAGMGLANQVPPVVVELRSGASPVAVRQYPMSKEAREGIRPHIQRFLDLGVLVPCQSPWNTPLLPVKKPGTNDYRPVQDLREINKRVQDIHPTVPNPYNLLSSLPPSHTWYSVLDLKDAFFCLKLHPNSQPLFAFEWRDPEKGNTGQLTWTRLPQGFKNSPTLFNEALHRDLAPFRALNPQVVLLQYVDDLLVAAPTYRDCKEGTQKLLQELSKLGYRVSAKKAQLCQKEVTYLGYLLKEGKRWLTPARKATVMKIPPPTTPRQVREFLGTAGFCRLWIPGFASLAAPLYPLTKPSIPFIWTEEHQKAFDRIKEALLSAPALALPDLTKPFTLYVDERAGVARGVLTQTLGPWRRPVAYLSKKLDPVASGWPTCLKAVAAVALLLKDADKLTLGQNVTVIASHSLESIVRQPPDRWMTNARMTHYQSLLLNERVSFAPPAVLNPATLLPVESEATPVHRCSEILAEETGTRRDLKDQPLPGVPAWYTDGSSFIAEGKRRAGAAIVDGKRTVWASSLPEGTSAQKAELVALTQALRLAEGKDINIYTDSRYAFATAHIHGAIYKQRGWLTSAGKDIKNKEEILALLEAIHLPKRVAIIHCPGHQKGNDPVATGNRRADEAAKQAALSTRVLAETTKPAGKRTADGSEFEKRTADGSEFESPKKKAKVE

SEQ ID NO: 864 - protein, 2092 aa, synthetic construct
MPAAKRVKLDGGDKKYSIGLDIGTNSVGWAVITDEYKVPSKKFKVLGNTDRHSIKKNLIGALLFDSGETAEATRLKRTARRRYTRRKNRICYLQEIFSNEMAKVDDSFFHRLEESFLVEEDKKHERHPIFGNIVDEVAYHEKYPTIYHLRKKLVDSTDKADLRLIYLALAHMIKFRGHFLIEGDLNPDNSDVDKLFIQLVQTYNQLFEENPINASGVDAKAILSARLSKSRRLENLIAQLPGEKKNGLFGNLIALSLGLTPNFKSNFDLAEDAKLQLSKDTYDDDLDNLLAQIGDQYADLFLAAKNLSDAILLSDILRVNTEITKAPLSASMIKRYDEHHQDLTLLKALVRQQLPEKYKEIFFDQSKNGYAGYIDGGASQEEFYKFIKPILEKMDGTEELLVKLNREDLLRKQRTFDNGSIPHQIHLGELHAILRRQEDFYPFLKDNREKIEKILTFRIPYYVGPLARGNSRFAWMTRKSEETITPWNFEEVVDKGASAQSFIERMTNFDKNLPNEKVLPKHSLLYEYFTVYNELTKVKYVTEGMRKPAFLSGEQKKAIVDLLFKTNRKVTVKQLKEDYFKKIECFDSVEISGVEDRFNASLGTYHDLLKIIKDKDFLDNEENEDILEDIVLTLTLFEDREMIEERLKTYAHLFDDKVMKQLKRRRYTGWGRLSRKLINGIRDKQSGKTILDFLKSDGFANRNFMQLIHDDSLTFKEDIQKAQVSGQGDSLHEHIANLAGSPAIKKGILQTVKVVDELVKVMGRHKPENIVIEMARENQTTQKGQKNSRERMKRIEEGIKELGSQILKEHPVENTQLQNEKLYLYYLQNGRDMYVDQELDINRLSDYDVDHIVPQSFLKDDSIDNKVLTRSDKARGKSDNVPSEEVVKKMKNYWRQLLNAKLITQRKFDNLTKAERGGLSELDKAGFIKRQLVETRQITKHVAQILDSRMNTKYDENDKLIREVKVITLKSKLVSDFRKDFQFYKVREINNYHHAHDAYLNAVVGTALIKKYPKLESEFVYGDYKVYDVRKMIAKSEQEIGKATAKYFFYSNIMNFFKTEITLANGEIRKRPLIETNGETGEIVWDKGRDFATVRKVLSMPQVNIVKKTEVQTGGFSKESILPKRNSDKLIARKKDWDPKKYGGFDSPTVAYSVLVVAKVEKGKSKKLKSVKELLGITIMERSSFEKNPIDFLEAKGYKEVKKDLIIKLPKYSLFELENGRKRMLASAGELQKGNELALPSKYVNFLYLASHYEKLKGSPEDNEQKQLFVEQHKHYLDEIIEQISEFSKRVILADANLDKVLSAYNKHRDKPIREQAENIIHLFTLTNLGAPAAFKYFDTTIDRKRYTSTKEVLDATLIHQSITGLYETRIDLSQLGGDGGPAPGSSGGGGGVLNLEEEYRLHEKPVPSSIDPSWLQLFPTVWAERAGMGLANQVPPVVVELRSGASPVAVRQYPMSKEAREGIRPHIQRFLDLGVLVPCQSPWNTPLLPVKKPGTNDYRPVQDLREINKRVQDIHPTVPNPYNLLSSLPPSHTWYSVLDLKDAFFCLKLHPNSQPLFAFEWRDPEKGNTGQLTWTRLPQGFKNSPTLFNEALHRDLAPFRALNPQVVLLQYVDDLLVAAPTYRDCKEGTQKLLQELSKLGYRVSAKKAQLCQKEVTYLGYLLKEGKRWLTPARKATVMKIPPPTTPRQVREFLGTAGFCRLWIPGFASLAAPLYPLTKPSIPFIWTEEHQKAFDRIKEALLSAPALALPDLTKPFTLYVDERAGVARGVLTQTLGPWRRPVAYLSKKLDPVASGWPTCLKAVAAVALLLKDADKLTLGQNVTVIASHSLESIVRQPPDRWMTNARMTHYQSLLLNERVSFAPPAVLNPATLLPVESEATPVHRCSEILAEETGTRRDLKDQPLPGVPAWYTDGSSFIAEGKRRAGAAIVDGKRTVWASSLPEGTSAQKAELVALTQALRLAEGKDINIYTDSRYAFATAHIHGAIYKQRGWLTSAGKDIKNKEEILALLEAIHLPKRVAIIHCPGHQKGNDPVATGNRRADEAAKQAALSTRVLAETTKPAGKRTADGSEFEKRTADGSEFESPKKKAKVE

SEQ ID NO: 865 - protein, 2092 aa, synthetic construct
MPAAKRVKLDGGDKKYSIGLDIGTNSVGWAVITDEYKVPSKKFKVLGNTDRHSIKKNLIGALLFDSGETAEATRLKRTARRRYTRRKNRICYLQEIFSNEMAKVDDSFFHRLEESFLVEEDKKHERHPIFGNIVDEVAYHEKYPTIYHLRKKLVDSTDKADLRLIYLALAHMIKFRGHFLIEGDLNPDNSDVDKLFIQLVQTYNQLFEENPINASGVDAKAILSARLSKSRRLENLIAQLPGEKKNGLFGNLIALSLGLTPNFKSNFDLAEDAKLQLSKDTYDDDLDNLLAQIGDQYADLFLAAKNLSDAILLSDILRVNTEITKAPLSASMIKRYDEHHQDLTLLKALVRQQLPEKYKEIFFDQSKNGYAGYIDGGASQEEFYKFIKPILEKMDGTEELLVKLNREDLLRKQRTFDNGSIPHQIHLGELHAILRRQEDFYPFLKDNREKIEKILTFRIPYYVGPLARGNSRFAWMTRKSEETITPWNFEEVVDKGASAQSFIERMTNFDKNLPNEKVLPKHSLLYEYFTVYNELTKVKYVTEGMRKPAFLSGEQKKAIVDLLFKTNRKVTVKQLKEDYFKKIECFDSVEISGVEDRFNASLGTYHDLLKIIKDKDFLDNEENEDILEDIVLTLTLFEDREMIEERLKTYAHLFDDKVMKQLKRRRYTGWGRLSRKLINGIRDKQSGKTILDFLKSDGFANRNFMQLIHDDSLTFKEDIQKAQVSGQGDSLHEHIANLAGSPAIKKGILQTVKVVDELVKVMGRHKPENIVIEMARENQTTQKGQKNSRERMKRIEEGIKELGSQILKEHPVENTQLQNEKLYLYYLQNGRDMYVDQELDINRLSDYDVDHIVPQSFLKDDSIDNKVLTRSDKARGKSDNVPSEEVVKKMKNYWRQLLNAKLITQRKFDNLTKAERGGLSELDKAGFIKRQLVETRQITKHVAQILDSRMNTKYDENDKLIREVKVITLKSKLVSDFRKDFQFYKVREINNYHHAHDAYLNAVVGTALIKKYPKLESEFVYGDYKVYDVRKMIAKSEQEIGKATAKYFFYSNIMNFFKTEITLANGEIRKRPLIETNGETGEIVWDKGRDFATVRKVLSMPQVNIVKKTEVQTGGFSKESILPKRNSDKLIARKKDWDPKKYGGFDSPTVAYSVLVVAKVEKGKSKKLKSVKELLGITIMERSSFEKNPIDFLEAKGYKEVKKDLIIKLPKYSLFELENGRKRMLASAGELQKGNELALPSKYVNFLYLASHYEKLKGSPEDNEQKQLFVEQHKHYLDEIIEQISEFSKRVILADANLDKVLSAYNKHRDKPIREQAENIIHLFTLTNLGAPAAFKYFDTTIDRKRYTSTKEVLDATLIHQSITGLYETRIDLSQLGGDGGGGSGSSGGGGGVLNLEEEYRLHEKPVPSSIDPSWLQLFPTVWAERAGMGLANQVPPVVVELRSGASPVAVRQYPMSKEAREGIRPHIQRFLDLGVLVPCQSPWNTPLLPVKKPGTNDYRPVQDLREINKRVQDIHPTVPNPYNLLSSLPPSHTWYSVLDLKDAFFCLKLHPNSQPLFAFEWRDPEKGNTGQLTWTRLPQGFKNSPTLFNEALHRDLAPFRALNPQVVLLQYVDDLLVAAPTYRDCKEGTQKLLQELSKLGYRVSAKKAQLCQKEVTYLGYLLKEGKRWLTPARKATVMKIPPPTTPRQVREFLGTAGFCRLWIPGFASLAAPLYPLTKPSIPFIWTEEHQKAFDRIKEALLSAPALALPDLTKPFTLYVDERAGVARGVLTQTLGPWRRPVAYLSKKLDPVASGWPTCLKAVAAVALLLKDADKLTLGQNVTVIASHSLESIVRQPPDRWMTNARMTHYQSLLLNERVSFAPPAVLNPATLLPVESEATPVHRCSEILAEETGTRRDLKDQPLPGVPAWYTDGSSFIAEGKRRAGAAIVDGKRTVWASSLPEGTSAQKAELVALTQALRLAEGKDINIYTDSRYAFATAHIHGAIYKQRGWLTSAGKDIKNKEEILALLEAIHLPKRVAIIHCPGHQKGNDPVATGNRRADEAAKQAALSTRVLAETTKPAGKRTADGSEFEKRTADGSEFESPKKKAKVE

SEQ ID NO: 866 - protein, 2094 aa, synthetic construct
MPAAKRVKLDGGDKKYSIGLDIGTNSVGWAVITDEYKVPSKKFKVLGNTDRHSIKKNLIGALLFDSGETAEATRLKRTARRRYTRRKNRICYLQEIFSNEMAKVDDSFFHRLEESFLVEEDKKHERHPIFGNIVDEVAYHEKYPTIYHLRKKLVDSTDKADLRLIYLALAHMIKFRGHFLIEGDLNPDNSDVDKLFIQLVQTYNQLFEENPINASGVDAKAILSARLSKSRRLENLIAQLPGEKKNGLFGNLIALSLGLTPNFKSNFDLAEDAKLQLSKDTYDDDLDNLLAQIGDQYADLFLAAKNLSDAILLSDILRVNTEITKAPLSASMIKRYDEHHQDLTLLKALVRQQLPEKYKEIFFDQSKNGYAGYIDGGASQEEFYKFIKPILEKMDGTEELLVKLNREDLLRKQRTFDNGSIPHQIHLGELHAILRRQEDFYPFLKDNREKIEKILTFRIPYYVGPLARGNSRFAWMTRKSEETITPWNFEEVVDKGASAQSFIERMTNFDKNLPNEKVLPKHSLLYEYFTVYNELTKVKYVTEGMRKPAFLSGEQKKAIVDLLFKTNRKVTVKQLKEDYFKKIECFDSVEISGVEDRFNASLGTYHDLLKIIKDKDFLDNEENEDILEDIVLTLTLFEDREMIEERLKTYAHLFDDKVMKQLKRRRYTGWGRLSRKLINGIRDKQSGKTILDFLKSDGFANRNFMQLIHDDSLTFKEDIQKAQVSGQGDSLHEHIANLAGSPAIKKGILQTVKVVDELVKVMGRHKPENIVIEMARENQTTQKGQKNSRERMKRIEEGIKELGSQILKEHPVENTQLQNEKLYLYYLQNGRDMYVDQELDINRLSDYDVDHIVPQSFLKDDSIDNKVLTRSDKARGKSDNVPSEEVVKKMKNYWRQLLNAKLITQRKFDNLTKAERGGLSELDKAGFIKRQLVETRQITKHVAQILDSRMNTKYDENDKLIREVKVITLKSKLVSDFRKDFQFYKVREINNYHHAHDAYLNAVVGTALIKKYPKLESEFVYGDYKVYDVRKMIAKSEQEIGKATAKYFFYSNIMNFFKTEITLANGEIRKRPLIETNGETGEIVWDKGRDFATVRKVLSMPQVNIVKKTEVQTGGFSKESILPKRNSDKLIARKKDWDPKKYGGFDSPTVAYSVLVVAKVEKGKSKKLKSVKELLGITIMERSSFEKNPIDFLEAKGYKEVKKDLIIKLPKYSLFELENGRKRMLASAGELQKGNELALPSKYVNFLYLASHYEKLKGSPEDNEQKQLFVEQHKHYLDEIIEQISEFSKRVILADANLDKVLSAYNKHRDKPIREQAENIIHLFTLTNLGAPAAFKYFDTTIDRKRYTSTKEVLDATLIHQSITGLYETRIDLSQLGGDGGPAPEAAAKGGGGGVLNLEEEYRLHEKPVPSSIDPSWLQLFPTVWAERAGMGLANQVPPVVVELRSGASPVAVRQYPMSKEAREGIRPHIQRFLDLGVLVPCQSPWNTPLLPVKKPGTNDYRPVQDLREINKRVQDIHPTVPNPYNLLSSLPPSHTWYSVLDLKDAFFCLKLHPNSQPLFAFEWRDPEKGNTGQLTWTRLPQGFKNSPTLFNEALHRDLAPFRALNPQVVLLQYVDDLLVAAPTYRDCKEGTQKLLQELSKLGYRVSAKKAQLCQKEVTYLGYLLKEGKRWLTPARKATVMKIPPPTTPRQVREFLGTAGFCRLWIPGFASLAAPLYPLTKPSIPFIWTEEHQKAFDRIKEALLSAPALALPDLTKPFTLYVDERAGVARGVLTQTLGPWRRPVAYLSKKLDPVASGWPTCLKAVAAVALLLKDADKLTLGQNVTVIASHSLESIVRQPPDRWMTNARMTHYQSLLLNERVSFAPPAVLNPATLLPVESEATPVHRCSEILAEETGTRRDLKDQPLPGVPAWYTDGSSFIAEGKRRAGAAIVDGKRTVWASSLPEGTSAQKAELVALTQALRLAEGKDINIYTDSRYAFATAHIHGAIYKQRGWLTSAGKDIKNKEEILALLEAIHLPKRVAIIHCPGHQKGNDPVATGNRRADEAAKQAALSTRVLAETTKPAGKRTADGSEFEKRTADGSEFESPKKKAKVE

SEQ ID NO: 867 - protein, 2089 aa, synthetic construct
MPAAKRVKLDGGDKKYSIGLDIGTNSVGWAVITDEYKVPSKKFKVLGNTDRHSIKKNLIGALLFDSGETAEATRLKRTARRRYTRRKNRICYLQEIFSNEMAKVDDSFFHRLEESFLVEEDKKHERHPIFGNIVDEVAYHEKYPTIYHLRKKLVDSTDKADLRLIYLALAHMIKFRGHFLIEGDLNPDNSDVDKLFIQLVQTYNQLFEENPINASGVDAKAILSARLSKSRRLENLIAQLPGEKKNGLFGNLIALSLGLTPNFKSNFDLAEDAKLQLSKDTYDDDLDNLLAQIGDQYADLFLAAKNLSDAILLSDILRVNTEITKAPLSASMIKRYDEHHQDLTLLKALVRQQLPEKYKEIFFDQSKNGYAGYIDGGASQEEFYKFIKPILEKMDGTEELLVKLNREDLLRKQRTFDNGSIPHQIHLGELHAILRRQEDFYPFLKDNREKIEKILTFRIPYYVGPLARGNSRFAWMTRKSEETITPWNFEEVVDKGASAQSFIERMTNFDKNLPNEKVLPKHSLLYEYFTVYNELTKVKYVTEGMRKPAFLSGEQKKAIVDLLFKTNRKVTVKQLKEDYFKKIECFDSVEISGVEDRFNASLGTYHDLLKIIKDKDFLDNEENEDILEDIVLTLTLFEDREMIEERLKTYAHLFDDKVMKQLKRRRYTGWGRLSRKLINGIRDKQSGKTILDFLKSDGFANRNFMQLIHDDSLTFKEDIQKAQVSGQGDSLHEHIANLAGSPAIKKGILQTVKVVDELVKVMGRHKPENIVIEMARENQTTQKGQKNSRERMKRIEEGIKELGSQILKEHPVENTQLQNEKLYLYYLQNGRDMYVDQELDINRLSDYDVDHIVPQSFLKDDSIDNKVLTRSDKARGKSDNVPSEEVVKKMKNYWRQLLNAKLITQRKFDNLTKAERGGLSELDKAGFIKRQLVETRQITKHVAQILDSRMNTKYDENDKLIREVKVITLKSKLVSDFRKDFQFYKVREINNYHHAHDAYLNAVVGTALIKKYPKLESEFVYGDYKVYDVRKMIAKSEQEIGKATAKYFFYSNIMNFFKTEITLANGEIRKRPLIETNGETGEIVWDKGRDFATVRKVLSMPQVNIVKKTEVQTGGFSKESILPKRNSDKLIARKKDWDPKKYGGFDSPTVAYSVLVVAKVEKGKSKKLKSVKELLGITIMERSSFEKNPIDFLEAKGYKEVKKDLIIKLPKYSLFELENGRKRMLASAGELQKGNELALPSKYVNFLYLASHYEKLKGSPEDNEQKQLFVEQHKHYLDEIIEQISEFSKRVILADANLDKVLSAYNKHRDKPIREQAENIIHLFTLTNLGAPAAFKYFDTTIDRKRYTSTKEVLDATLIHQSITGLYETRIDLSQLGGDGGGSSPAPGGVLNLEEEYRLHEKPVPSSIDPSWLQLFPTVWAERAGMGLANQVPPVVVELRSGASPVAVRQYPMSKEAREGIRPHIQRFLDLGVLVPCQSPWNTPLLPVKKPGTNDYRPVQDLREINKRVQDIHPTVPNPYNLLSSLPPSHTWYSVLDLKDAFFCLKLHPNSQPLFAFEWRDPEKGNTGQLTWTRLPQGFKNSPTLFNEALHRDLAPFRALNPQVVLLQYVDDLLVAAPTYRDCKEGTQKLLQELSKLGYRVSAKKAQLCQKEVTYLGYLLKEGKRWLTPARKATVMKIPPPTTPRQVREFLGTAGFCRLWIPGFASLAAPLYPLTKPSIPFIWTEEHQKAFDRIKEALLSAPALALPDLTKPFTLYVDERAGVARGVLTQTLGPWRRPVAYLSKKLDPVASGWPTCLKAVAAVALLLKDADKLTLGQNVTVIASHSLESIVRQPPDRWMTNARMTHYQSLLLNERVSFAPPAVLNPATLLPVESEATPVHRCSEILAEETGTRRDLKDQPLPGVPAWYTDGSSFIAEGKRRAGAAIVDGKRTVWASSLPEGTSAQKAELVALTQALRLAEGKDINIYTDSRYAFATAHIHGAIYKQRGWLTSAGKDIKNKEEILALLEAIHLPKRVAIIHCPGHQKGNDPVATGNRRADEAAKQAALSTRVLAETTKPAGKRTADGSEFEKRTADGSEFESPKKKAKVE

SEQ ID NO: 868 - protein, 2092 aa, synthetic construct
MPAAKRVKLDGGDKKYSIGLDIGTNSVGWAVITDEYKVPSKKFKVLGNTDRHSIKKNLIGALLFDSGETAEATRLKRTARRRYTRRKNRICYLQEIFSNEMAKVDDSFFHRLEESFLVEEDKKHERHPIFGNIVDEVAYHEKYPTIYHLRKKLVDSTDKADLRLIYLALAHMIKFRGHFLIEGDLNPDNSDVDKLFIQLVQTYNQLFEENPINASGVDAKAILSARLSKSRRLENLIAQLPGEKKNGLFGNLIALSLGLTPNFKSNFDLAEDAKLQLSKDTYDDDLDNLLAQIGDQYADLFLAAKNLSDAILLSDILRVNTEITKAPLSASMIKRYDEHHQDLTLLKALVRQQLPEKYKEIFFDQSKNGYAGYIDGGASQEEFYKFIKPILEKMDGTEELLVKLNREDLLRKQRTFDNGSIPHQIHLGELHAILRRQEDFYPFLKDNREKIEKILTFRIPYYVGPLARGNSRFAWMTRKSEETITPWNFEEVVDKGASAQSFIERMTNFDKNLPNEKVLPKHSLLYEYFTVYNELTKVKYVTEGMRKPAFLSGEQKKAIVDLLFKTNRKVTVKQLKEDYFKKIECFDSVEISGVEDRFNASLGTYHDLLKIIKDKDFLDNEENEDILEDIVLTLTLFEDREMIEERLKTYAHLFDDKVMKQLKRRRYTGWGRLSRKLINGIRDKQSGKTILDFLKSDGFANRNFMQLIHDDSLTFKEDIQKAQVSGQGDSLHEHIANLAGSPAIKKGILQTVKVVDELVKVMGRHKPENIVIEMARENQTTQKGQKNSRERMKRIEEGIKELGSQILKEHPVENTQLQNEKLYLYYLQNGRDMYVDQELDINRLSDYDVDHIVPQSFLKDDSIDNKVLTRSDKARGKSDNVPSEEVVKKMKNYWRQLLNAKLITQRKFDNLTKAERGGLSELDKAGFIKRQLVETRQITKHVAQILDSRMNTKYDENDKLIREVKVITLKSKLVSDFRKDFQFYKVREINNYHHAHDAYLNAVVGTALIKKYPKLESEFVYGDYKVYDVRKMIAKSEQEIGKATAKYFFYSNIMNFFKTEITLANGEIRKRPLIETNGETGEIVWDKGRDFATVRKVLSMPQVNIVKKTEVQTGGFSKESILPKRNSDKLIARKKDWDPKKYGGFDSPTVAYSVLVVAKVEKGKSKKLKSVKELLGITIMERSSFEKNPIDFLEAKGYKEVKKDLIIKLPKYSLFELENGRKRMLASAGELQKGNELALPSKYVNFLYLASHYEKLKGSPEDNEQKQLFVEQHKHYLDEIIEQISEFSKRVILADANLDKVLSAYNKHRDKPIREQAENIIHLFTLTNLGAPAAFKYFDTTIDRKRYTSTKEVLDATLIHQSITGLYETRIDLSQLGGDGGGSSGGGPAPGGVLNLEEEYRLHEKPVPSSIDPSWLQLFPTVWAERAGMGLANQVPPVVVELRSGASPVAVRQYPMSKEAREGIRPHIQRFLDLGVLVPCQSPWNTPLLPVKKPGTNDYRPVQDLREINKRVQDIHPTVPNPYNLLSSLPPSHTWYSVLDLKDAFFCLKLHPNSQPLFAFEWRDPEKGNTGQLTWTRLPQGFKNSPTLFNEALHRDLAPFRALNPQVVLLQYVDDLLVAAPTYRDCKEGTQKLLQELSKLGYRVSAKKAQLCQKEVTYLGYLLKEGKRWLTPARKATVMKIPPPTTPRQVREFLGTAGFCRLWIPGFASLAAPLYPLTKPSIPFIWTEEHQKAFDRIKEALLSAPALALPDLTKPFTLYVDERAGVARGVLTQTLGPWRRPVAYLSKKLDPVASGWPTCLKAVAAVALLLKDADKLTLGQNVTVIASHSLESIVRQPPDRWMTNARMTHYQSLLLNERVSFAPPAVLNPATLLPVESEATPVHRCSEILAEETGTRRDLKDQPLPGVPAWYTDGSSFIAEGKRRAGAAIVDGKRTVWASSLPEGTSAQKAELVALTQALRLAEGKDINIYTDSRYAFATAHIHGAIYKQRGWLTSAGKDIKNKEEILALLEAIHLPKRVAIIHCPGHQKGNDPVATGNRRADEAAKQAALSTRVLAETTKPAGKRTADGSEFEKRTADGSEFESPKKKAKVE

SEQ ID NO: 869 - protein, 2089 aa, synthetic construct
MPAAKRVKLDGGDKKYSIGLDIGTNSVGWAVITDEYKVPSKKFKVLGNTDRHSIKKNLIGALLFDSGETAEATRLKRTARRRYTRRKNRICYLQEIFSNEMAKVDDSFFHRLEESFLVEEDKKHERHPIFGNIVDEVAYHEKYPTIYHLRKKLVDSTDKADLRLIYLALAHMIKFRGHFLIEGDLNPDNSDVDKLFIQLVQTYNQLFEENPINASGVDAKAILSARLSKSRRLENLIAQLPGEKKNGLFGNLIALSLGLTPNFKSNFDLAEDAKLQLSKDTYDDDLDNLLAQIGDQYADLFLAAKNLSDAILLSDILRVNTEITKAPLSASMIKRYDEHHQDLTLLKALVRQQLPEKYKEIFFDQSKNGYAGYIDGGASQEEFYKFIKPILEKMDGTEELLVKLNREDLLRKQRTFDNGSIPHQIHLGELHAILRRQEDFYPFLKDNREKIEKILTFRIPYYVGPLARGNSRFAWMTRKSEETITPWNFEEVVDKGASAQSFIERMTNFDKNLPNEKVLPKHSLLYEYFTVYNELTKVKYVTEGMRKPAFLSGEQKKAIVDLLFKTNRKVTVKQLKEDYFKKIECFDSVEISGVEDRFNASLGTYHDLLKIIKDKDFLDNEENEDILEDIVLTLTLFEDREMIEERLKTYAHLFDDKVMKQLKRRRYTGWGRLSRKLINGIRDKQSGKTILDFLKSDGFANRNFMQLIHDDSLTFKEDIQKAQVSGQGDSLHEHIANLAGSPAIKKGILQTVKVVDELVKVMGRHKPENIVIEMARENQTTQKGQKNSRERMKRIEEGIKELGSQILKEHPVENTQLQNEKLYLYYLQNGRDMYVDQELDINRLSDYDVDHIVPQSFLKDDSIDNKVLTRSDKARGKSDNVPSEEVVKKMKNYWRQLLNAKLITQRKFDNLTKAERGGLSELDKAGFIKRQLVETRQITKHVAQILDSRMNTKYDENDKLIREVKVITLKSKLVSDFRKDFQFYKVREINNYHHAHDAYLNAVVGTALIKKYPKLESEFVYGDYKVYDVRKMIAKSEQEIGKATAKYFFYSNIMNFFKTEITLANGEIRKRPLIETNGETGEIVWDKGRDFATVRKVLSMPQVNIVKKTEVQTGGFSKESILPKRNSDKLIARKKDWDPKKYGGFDSPTVAYSVLVVAKVEKGKSKKLKSVKELLGITIMERSSFEKNPIDFLEAKGYKEVKKDLIIKLPKYSLFELENGRKRMLASAGELQKGNELALPSKYVNFLYLASHYEKLKGSPEDNEQKQLFVEQHKHYLDEIIEQISEFSKRVILADANLDKVLSAYNKHRDKPIREQAENIIHLFTLTNLGAPAAFKYFDTTIDRKRYTSTKEVLDATLIHQSITGLYETRIDLSQLGGDGGGGSGGSGGVLNLEEEYRLHEKPVPSSIDPSWLQLFPTVWAERAGMGLANQVPPVVVELRSGASPVAVRQYPMSKEAREGIRPHIQRFLDLGVLVPCQSPWNTPLLPVKKPGTNDYRPVQDLREINKRVQDIHPTVPNPYNLLSSLPPSHTWYSVLDLKDAFFCLKLHPNSQPLFAFEWRDPEKGNTGQLTWTRLPQGFKNSPTLFNEALHRDLAPFRALNPQVVLLQYVDDLLVAAPTYRDCKEGTQKLLQELSKLGYRVSAKKAQLCQKEVTYLGYLLKEGKRWLTPARKATVMKIPPPTTPRQVREFLGTAGFCRLWIPGFASLAAPLYPLTKPSIPFIWTEEHQKAFDRIKEALLSAPALALPDLTKPFTLYVDERAGVARGVLTQTLGPWRRPVAYLSKKLDPVASGWPTCLKAVAAVALLLKDADKLTLGQNVTVIASHSLESIVRQPPDRWMTNARMTHYQSLLLNERVSFAPPAVLNPATLLPVESEATPVHRCSEILAEETGTRRDLKDQPLPGVPAWYTDGSSFIAEGKRRAGAAIVDGKRTVWASSLPEGTSAQKAELVALTQALRLAEGKDINIYTDSRYAFATAHIHGAIYKQRGWLTSAGKDIKNKEEILALLEAIHLPKRVAIIHCPGHQKGNDPVATGNRRADEAAKQAALSTRVLAETTKPAGKRTADGSEFEKRTADGSEFESPKKKAKVE

SEQ ID NO: 870 - protein, 2094 aa, synthetic construct
MPAAKRVKLDGGDKKYSIGLDIGTNSVGWAVITDEYKVPSKKFKVLGNTDRHSIKKNLIGALLFDSGETAEATRLKRTARRRYTRRKNRICYLQEIFSNEMAKVDDSFFHRLEESFLVEEDKKHERHPIFGNIVDEVAYHEKYPTIYHLRKKLVDSTDKADLRLIYLALAHMIKFRGHFLIEGDLNPDNSDVDKLFIQLVQTYNQLFEENPINASGVDAKAILSARLSKSRRLENLIAQLPGEKKNGLFGNLIALSLGLTPNFKSNFDLAEDAKLQLSKDTYDDDLDNLLAQIGDQYADLFLAAKNLSDAILLSDILRVNTEITKAPLSASMIKRYDEHHQDLTLLKALVRQQLPEKYKEIFFDQSKNGYAGYIDGGASQEEFYKFIKPILEKMDGTEELLVKLNREDLLRKQRTFDNGSIPHQIHLGELHAILRRQEDFYPFLKDNREKIEKILTFRIPYYVGPLARGNSRFAWMTRKSEETITPWNFEEVVDKGASAQSFIERMTNFDKNLPNEKVLPKHSLLYEYFTVYNELTKVKYVTEGMRKPAFLSGEQKKAIVDLLFKTNRKVTVKQLKEDYFKKIECFDSVEISGVEDRFNASLGTYHDLLKIIKDKDFLDNEENEDILEDIVLTLTLFEDREMIEERLKTYAHLFDDKVMKQLKRRRYTGWGRLSRKLINGIRDKQSGKTILDFLKSDGFANRNFMQLIHDDSLTFKEDIQKAQVSGQGDSLHEHIANLAGSPAIKKGILQTVKVVDELVKVMGRHKPENIVIEMARENQTTQKGQKNSRERMKRIEEGIKELGSQILKEHPVENTQLQNEKLYLYYLQNGRDMYVDQELDINRLSDYDVDHIVPQSFLKDDSIDNKVLTRSDKARGKSDNVPSEEVVKKMKNYWRQLLNAKLITQRKFDNLTKAERGGLSELDKAGFIKRQLVETRQITKHVAQILDSRMNTKYDENDKLIREVKVITLKSKLVSDFRKDFQFYKVREINNYHHAHDAYLNAVVGTALIKKYPKLESEFVYGDYKVYDVRKMIAKSEQEIGKATAKYFFYSNIMNFFKTEITLANGEIRKRPLIETNGETGEIVWDKGRDFATVRKVLSMPQVNIVKKTEVQTGGFSKESILPKRNSDKLIARKKDWDPKKYGGFDSPTVAYSVLVVAKVEKGKSKKLKSVKELLGITIMERSSFEKNPIDFLEAKGYKEVKKDLIIKLPKYSLFELENGRKRMLASAGELQKGNELALPSKYVNFLYLASHYEKLKGSPEDNEQKQLFVEQHKHYLDEIIEQISEFSKRVILADANLDKVLSAYNKHRDKPIREQAENIIHLFTLTNLGAPAAFKYFDTTIDRKRYTSTKEVLDATLIHQSITGLYETRIDLSQLGGDGGGGGPAPEAAAKGGVLNLEEEYRLHEKPVPSSIDPSWLQLFPTVWAERAGMGLANQVPPVVVELRSGASPVAVRQYPMSKEAREGIRPHIQRFLDLGVLVPCQSPWNTPLLPVKKPGTNDYRPVQDLREINKRVQDIHPTVPNPYNLLSSLPPSHTWYSVLDLKDAFFCLKLHPNSQPLFAFEWRDPEKGNTGQLTWTRLPQGFKNSPTLFNEALHRDLAPFRALNPQVVLLQYVDDLLVAAPTYRDCKEGTQKLLQELSKLGYRVSAKKAQLCQKEVTYLGYLLKEGKRWLTPARKATVMKIPPPTTPRQVREFLGTAGFCRLWIPGFASLAAPLYPLTKPSIPFIWTEEHQKAFDRIKEALLSAPALALPDLTKPFTLYVDERAGVARGVLTQTLGPWRRPVAYLSKKLDPVASGWPTCLKAVAAVALLLKDADKLTLGQNVTVIASHSLESIVRQPPDRWMTNARMTHYQSLLLNERVSFAPPAVLNPATLLPVESEATPVHRCSEILAEETGTRRDLKDQPLPGVPAWYTDGSSFIAEGKRRAGAAIVDGKRTVWASSLPEGTSAQKAELVALTQALRLAEGKDINIYTDSRYAFATAHIHGAIYKQRGWLTSAGKDIKNKEEILALLEAIHLPKRVAIIHCPGHQKGNDPVATGNRRADEAAKQAALSTRVLAETTKPAGKRTADGSEFEKRTADGSEFESPKKKAKVE

SEQ ID NO: 871 - protein, 2129 aa, synthetic construct
MPAAKRVKLDGGDKKYSIGLDIGTNSVGWAVITDEYKVPSKKFKVLGNTDRHSIKKNLIGALLFDSGETAEATRLKRTARRRYTRRKNRICYLQEIFSNEMAKVDDSFFHRLEESFLVEEDKKHERHPIFGNIVDEVAYHEKYPTIYHLRKKLVDSTDKADLRLIYLALAHMIKFRGHFLIEGDLNPDNSDVDKLFIQLVQTYNQLFEENPINASGVDAKAILSARLSKSRRLENLIAQLPGEKKNGLFGNLIALSLGLTPNFKSNFDLAEDAKLQLSKDTYDDDLDNLLAQIGDQYADLFLAAKNLSDAILLSDILRVNTEITKAPLSASMIKRYDEHHQDLTLLKALVRQQLPEKYKEIFFDQSKNGYAGYIDGGASQEEFYKFIKPILEKMDGTEELLVKLNREDLLRKQRTFDNGSIPHQIHLGELHAILRRQEDFYPFLKDNREKIEKILTFRIPYYVGPLARGNSRFAWMTRKSEETITPWNFEEVVDKGASAQSFIERMTNFDKNLPNEKVLPKHSLLYEYFTVYNELTKVKYVTEGMRKPAFLSGEQKKAIVDLLFKTNRKVTVKQLKEDYFKKIECFDSVEISGVEDRFNASLGTYHDLLKIIKDKDFLDNEENEDILEDIVLTLTLFEDREMIEERLKTYAHLFDDKVMKQLKRRRYTGWGRLSRKLINGIRDKQSGKTILDFLKSDGFANRNFMQLIHDDSLTFKEDIQKAQVSGQGDSLHEHIANLAGSPAIKKGILQTVKVVDELVKVMGRHKPENIVIEMARENQTTQKGQKNSRERMKRIEEGIKELGSQILKEHPVENTQLQNEKLYLYYLQNGRDMYVDQELDINRLSDYDVDHIVPQSFLKDDSIDNKVLTRSDKARGKSDNVPSEEVVKKMKNYWRQLLNAKLITQRKFDNLTKAERGGLSELDKAGFIKRQLVETRQITKHVAQILDSRMNTKYDENDKLIREVKVITLKSKLVSDFRKDFQFYKVREINNYHHAHDAYLNAVVGTALIKKYPKLESEFVYGDYKVYDVRKMIAKSEQEIGKATAKYFFYSNIMNFFKTEITLANGEIRKRPLIETNGETGEIVWDKGRDFATVRKVLSMPQVNIVKKTEVQTGGFSKESILPKRNSDKLIARKKDWDPKKYGGFDSPTVAYSVLVVAKVEKGKSKKLKSVKELLGITIMERSSFEKNPIDFLEAKGYKEVKKDLIIKLPKYSLFELENGRKRMLASAGELQKGNELALPSKYVNFLYLASHYEKLKGSPEDNEQKQLFVEQHKHYLDEIIEQISEFSKRVILADANLDKVLSAYNKHRDKPIREQAENIIHLFTLTNLGAPAAFKYFDTTIDRKRYTSTKEVLDATLIHQSITGLYETRIDLSQLGGDGGAEAAAKEAAAKEAAAKEAAAKALEAEAAAKEAAAKEAAAKEAAAKAGGVLNLEEEYRLHEKPVPSSIDPSWLQLFPTVWAERAGMGLANQVPPVVVELRSGASPVAVRQYPMSKEAREGIRPHIQRFLDLGVLVPCQSPWNTPLLPVKKPGTNDYRPVQDLREINKRVQDIHPTVPNPYNLLSSLPPSHTWYSVLDLKDAFFCLKLHPNSQPLFAFEWRDPEKGNTGQLTWTRLPQGFKNSPTLFNEALHRDLAPFRALNPQVVLLQYVDDLLVAAPTYRDCKEGTQKLLQELSKLGYRVSAKKAQLCQKEVTYLGYLLKEGKRWLTPARKATVMKIPPPTTPRQVREFLGKAGFCRLFIPGFASLAAPLYPLTKPSIPFIWTEEHQKAFDRIKEALLSAPALALPDLTKPFTLYVDERAGVARGVLTQTLGPWRRPVAYLSKKLDPVASGWPTCLKAVAAVALLLKDADKLTLGQNVTVIASHSLESIVRQPPDRWMTNARMTHYQSLLLNERVSFAPPAVLNPATLLPVESEATPVHRCSEILAEETGTRRDLKDQPLPGVPAWYTDGSSFIAEGKRRAGAAIVDGKRTVWASSLPEGTSAQKAELVALTQALRLAEGKDINIYTDSRYAFATAHIHGAIYKQRGWLTSAGKDIKNKEEILALLEAIHLPKRVAIIHCPGHQKGNDPVATGNRRADEAAKQAALSTRVLAETTKPAGKRTADGSEFEKRTADGSEFESPKKKAKVE

SEQ ID NO: 872 - protein, 2092 aa, synthetic construct
MPAAKRVKLDGGDKKYSIGLDIGTNSVGWAVITDEYKVPSKKFKVLGNTDRHSIKKNLIGALLFDSGETAEATRLKRTARRRYTRRKNRICYLQEIFSNEMAKVDDSFFHRLEESFLVEEDKKHERHPIFGNIVDEVAYHEKYPTIYHLRKKLVDSTDKADLRLIYLALAHMIKFRGHFLIEGDLNPDNSDVDKLFIQLVQTYNQLFEENPINASGVDAKAILSARLSKSRRLENLIAQLPGEKKNGLFGNLIALSLGLTPNFKSNFDLAEDAKLQLSKDTYDDDLDNLLAQIGDQYADLFLAAKNLSDAILLSDILRVNTEITKAPLSASMIKRYDEHHQDLTLLKALVRQQLPEKYKEIFFDQSKNGYAGYIDGGASQEEFYKFIKPILEKMDGTEELLVKLNREDLLRKQRTFDNGSIPHQIHLGELHAILRRQEDFYPFLKDNREKIEKILTFRIPYYVGPLARGNSRFAWMTRKSEETITPWNFEEVVDKGASAQSFIERMTNFDKNLPNEKVLPKHSLLYEYFTVYNELTKVKYVTEGMRKPAFLSGEQKKAIVDLLFKTNRKVTVKQLKEDYFKKIECFDSVEISGVEDRFNASLGTYHDLLKIIKDKDFLDNEENEDILEDIVLTLTLFEDREMIEERLKTYAHLFDDKVMKQLKRRRYTGWGRLSRKLINGIRDKQSGKTILDFLKSDGFANRNFMQLIHDDSLTFKEDIQKAQVSGQGDSLHEHIANLAGSPAIKKGILQTVKVVDELVKVMGRHKPENIVIEMARENQTTQKGQKNSRERMKRIEEGIKELGSQILKEHPVENTQLQNEKLYLYYLQNGRDMYVDQELDINRLSDYDVDHIVPQSFLKDDSIDNKVLTRSDKARGKSDNVPSEEVVKKMKNYWRQLLNAKLITQRKFDNLTKAERGGLSELDKAGFIKRQLVETRQITKHVAQILDSRMNTKYDENDKLIREVKVITLKSKLVSDFRKDFQFYKVREINNYHHAHDAYLNAVVGTALIKKYPKLESEFVYGDYKVYDVRKMIAKSEQEIGKATAKYFFYSNIMNFFKTEITLANGEIRKRPLIETNGETGEIVWDKGRDFATVRKVLSMPQVNIVKKTEVQTGGFSKESILPKRNSDKLIARKKDWDPKKYGGFDSPTVAYSVLVVAKVEKGKSKKLKSVKELLGITIMERSSFEKNPIDFLEAKGYKEVKKDLIIKLPKYSLFELENGRKRMLASAGELQKGNELALPSKYVNFLYLASHYEKLKGSPEDNEQKQLFVEQHKHYLDEIIEQISEFSKRVILADANLDKVLSAYNKHRDKPIREQAENIIHLFTLTNLGAPAAFKYFDTTIDRKRYTSTKEVLDATLIHQSITGLYETRIDLSQLGGDGGPAPGGGGSSGGVLNLEEEYRLHEKPVPSSIDPSWLQLFPTVWAERAGMGLANQVPPVVVELRSGASPVAVRQYPMSKEAREGIRPHIQRFLDLGVLVPCQSPWNTPLLPVKKPGTNDYRPVQDLREINKRVQDIHPTVPNPYNLLSSLPPSHTWYSVLDLKDAFFCLKLHPNSQPLFAFEWRDPEKGNTGQLTWTRLPQGFKNSPTLFNEALHRDLAPFRALNPQVVLLQYVDDLLVAAPTYRDCKEGTQKLLQELSKLGYRVSAKKAQLCQKEVTYLGYLLKEGKRWLTPARKATVMKIPPPTTPRQVREFLGKAGFCRLFIPGFASLAAPLYPLTKPSIPFIWTEEHQKAFDRIKEALLSAPALALPDLTKPFTLYVDERAGVARGVLTQTLGPWRRPVAYLSKKLDPVASGWPTCLKAVAAVALLLKDADKLTLGQNVTVIASHSLESIVRQPPDRWMTNARMTHYQSLLLNERVSFAPPAVLNPATLLPVESEATPVHRCSEILAEETGTRRDLKDQPLPGVPAWYTDGSSFIAEGKRRAGAAIVDGKRTVWASSLPEGTSAQKAELVALTQALRLAEGKDINIYTDSRYAFATAHIHGAIYKQRGWLTSAGKDIKNKEEILALLEAIHLPKRVAIIHCPGHQKGNDPVATGNRRADEAAKQAALSTRVLAETTKPAGKRTADGSEFEKRTADGSEFESPKKKAKVE

SEQ ID NO: 873 - protein, 2108 aa, synthetic construct
MPAAKRVKLDGGDKKYSIGLDIGTNSVGWAVITDEYKVPSKKFKVLGNTDRHSIKKNLIGALLFDSGETAEATRLKRTARRRYTRRKNRICYLQEIFSNEMAKVDDSFFHRLEESFLVEEDKKHERHPIFGNIVDEVAYHEKYPTIYHLRKKLVDSTDKADLRLIYLALAHMIKFRGHFLIEGDLNPDNSDVDKLFIQLVQTYNQLFEENPINASGVDAKAILSARLSKSRRLENLIAQLPGEKKNGLFGNLIALSLGLTPNFKSNFDLAEDAKLQLSKDTYDDDLDNLLAQIGDQYADLFLAAKNLSDAILLSDILRVNTEITKAPLSASMIKRYDEHHQDLTLLKALVRQQLPEKYKEIFFDQSKNGYAGYIDGGASQEEFYKFIKPILEKMDGTEELLVKLNREDLLRKQRTFDNGSIPHQIHLGELHAILRRQEDFYPFLKDNREKIEKILTFRIPYYVGPLARGNSRFAWMTRKSEETITPWNFEEVVDKGASAQSFIERMTNFDKNLPNEKVLPKHSLLYEYFTVYNELTKVKYVTEGMRKPAFLSGEQKKAIVDLLFKTNRKVTVKQLKEDYFKKIECFDSVEISGVEDRFNASLGTYHDLLKIIKDKDFLDNEENEDILEDIVLTLTLFEDREMIEERLKTYAHLFDDKVMKQLKRRRYTGWGRLSRKLINGIRDKQSGKTILDFLKSDGFANRNFMQLIHDDSLTFKEDIQKAQVSGQGDSLHEHIANLAGSPAIKKGILQTVKVVDELVKVMGRHKPENIVIEMARENQTTQKGQKNSRERMKRIEEGIKELGSQILKEHPVENTQLQNEKLYLYYLQNGRDMYVDQELDINRLSDYDVDHIVPQSFLKDDSIDNKVLTRSDKARGKSDNVPSEEVVKKMKNYWRQLLNAKLITQRKFDNLTKAERGGLSELDKAGFIKRQLVETRQITKHVAQILDSRMNTKYDENDKLIREVKVITLKSKLVSDFRKDFQFYKVREINNYHHAHDAYLNAVVGTALIKKYPKLESEFVYGDYKVYDVRKMIAKSEQEIGKATAKYFFYSNIMNFFKTEITLANGEIRKRPLIETNGETGEIVWDKGRDFATVRKVLSMPQVNIVKKTEVQTGGFSKESILPKRNSDKLIARKKDWDPKKYGGFDSPTVAYSVLVVAKVEKGKSKKLKSVKELLGITIMERSSFEKNPIDFLEAKGYKEVKKDLIIKLPKYSLFELENGRKRMLASAGELQKGNELALPSKYVNFLYLASHYEKLKGSPEDNEQKQLFVEQHKHYLDEIIEQISEFSKRVILADANLDKVLSAYNKHRDKPIREQAENIIHLFTLTNLGAPAAFKYFDTTIDRKRYTSTKEVLDATLIHQSITGLYETRIDLSQLGGDGGGGGGSGGGGSGGGGSGGGGSGGGGSGGVLNLEEEYRLHEKPVPSSIDPSWLQLFPTVWAERAGMGLANQVPPVVVELRSGASPVAVRQYPMSKEAREGIRPHIQRFLDLGVLVPCQSPWNTPLLPVKKPGTNDYRPVQDLREINKRVQDIHPTVPNPYNLLSSLPPSHTWYSVLDLKDAFFCLKLHPNSQPLFAFEWRDPEKGNTGQLTWTRLPQGFKNSPTLFNEALHRDLAPFRALNPQVVLLQYVDDLLVAAPTYRDCKEGTQKLLQELSKLGYRVSAKKAQLCQKEVTYLGYLLKEGKRWLTPARKATVMKIPPPTTPRQVREFLGKAGFCRLFIPGFASLAAPLYPLTKPSIPFIWTEEHQKAFDRIKEALLSAPALALPDLTKPFTLYVDERAGVARGVLTQTLGPWRRPVAYLSKKLDPVASGWPTCLKAVAAVALLLKDADKLTLGQNVTVIASHSLESIVRQPPDRWMTNARMTHYQSLLLNERVSFAPPAVLNPATLLPVESEATPVHRCSEILAEETGTRRDLKDQPLPGVPAWYTDGSSFIAEGKRRAGAAIVDGKRTVWASSLPEGTSAQKAELVALTQALRLAEGKDINIYTDSRYAFATAHIHGAIYKQRGWLTSAGKDIKNKEEILALLEAIHLPKRVAIIHCPGHQKGNDPVATGNRRADEAAKQAALSTRVLAETTKPAGKRTADGSEFEKRTADGSEFESPKKKAKVE

SEQ ID NO: 874 - protein, 2094 aa, synthetic construct
MPAAKRVKLDGGDKKYSIGLDIGTNSVGWAVITDEYKVPSKKFKVLGNTDRHSIKKNLIGALLFDSGETAEATRLKRTARRRYTRRKNRICYLQEIFSNEMAKVDDSFFHRLEESFLVEEDKKHERHPIFGNIVDEVAYHEKYPTIYHLRKKLVDSTDKADLRLIYLALAHMIKFRGHFLIEGDLNPDNSDVDKLFIQLVQTYNQLFEENPINASGVDAKAILSARLSKSRRLENLIAQLPGEKKNGLFGNLIALSLGLTPNFKSNFDLAEDAKLQLSKDTYDDDLDNLLAQIGDQYADLFLAAKNLSDAILLSDILRVNTEITKAPLSASMIKRYDEHHQDLTLLKALVRQQLPEKYKEIFFDQSKNGYAGYIDGGASQEEFYKFIKPILEKMDGTEELLVKLNREDLLRKQRTFDNGSIPHQIHLGELHAILRRQEDFYPFLKDNREKIEKILTFRIPYYVGPLARGNSRFAWMTRKSEETITPWNFEEVVDKGASAQSFIERMTNFDKNLPNEKVLPKHSLLYEYFTVYNELTKVKYVTEGMRKPAFLSGEQKKAIVDLLFKTNRKVTVKQLKEDYFKKIECFDSVEISGVEDRFNASLGTYHDLLKIIKDKDFLDNEENEDILEDIVLTLTLFEDREMIEERLKTYAHLFDDKVMKQLKRRRYTGWGRLSRKLINGIRDKQSGKTILDFLKSDGFANRNFMQLIHDDSLTFKEDIQKAQVSGQGDSLHEHIANLAGSPAIKKGILQTVKVVDELVKVMGRHKPENIVIEMARENQTTQKGQKNSRERMKRIEEGIKELGSQILKEHPVENTQLQNEKLYLYYLQNGRDMYVDQELDINRLSDYDVDHIVPQSFLKDDSIDNKVLTRSDKARGKSDNVPSEEVVKKMKNYWRQLLNAKLITQRKFDNLTKAERGGLSELDKAGFIKRQLVETRQITKHVAQILDSRMNTKYDENDKLIREVKVITLKSKLVSDFRKDFQFYKVREINNYHHAHDAYLNAVVGTALIKKYPKLESEFVYGDYKVYDVRKMIAKSEQEIGKATAKYFFYSNIMNFFKTEITLANGEIRKRPLIETNGETGEIVWDKGRDFATVRKVLSMPQVNIVKKTEVQTGGFSKESILPKRNSDKLIARKKDWDPKKYGGFDSPTVAYSVLVVAKVEKGKSKKLKSVKELLGITIMERSSFEKNPIDFLEAKGYKEVKKDLIIKLPKYSLFELENGRKRMLASAGELQKGNELALPSKYVNFLYLASHYEKLKGSPEDNEQKQLFVEQHKHYLDEIIEQISEFSKRVILADANLDKVLSAYNKHRDKPIREQAENIIHLFTLTNLGAPAAFKYFDTTIDRKRYTSTKEVLDATLIHQSITGLYETRIDLSQLGGDGGEAAAKPAPGSSGGVLNLEEEYRLHEKPVPSSIDPSWLQLFPTVWAERAGMGLANQVPPVVVELRSGASPVAVRQYPMSKEAREGIRPHIQRFLDLGVLVPCQSPWNTPLLPVKKPGTNDYRPVQDLREINKRVQDIHPTVPNPYNLLSSLPPSHTWYSVLDLKDAFFCLKLHPNSQPLFAFEWRDPEKGNTGQLTWTRLPQGFKNSPTLFNEALHRDLAPFRALNPQVVLLQYVDDLLVAAPTYRDCKEGTQKLLQELSKLGYRVSAKKAQLCQKEVTYLGYLLKEGKRWLTPARKATVMKIPPPTTPRQVREFLGKAGFCRLFIPGFASLAAPLYPLTKPSIPFIWTEEHQKAFDRIKEALLSAPALALPDLTKPFTLYVDERAGVARGVLTQTLGPWRRPVAYLSKKLDPVASGWPTCLKAVAAVALLLKDADKLTLGQNVTVIASHSLESIVRQPPDRWMTNARMTHYQSLLLNERVSFAPPAVLNPATLLPVESEATPVHRCSEILAEETGTRRDLKDQPLPGVPAWYTDGSSFIAEGKRRAGAAIVDGKRTVWASSLPEGTSAQKAELVALTQALRLAEGKDINIYTDSRYAFATAHIHGAIYKQRGWLTSAGKDIKNKEEILALLEAIHLPKRVAIIHCPGHQKGNDPVATGNRRADEAAKQAALSTRVLAETTKPAGKRTADGSEFEKRTADGSEFESPKKKAKVE

SEQ ID NO: 875 - protein, 2092 aa, synthetic construct
MPAAKRVKLDGGDKKYSIGLDIGTNSVGWAVITDEYKVPSKKFKVLGNTDRHSIKKNLIGALLFDSGETAEATRLKRTARRRYTRRKNRICYLQEIFSNEMAKVDDSFFHRLEESFLVEEDKKHERHPIFGNIVDEVAYHEKYPTIYHLRKKLVDSTDKADLRLIYLALAHMIKFRGHFLIEGDLNPDNSDVDKLFIQLVQTYNQLFEENPINASGVDAKAILSARLSKSRRLENLIAQLPGEKKNGLFGNLIALSLGLTPNFKSNFDLAEDAKLQLSKDTYDDDLDNLLAQIGDQYADLFLAAKNLSDAILLSDILRVNTEITKAPLSASMIKRYDEHHQDLTLLKALVRQQLPEKYKEIFFDQSKNGYAGYIDGGASQEEFYKFIKPILEKMDGTEELLVKLNREDLLRKQRTFDNGSIPHQIHLGELHAILRRQEDFYPFLKDNREKIEKILTFRIPYYVGPLARGNSRFAWMTRKSEETITPWNFEEVVDKGASAQSFIERMTNFDKNLPNEKVLPKHSLLYEYFTVYNELTKVKYVTEGMRKPAFLSGEQKKAIVDLLFKTNRKVTVKQLKEDYFKKIECFDSVEISGVEDRFNASLGTYHDLLKIIKDKDFLDNEENEDILEDIVLTLTLFEDREMIEERLKTYAHLFDDKVMKQLKRRRYTGWGRLSRKLINGIRDKQSGKTILDFLKSDGFANRNFMQLIHDDSLTFKEDIQKAQVSGQGDSLHEHIANLAGSPAIKKGILQTVKVVDELVKVMGRHKPENIVIEMARENQTTQKGQKNSRERMKRIEEGIKELGSQILKEHPVENTQLQNEKLYLYYLQNGRDMYVDQELDINRLSDYDVDHIVPQSFLKDDSIDNKVLTRSDKARGKSDNVPSEEVVKKMKNYWRQLLNAKLITQRKFDNLTKAERGGLSELDKAGFIKRQLVETRQITKHVAQILDSRMNTKYDENDKLIREVKVITLKSKLVSDFRKDFQFYKVREINNYHHAHDAYLNAVVGTALIKKYPKLESEFVYGDYKVYDVRKMIAKSEQEIGKATAKYFFYSNIMNFFKTEITLANGEIRKRPLIETNGETGEIVWDKGRDFATVRKVLSMPQVNIVKKTEVQTGGFSKESILPKRNSDKLIARKKDWDPKKYGGFDSPTVAYSVLVVAKVEKGKSKKLKSVKELLGITIMERSSFEKNPIDFLEAKGYKEVKKDLIIKLPKYSLFELENGRKRMLASAGELQKGNELALPSKYVNFLYLASHYEKLKGSPEDNEQKQLFVEQHKHYLDEIIEQISEFSKRVILADANLDKVLSAYNKHRDKPIREQAENIIHLFTLTNLGAPAAFKYFDTTIDRKRYTSTKEVLDATLIHQSITGLYETRIDLSQLGGDGGGGSPAPGSSGGVLNLEEEYRLHEKPVPSSIDPSWLQLFPTVWAERAGMGLANQVPPVVVELRSGASPVAVRQYPMSKEAREGIRPHIQRFLDLGVLVPCQSPWNTPLLPVKKPGTNDYRPVQDLREINKRVQDIHPTVPNPYNLLSSLPPSHTWYSVLDLKDAFFCLKLHPNSQPLFAFEWRDPEKGNTGQLTWTRLPQGFKNSPTLFNEALHRDLAPFRALNPQVVLLQYVDDLLVAAPTYRDCKEGTQKLLQELSKLGYRVSAKKAQLCQKEVTYLGYLLKEGKRWLTPARKATVMKIPPPTTPRQVREFLGKAGFCRLFIPGFASLAAPLYPLTKPSIPFIWTEEHQKAFDRIKEALLSAPALALPDLTKPFTLYVDERAGVARGVLTQTLGPWRRPVAYLSKKLDPVASGWPTCLKAVAAVALLLKDADKLTLGQNVTVIASHSLESIVRQPPDRWMTNARMTHYQSLLLNERVSFAPPAVLNPATLLPVESEATPVHRCSEILAEETGTRRDLKDQPLPGVPAWYTDGSSFIAEGKRRAGAAIVDGKRTVWASSLPEGTSAQKAELVALTQALRLAEGKDINIYTDSRYAFATAHIHGAIYKQRGWLTSAGKDIKNKEEILALLEAIHLPKRVAIIHCPGHQKGNDPVATGNRRADEAAKQAALSTRVLAETTKPAGKRTADGSEFEKRTADGSEFESPKKKAKVE

SEQ ID NO: 876 - protein, 2086 aa, synthetic construct
MPAAKRVKLDGGDKKYSIGLDIGTNSVGWAVITDEYKVPSKKFKVLGNTDRHSIKKNLIGALLFDSGETAEATRLKRTARRRYTRRKNRICYLQEIFSNEMAKVDDSFFHRLEESFLVEEDKKHERHPIFGNIVDEVAYHEKYPTIYHLRKKLVDSTDKADLRLIYLALAHMIKFRGHFLIEGDLNPDNSDVDKLFIQLVQTYNQLFEENPINASGVDAKAILSARLSKSRRLENLIAQLPGEKKNGLFGNLIALSLGLTPNFKSNFDLAEDAKLQLSKDTYDDDLDNLLAQIGDQYADLFLAAKNLSDAILLSDILRVNTEITKAPLSASMIKRYDEHHQDLTLLKALVRQQLPEKYKEIFFDQSKNGYAGYIDGGASQEEFYKFIKPILEKMDGTEELLVKLNREDLLRKQRTFDNGSIPHQIHLGELHAILRRQEDFYPFLKDNREKIEKILTFRIPYYVGPLARGNSRFAWMTRKSEETITPWNFEEVVDKGASAQSFIERMTNFDKNLPNEKVLPKHSLLYEYFTVYNELTKVKYVTEGMRKPAFLSGEQKKAIVDLLFKTNRKVTVKQLKEDYFKKIECFDSVEISGVEDRFNASLGTYHDLLKIIKDKDFLDNEENEDILEDIVLTLTLFEDREMIEERLKTYAHLFDDKVMKQLKRRRYTGWGRLSRKLINGIRDKQSGKTILDFLKSDGFANRNFMQLIHDDSLTFKEDIQKAQVSGQGDSLHEHIANLAGSPAIKKGILQTVKVVDELVKVMGRHKPENIVIEMARENQTTQKGQKNSRERMKRIEEGIKELGSQILKEHPVENTQLQNEKLYLYYLQNGRDMYVDQELDINRLSDYDVDHIVPQSFLKDDSIDNKVLTRSDKARGKSDNVPSEEVVKKMKNYWRQLLNAKLITQRKFDNLTKAERGGLSELDKAGFIKRQLVETRQITKHVAQILDSRMNTKYDENDKLIREVKVITLKSKLVSDFRKDFQFYKVREINNYHHAHDAYLNAVVGTALIKKYPKLESEFVYGDYKVYDVRKMIAKSEQEIGKATAKYFFYSNIMNFFKTEITLANGEIRKRPLIETNGETGEIVWDKGRDFATVRKVLSMPQVNIVKKTEVQTGGFSKESILPKRNSDKLIARKKDWDPKKYGGFDSPTVAYSVLVVAKVEKGKSKKLKSVKELLGITIMERSSFEKNPIDFLEAKGYKEVKKDLIIKLPKYSLFELENGRKRMLASAGELQKGNELALPSKYVNFLYLASHYEKLKGSPEDNEQKQLFVEQHKHYLDEIIEQISEFSKRVILADANLDKVLSAYNKHRDKPIREQAENIIHLFTLTNLGAPAAFKYFDTTIDRKRYTSTKEVLDATLIHQSITGLYETRIDLSQLGGDGGGSSGGVLNLEEEYRLHEKPVPSSIDPSWLQLFPTVWAERAGMGLANQVPPVVVELRSGASPVAVRQYPMSKEAREGIRPHIQRFLDLGVLVPCQSPWNTPLLPVKKPGTNDYRPVQDLREINKRVQDIHPTVPNPYNLLSSLPPSHTWYSVLDLKDAFFCLKLHPNSQPLFAFEWRDPEKGNTGQLTWTRLPQGFKNSPTLFNEALHRDLAPFRALNPQVVLLQYVDDLLVAAPTYRDCKEGTQKLLQELSKLGYRVSAKKAQLCQKEVTYLGYLLKEGKRWLTPARKATVMKIPPPTTPRQVREFLGKAGFCRLFIPGFASLAAPLYPLTKPSIPFIWTEEHQKAFDRIKEALLSAPALALPDLTKPFTLYVDERAGVARGVLTQTLGPWRRPVAYLSKKLDPVASGWPTCLKAVAAVALLLKDADKLTLGQNVTVIASHSLESIVRQPPDRWMTNARMTHYQSLLLNERVSFAPPAVLNPATLLPVESEATPVHRCSEILAEETGTRRDLKDQPLPGVPAWYTDGSSFIAEGKRRAGAAIVDGKRTVWASSLPEGTSAQKAELVALTQALRLAEGKDINIYTDSRYAFATAHIHGAIYKQRGWLTSAGKDIKNKEEILALLEAIHLPKRVAIIHCPGHQKGNDPVATGNRRADEAAKQAALSTRVLAETTKPAGKRTADGSEFEKRTADGSEFESPKKKAKVE

SEQ ID NO: 877 - protein, 2099 aa, synthetic construct
MPAAKRVKLDGGDKKYSIGLDIGTNSVGWAVITDEYKVPSKKFKVLGNTDRHSIKKNLIGALLFDSGETAEATRLKRTARRRYTRRKNRICYLQEIFSNEMAKVDDSFFHRLEESFLVEEDKKHERHPIFGNIVDEVAYHEKYPTIYHLRKKLVDSTDKADLRLIYLALAHMIKFRGHFLIEGDLNPDNSDVDKLFIQLVQTYNQLFEENPINASGVDAKAILSARLSKSRRLENLIAQLPGEKKNGLFGNLIALSLGLTPNFKSNFDLAEDAKLQLSKDTYDDDLDNLLAQIGDQYADLFLAAKNLSDAILLSDILRVNTEITKAPLSASMIKRYDEHHQDLTLLKALVRQQLPEKYKEIFFDQSKNGYAGYIDGGASQEEFYKFIKPILEKMDGTEELLVKLNREDLLRKQRTFDNGSIPHQIHLGELHAILRRQEDFYPFLKDNREKIEKILTFRIPYYVGPLARGNSRFAWMTRKSEETITPWNFEEVVDKGASAQSFIERMTNFDKNLPNEKVLPKHSLLYEYFTVYNELTKVKYVTEGMRKPAFLSGEQKKAIVDLLFKTNRKVTVKQLKEDYFKKIECFDSVEISGVEDRFNASLGTYHDLLKIIKDKDFLDNEENEDILEDIVLTLTLFEDREMIEERLKTYAHLFDDKVMKQLKRRRYTGWGRLSRKLINGIRDKQSGKTILDFLKSDGFANRNFMQLIHDDSLTFKEDIQKAQVSGQGDSLHEHIANLAGSPAIKKGILQTVKVVDELVKVMGRHKPENIVIEMARENQTTQKGQKNSRERMKRIEEGIKELGSQILKEHPVENTQLQNEKLYLYYLQNGRDMYVDQELDINRLSDYDVDHIVPQSFLKDDSIDNKVLTRSDKARGKSDNVPSEEVVKKMKNYWRQLLNAKLITQRKFDNLTKAERGGLSELDKAGFIKRQLVETRQITKHVAQILDSRMNTKYDENDKLIREVKVITLKSKLVSDFRKDFQFYKVREINNYHHAHDAYLNAVVGTALIKKYPKLESEFVYGDYKVYDVRKMIAKSEQEIGKATAKYFFYSNIMNFFKTEITLANGEIRKRPLIETNGETGEIVWDKGRDFATVRKVLSMPQVNIVKKTEVQTGGFSKESILPKRNSDKLIARKKDWDPKKYGGFDSPTVAYSVLVVAKVEKGKSKKLKSVKELLGITIMERSSFEKNPIDFLEAKGYKEVKKDLIIKLPKYSLFELENGRKRMLASAGELQKGNELALPSKYVNFLYLASHYEKLKGSPEDNEQKQLFVEQHKHYLDEIIEQISEFSKRVILADANLDKVLSAYNKHRDKPIREQAENIIHLFTLTNLGAPAAFKYFDTTIDRKRYTSTKEVLDATLIHQSITGLYETRIDLSQLGGDGGSGSETPGTSESATPESGGVLNLEEEYRLHEKPVPSSIDPSWLQLFPTVWAERAGMGLANQVPPVVVELRSGASPVAVRQYPMSKEAREGIRPHIQRFLDLGVLVPCQSPWNTPLLPVKKPGTNDYRPVQDLREINKRVQDIHPTVPNPYNLLSSLPPSHTWYSVLDLKDAFFCLKLHPNSQPLFAFEWRDPEKGNTGQLTWTRLPQGFKNSPTLFNEALHRDLAPFRALNPQVVLLQYVDDLLVAAPTYRDCKEGTQKLLQELSKLGYRVSAKKAQLCQKEVTYLGYLLKEGKRWLTPARKATVMKIPPPTTPRQVREFLGKAGFCRLFIPGFASLAAPLYPLTKPSIPFIWTEEHQKAFDRIKEALLSAPALALPDLTKPFTLYVDERAGVARGVLTQTLGPWRRPVAYLSKKLDPVASGWPTCLKAVAAVALLLKDADKLTLGQNVTVIASHSLESIVRQPPDRWMTNARMTHYQSLLLNERVSFAPPAVLNPATLLPVESEATPVHRCSEILAEETGTRRDLKDQPLPGVPAWYTDGSSFIAEGKRRAGAAIVDGKRTVWASSLPEGTSAQKAELVALTQALRLAEGKDINIYTDSRYAFATAHIHGAIYKQRGWLTSAGKDIKNKEEILALLEAIHLPKRVAIIHCPGHQKGNDPVATGNRRADEAAKQAALSTRVLAETTKPAGKRTADGSEFEKRTADGSEFESPKKKAKVE

SEQ ID NO: 878 - protein, 2092 aa, synthetic construct
MPAAKRVKLDGGDKKYSIGLDIGTNSVGWAVITDEYKVPSKKFKVLGNTDRHSIKKNLIGALLFDSGETAEATRLKRTARRRYTRRKNRICYLQEIFSNEMAKVDDSFFHRLEESFLVEEDKKHERHPIFGNIVDEVAYHEKYPTIYHLRKKLVDSTDKADLRLIYLALAHMIKFRGHFLIEGDLNPDNSDVDKLFIQLVQTYNQLFEENPINASGVDAKAILSARLSKSRRLENLIAQLPGEKKNGLFGNLIALSLGLTPNFKSNFDLAEDAKLQLSKDTYDDDLDNLLAQIGDQYADLFLAAKNLSDAILLSDILRVNTEITKAPLSASMIKRYDEHHQDLTLLKALVRQQLPEKYKEIFFDQSKNGYAGYIDGGASQEEFYKFIKPILEKMDGTEELLVKLNREDLLRKQRTFDNGSIPHQIHLGELHAILRRQEDFYPFLKDNREKIEKILTFRIPYYVGPLARGNSRFAWMTRKSEETITPWNFEEVVDKGASAQSFIERMTNFDKNLPNEKVLPKHSLLYEYFTVYNELTKVKYVTEGMRKPAFLSGEQKKAIVDLLFKTNRKVTVKQLKEDYFKKIECFDSVEISGVEDRFNASLGTYHDLLKIIKDKDFLDNEENEDILEDIVLTLTLFEDREMIEERLKTYAHLFDDKVMKQLKRRRYTGWGRLSRKLINGIRDKQSGKTILDFLKSDGFANRNFMQLIHDDSLTFKEDIQKAQVSGQGDSLHEHIANLAGSPAIKKGILQTVKVVDELVKVMGRHKPENIVIEMARENQTTQKGQKNSRERMKRIEEGIKELGSQILKEHPVENTQLQNEKLYLYYLQNGRDMYVDQELDINRLSDYDVDHIVPQSFLKDDSIDNKVLTRSDKARGKSDNVPSEEVVKKMKNYWRQLLNAKLITQRKFDNLTKAERGGLSELDKAGFIKRQLVETRQITKHVAQILDSRMNTKYDENDKLIREVKVITLKSKLVSDFRKDFQFYKVREINNYHHAHDAYLNAVVGTALIKKYPKLESEFVYGDYKVYDVRKMIAKSEQEIGKATAKYFFYSNIMNFFKTEITLANGEIRKRPLIETNGETGEIVWDKGRDFATVRKVLSMPQVNIVKKTEVQTGGFSKESILPKRNSDKLIARKKDWDPKKYGGFDSPTVAYSVLVVAKVEKGKSKKLKSVKELLGITIMERSSFEKNPIDFLEAKGYKEVKKDLIIKLPKYSLFELENGRKRMLASAGELQKGNELALPSKYVNFLYLASHYEKLKGSPEDNEQKQLFVEQHKHYLDEIIEQISEFSKRVILADANLDKVLSAYNKHRDKPIREQAENIIHLFTLTNLGAPAAFKYFDTTIDRKRYTSTKEVLDATLIHQSITGLYETRIDLSQLGGDGGGGGPAPGGSGGVLNLEEEYRLHEKPVPSSIDPSWLQLFPTVWAERAGMGLANQVPPVVVELRSGASPVAVRQYPMSKEAREGIRPHIQRFLDLGVLVPCQSPWNTPLLPVKKPGTNDYRPVQDLREINKRVQDIHPTVPNPYNLLSSLPPSHTWYSVLDLKDAFFCLKLHPNSQPLFAFEWRDPEKGNTGQLTWTRLPQGFKNSPTLFNEALHRDLAPFRALNPQVVLLQYVDDLLVAAPTYRDCKEGTQKLLQELSKLGYRVSAKKAQLCQKEVTYLGYLLKEGKRWLTPARKATVMKIPPPTTPRQVREFLGKAGFCRLFIPGFASLAAPLYPLTKPSIPFIWTEEHQKAFDRIKEALLSAPALALPDLTKPFTLYVDERAGVARGVLTQTLGPWRRPVAYLSKKLDPVASGWPTCLKAVAAVALLLKDADKLTLGQNVTVIASHSLESIVRQPPDRWMTNARMTHYQSLLLNERVSFAPPAVLNPATLLPVESEATPVHRCSEILAEETGTRRDLKDQPLPGVPAWYTDGSSFIAEGKRRAGAAIVDGKRTVWASSLPEGTSAQKAELVALTQALRLAEGKDINIYTDSRYAFATAHIHGAIYKQRGWLTSAGKDIKNKEEILALLEAIHLPKRVAIIHCPGHQKGNDPVATGNRRADEAAKQAALSTRVLAETTKPAGKRTADGSEFEKRTADGSEFESPKKKAKVE

SEQ ID NO: 879 - protein, 2108 aa, synthetic construct
MPAAKRVKLDGGDKKYSIGLDIGTNSVGWAVITDEYKVPSKKFKVLGNTDRHSIKKNLIGALLFDSGETAEATRLKRTARRRYTRRKNRICYLQEIFSNEMAKVDDSFFHRLEESFLVEEDKKHERHPIFGNIVDEVAYHEKYPTIYHLRKKLVDSTDKADLRLIYLALAHMIKFRGHFLIEGDLNPDNSDVDKLFIQLVQTYNQLFEENPINASGVDAKAILSARLSKSRRLENLIAQLPGEKKNGLFGNLIALSLGLTPNFKSNFDLAEDAKLQLSKDTYDDDLDNLLAQIGDQYADLFLAAKNLSDAILLSDILRVNTEITKAPLSASMIKRYDEHHQDLTLLKALVRQQLPEKYKEIFFDQSKNGYAGYIDGGASQEEFYKFIKPILEKMDGTEELLVKLNREDLLRKQRTFDNGSIPHQIHLGELHAILRRQEDFYPFLKDNREKIEKILTFRIPYYVGPLARGNSRFAWMTRKSEETITPWNFEEVVDKGASAQSFIERMTNFDKNLPNEKVLPKHSLLYEYFTVYNELTKVKYVTEGMRKPAFLSGEQKKAIVDLLFKTNRKVTVKQLKEDYFKKIECFDSVEISGVEDRFNASLGTYHDLLKIIKDKDFLDNEENEDILEDIVLTLTLFEDREMIEERLKTYAHLFDDKVMKQLKRRRYTGWGRLSRKLINGIRDKQSGKTILDFLKSDGFANRNFMQLIHDDSLTFKEDIQKAQVSGQGDSLHEHIANLAGSPAIKKGILQTVKVVDELVKVMGRHKPENIVIEMARENQTTQKGQKNSRERMKRIEEGIKELGSQILKEHPVENTQLQNEKLYLYYLQNGRDMYVDQELDINRLSDYDVDHIVPQSFLKDDSIDNKVLTRSDKARGKSDNVPSEEVVKKMKNYWRQLLNAKLITQRKFDNLTKAERGGLSELDKAGFIKRQLVETRQITKHVAQILDSRMNTKYDENDKLIREVKVITLKSKLVSDFRKDFQFYKVREINNYHHAHDAYLNAVVGTALIKKYPKLESEFVYGDYKVYDVRKMIAKSEQEIGKATAKYFFYSNIMNFFKTEITLANGEIRKRPLIETNGETGEIVWDKGRDFATVRKVLSMPQVNIVKKTEVQTGGFSKESILPKRNSDKLIARKKDWDPKKYGGFDSPTVAYSVLVVAKVEKGKSKKLKSVKELLGITIMERSSFEKNPIDFLEAKGYKEVKKDLIIKLPKYSLFELENGRKRMLASAGELQKGNELALPSKYVNFLYLASHYEKLKGSPEDNEQKQLFVEQHKHYLDEIIEQISEFSKRVILADANLDKVLSAYNKHRDKPIREQAENIIHLFTLTNLGAPAAFKYFDTTIDRKRYTSTKEVLDATLIHQSITGLYETRIDLSQLGGDGGEAAAKEAAAKEAAAKEAAAKEAAAKGGVLNLEEEYRLHEKPVPSSIDPSWLQLFPTVWAERAGMGLANQVPPVVVELRSGASPVAVRQYPMSKEAREGIRPHIQRFLDLGVLVPCQSPWNTPLLPVKKPGTNDYRPVQDLREINKRVQDIHPTVPNPYNLLSSLPPSHTWYSVLDLKDAFFCLKLHPNSQPLFAFEWRDPEKGNTGQLTWTRLPQGFKNSPTLFNEALHRDLAPFRALNPQVVLLQYVDDLLVAAPTYRDCKEGTQKLLQELSKLGYRVSAKKAQLCQKEVTYLGYLLKEGKRWLTPARKATVMKIPPPTTPRQVREFLGKAGFCRLFIPGFASLAAPLYPLTKPSIPFIWTEEHQKAFDRIKEALLSAPALALPDLTKPFTLYVDERAGVARGVLTQTLGPWRRPVAYLSKKLDPVASGWPTCLKAVAAVALLLKDADKLTLGQNVTVIASHSLESIVRQPPDRWMTNARMTHYQSLLLNERVSFAPPAVLNPATLLPVESEATPVHRCSEILAEETGTRRDLKDQPLPGVPAWYTDGSSFIAEGKRRAGAAIVDGKRTVWASSLPEGTSAQKAELVALTQALRLAEGKDINIYTDSRYAFATAHIHGAIYKQRGWLTSAGKDIKNKEEILALLEAIHLPKRVAIIHCPGHQKGNDPVATGNRRADEAAKQAALSTRVLAETTKPAGKRTADGSEFEKRTADGSEFESPKKKAKVE

SEQ ID NO: 880 - protein, 2092 aa, synthetic construct
MPAAKRVKLDGGDKKYSIGLDIGTNSVGWAVITDEYKVPSKKFKVLGNTDRHSIKKNLIGALLFDSGETAEATRLKRTARRRYTRRKNRICYLQEIFSNEMAKVDDSFFHRLEESFLVEEDKKHERHPIFGNIVDEVAYHEKYPTIYHLRKKLVDSTDKADLRLIYLALAHMIKFRGHFLIEGDLNPDNSDVDKLFIQLVQTYNQLFEENPINASGVDAKAILSARLSKSRRLENLIAQLPGEKKNGLFGNLIALSLGLTPNFKSNFDLAEDAKLQLSKDTYDDDLDNLLAQIGDQYADLFLAAKNLSDAILLSDILRVNTEITKAPLSASMIKRYDEHHQDLTLLKALVRQQLPEKYKEIFFDQSKNGYAGYIDGGASQEEFYKFIKPILEKMDGTEELLVKLNREDLLRKQRTFDNGSIPHQIHLGELHAILRRQEDFYPFLKDNREKIEKILTFRIPYYVGPLARGNSRFAWMTRKSEETITPWNFEEVVDKGASAQSFIERMTNFDKNLPNEKVLPKHSLLYEYFTVYNELTKVKYVTEGMRKPAFLSGEQKKAIVDLLFKTNRKVTVKQLKEDYFKKIECFDSVEISGVEDRFNASLGTYHDLLKIIKDKDFLDNEENEDILEDIVLTLTLFEDREMIEERLKTYAHLFDDKVMKQLKRRRYTGWGRLSRKLINGIRDKQSGKTILDFLKSDGFANRNFMQLIHDDSLTFKEDIQKAQVSGQGDSLHEHIANLAGSPAIKKGILQTVKVVDELVKVMGRHKPENIVIEMARENQTTQKGQKNSRERMKRIEEGIKELGSQILKEHPVENTQLQNEKLYLYYLQNGRDMYVDQELDINRLSDYDVDHIVPQSFLKDDSIDNKVLTRSDKARGKSDNVPSEEVVKKMKNYWRQLLNAKLITQRKFDNLTKAERGGLSELDKAGFIKRQLVETRQITKHVAQILDSRMNTKYDENDKLIREVKVITLKSKLVSDFRKDFQFYKVREINNYHHAHDAYLNAVVGTALIKKYPKLESEFVYGDYKVYDVRKMIAKSEQEIGKATAKYFFYSNIMNFFKTEITLANGEIRKRPLIETNGETGEIVWDKGRDFATVRKVLSMPQVNIVKKTEVQTGGFSKESILPKRNSDKLIARKKDWDPKKYGGFDSPTVAYSVLVVAKVEKGKSKKLKSVKELLGITIMERSSFEKNPIDFLEAKGYKEVKKDLIIKLPKYSLFELENGRKRMLASAGELQKGNELALPSKYVNFLYLASHYEKLKGSPEDNEQKQLFVEQHKHYLDEIIEQISEFSKRVILADANLDKVLSAYNKHRDKPIREQAENIIHLFTLTNLGAPAAFKYFDTTIDRKRYTSTKEVLDATLIHQSITGLYETRIDLSQLGGDGGPAPGGSGSSGGVLNLEEEYRLHEKPVPSSIDPSWLQLFPTVWAERAGMGLANQVPPVVVELRSGASPVAVRQYPMSKEAREGIRPHIQRFLDLGVLVPCQSPWNTPLLPVKKPGTNDYRPVQDLREINKRVQDIHPTVPNPYNLLSSLPPSHTWYSVLDLKDAFFCLKLHPNSQPLFAFEWRDPEKGNTGQLTWTRLPQGFKNSPTLFNEALHRDLAPFRALNPQVVLLQYVDDLLVAAPTYRDCKEGTQKLLQELSKLGYRVSAKKAQLCQKEVTYLGYLLKEGKRWLTPARKATVMKIPPPTTPRQVREFLGKAGFCRLFIPGFASLAAPLYPLTKPSIPFIWTEEHQKAFDRIKEALLSAPALALPDLTKPFTLYVDERAGVARGVLTQTLGPWRRPVAYLSKKLDPVASGWPTCLKAVAAVALLLKDADKLTLGQNVTVIASHSLESIVRQPPDRWMTNARMTHYQSLLLNERVSFAPPAVLNPATLLPVESEATPVHRCSEILAEETGTRRDLKDQPLPGVPAWYTDGSSFIAEGKRRAGAAIVDGKRTVWASSLPEGTSAQKAELVALTQALRLAEGKDINIYTDSRYAFATAHIHGAIYKQRGWLTSAGKDIKNKEEILALLEAIHLPKRVAIIHCPGHQKGNDPVATGNRRADEAAKQAALSTRVLAETTKPAGKRTADGSEFEKRTADGSEFESPKKKAKVE

SEQ ID NO: 881 - protein, 2089 aa, synthetic construct
MPAAKRVKLDGGDKKYSIGLDIGTNSVGWAVITDEYKVPSKKFKVLGNTDRHSIKKNLIGALLFDSGETAEATRLKRTARRRYTRRKNRICYLQEIFSNEMAKVDDSFFHRLEESFLVEEDKKHERHPIFGNIVDEVAYHEKYPTIYHLRKKLVDSTDKADLRLIYLALAHMIKFRGHFLIEGDLNPDNSDVDKLFIQLVQTYNQLFEENPINASGVDAKAILSARLSKSRRLENLIAQLPGEKKNGLFGNLIALSLGLTPNFKSNFDLAEDAKLQLSKDTYDDDLDNLLAQIGDQYADLFLAAKNLSDAILLSDILRVNTEITKAPLSASMIKRYDEHHQDLTLLKALVRQQLPEKYKEIFFDQSKNGYAGYIDGGASQEEFYKFIKPILEKMDGTEELLVKLNREDLLRKQRTFDNGSIPHQIHLGELHAILRRQEDFYPFLKDNREKIEKILTFRIPYYVGPLARGNSRFAWMTRKSEETITPWNFEEVVDKGASAQSFIERMTNFDKNLPNEKVLPKHSLLYEYFTVYNELTKVKYVTEGMRKPAFLSGEQKKAIVDLLFKTNRKVTVKQLKEDYFKKIECFDSVEISGVEDRFNASLGTYHDLLKIIKDKDFLDNEENEDILEDIVLTLTLFEDREMIEERLKTYAHLFDDKVMKQLKRRRYTGWGRLSRKLINGIRDKQSGKTILDFLKSDGFANRNFMQLIHDDSLTFKEDIQKAQVSGQGDSLHEHIANLAGSPAIKKGILQTVKVVDELVKVMGRHKPENIVIEMARENQTTQKGQKNSRERMKRIEEGIKELGSQILKEHPVENTQLQNEKLYLYYLQNGRDMYVDQELDINRLSDYDVDHIVPQSFLKDDSIDNKVLTRSDKARGKSDNVPSEEVVKKMKNYWRQLLNAKLITQRKFDNLTKAERGGLSELDKAGFIKRQLVETRQITKHVAQILDSRMNTKYDENDKLIREVKVITLKSKLVSDFRKDFQFYKVREINNYHHAHDAYLNAVVGTALIKKYPKLESEFVYGDYKVYDVRKMIAKSEQEIGKATAKYFFYSNIMNFFKTEITLANGEIRKRPLIETNGETGEIVWDKGRDFATVRKVLSMPQVNIVKKTEVQTGGFSKESILPKRNSDKLIARKKDWDPKKYGGFDSPTVAYSVLVVAKVEKGKSKKLKSVKELLGITIMERSSFEKNPIDFLEAKGYKEVKKDLIIKLPKYSLFELENGRKRMLASAGELQKGNELALPSKYVNFLYLASHYEKLKGSPEDNEQKQLFVEQHKHYLDEIIEQISEFSKRVILADANLDKVLSAYNKHRDKPIREQAENIIHLFTLTNLGAPAAFKYFDTTIDRKRYTSTKEVLDATLIHQSITGLYETRIDLSQLGGDGGGGSGSSGGVLNLEEEYRLHEKPVPSSIDPSWLQLFPTVWAERAGMGLANQVPPVVVELRSGASPVAVRQYPMSKEAREGIRPHIQRFLDLGVLVPCQSPWNTPLLPVKKPGTNDYRPVQDLREINKRVQDIHPTVPNPYNLLSSLPPSHTWYSVLDLKDAFFCLKLHPNSQPLFAFEWRDPEKGNTGQLTWTRLPQGFKNSPTLFNEALHRDLAPFRALNPQVVLLQYVDDLLVAAPTYRDCKEGTQKLLQELSKLGYRVSAKKAQLCQKEVTYLGYLLKEGKRWLTPARKATVMKIPPPTTPRQVREFLGKAGFCRLFIPGFASLAAPLYPLTKPSIPFIWTEEHQKAFDRIKEALLSAPALALPDLTKPFTLYVDERAGVARGVLTQTLGPWRRPVAYLSKKLDPVASGWPTCLKAVAAVALLLKDADKLTLGQNVTVIASHSLESIVRQPPDRWMTNARMTHYQSLLLNERVSFAPPAVLNPATLLPVESEATPVHRCSEILAEETGTRRDLKDQPLPGVPAWYTDGSSFIAEGKRRAGAAIVDGKRTVWASSLPEGTSAQKAELVALTQALRLAEGKDINIYTDSRYAFATAHIHGAIYKQRGWLTSAGKDIKNKEEILALLEAIHLPKRVAIIHCPGHQKGNDPVATGNRRADEAAKQAALSTRVLAETTKPAGKRTADGSEFEKRTADGSEFESPKKKAKVE

SEQ ID NO: 882 - protein, 2089 aa, synthetic construct
MPAAKRVKLDGGDKKYSIGLDIGTNSVGWAVITDEYKVPSKKFKVLGNTDRHSIKKNLIGALLFDSGETAEATRLKRTARRRYTRRKNRICYLQEIFSNEMAKVDDSFFHRLEESFLVEEDKKHERHPIFGNIVDEVAYHEKYPTIYHLRKKLVDSTDKADLRLIYLALAHMIKFRGHFLIEGDLNPDNSDVDKLFIQLVQTYNQLFEENPINASGVDAKAILSARLSKSRRLENLIAQLPGEKKNGLFGNLIALSLGLTPNFKSNFDLAEDAKLQLSKDTYDDDLDNLLAQIGDQYADLFLAAKNLSDAILLSDILRVNTEITKAPLSASMIKRYDEHHQDLTLLKALVRQQLPEKYKEIFFDQSKNGYAGYIDGGASQEEFYKFIKPILEKMDGTEELLVKLNREDLLRKQRTFDNGSIPHQIHLGELHAILRRQEDFYPFLKDNREKIEKILTFRIPYYVGPLARGNSRFAWMTRKSEETITPWNFEEVVDKGASAQSFIERMTNFDKNLPNEKVLPKHSLLYEYFTVYNELTKVKYVTEGMRKPAFLSGEQKKAIVDLLFKTNRKVTVKQLKEDYFKKIECFDSVEISGVEDRFNASLGTYHDLLKIIKDKDFLDNEENEDILEDIVLTLTLFEDREMIEERLKTYAHLFDDKVMKQLKRRRYTGWGRLSRKLINGIRDKQSGKTILDFLKSDGFANRNFMQLIHDDSLTFKEDIQKAQVSGQGDSLHEHIANLAGSPAIKKGILQTVKVVDELVKVMGRHKPENIVIEMARENQTTQKGQKNSRERMKRIEEGIKELGSQILKEHPVENTQLQNEKLYLYYLQNGRDMYVDQELDINRLSDYDVDHIVPQSFLKDDSIDNKVLTRSDKARGKSDNVPSEEVVKKMKNYWRQLLNAKLITQRKFDNLTKAERGGLSELDKAGFIKRQLVETRQITKHVAQILDSRMNTKYDENDKLIREVKVITLKSKLVSDFRKDFQFYKVREINNYHHAHDAYLNAVVGTALIKKYPKLESEFVYGDYKVYDVRKMIAKSEQEIGKATAKYFFYSNIMNFFKTEITLANGEIRKRPLIETNGETGEIVWDKGRDFATVRKVLSMPQVNIVKKTEVQTGGFSKESILPKRNSDKLIARKKDWDPKKYGGFDSPTVAYSVLVVAKVEKGKSKKLKSVKELLGITIMERSSFEKNPIDFLEAKGYKEVKKDLIIKLPKYSLFELENGRKRMLASAGELQKGNELALPSKYVNFLYLASHYEKLKGSPEDNEQKQLFVEQHKHYLDEIIEQISEFSKRVILADANLDKVLSAYNKHRDKPIREQAENIIHLFTLTNLGAPAAFKYFDTTIDRKRYTSTKEVLDATLIHQSITGLYETRIDLSQLGGDGGGGGGGGGGVLNLEEEYRLHEKPVPSSIDPSWLQLFPTVWAERAGMGLANQVPPVVVELRSGASPVAVRQYPMSKEAREGIRPHIQRFLDLGVLVPCQSPWNTPLLPVKKPGTNDYRPVQDLREINKRVQDIHPTVPNPYNLLSSLPPSHTWYSVLDLKDAFFCLKLHPNSQPLFAFEWRDPEKGNTGQLTWTRLPQGFKNSPTLFNEALHRDLAPFRALNPQVVLLQYVDDLLVAAPTYRDCKEGTQKLLQELSKLGYRVSAKKAQLCQKEVTYLGYLLKEGKRWLTPARKATVMKIPPPTTPRQVREFLGKAGFCRLFIPGFASLAAPLYPLTKPSIPFIWTEEHQKAFDRIKEALLSAPALALPDLTKPFTLYVDERAGVARGVLTQTLGPWRRPVAYLSKKLDPVASGWPTCLKAVAAVALLLKDADKLTLGQNVTVIASHSLESIVRQPPDRWMTNARMTHYQSLLLNERVSFAPPAVLNPATLLPVESEATPVHRCSEILAEETGTRRDLKDQPLPGVPAWYTDGSSFIAEGKRRAGAAIVDGKRTVWASSLPEGTSAQKAELVALTQALRLAEGKDINIYTDSRYAFATAHIHGAIYKQRGWLTSAGKDIKNKEEILALLEAIHLPKRVAIIHCPGHQKGNDPVATGNRRADEAAKQAALSTRVLAETTKPAGKRTADGSEFEKRTADGSEFESPKKKAKVE

SEQ ID NO: 883 - protein, 2091 aa, synthetic construct
MPAAKRVKLDGGDKKYSIGLDIGTNSVGWAVITDEYKVPSKKFKVLGNTDRHSIKKNLIGALLFDSGETAEATRLKRTARRRYTRRKNRICYLQEIFSNEMAKVDDSFFHRLEESFLVEEDKKHERHPIFGNIVDEVAYHEKYPTIYHLRKKLVDSTDKADLRLIYLALAHMIKFRGHFLIEGDLNPDNSDVDKLFIQLVQTYNQLFEENPINASGVDAKAILSARLSKSRRLENLIAQLPGEKKNGLFGNLIALSLGLTPNFKSNFDLAEDAKLQLSKDTYDDDLDNLLAQIGDQYADLFLAAKNLSDAILLSDILRVNTEITKAPLSASMIKRYDEHHQDLTLLKALVRQQLPEKYKEIFFDQSKNGYAGYIDGGASQEEFYKFIKPILEKMDGTEELLVKLNREDLLRKQRTFDNGSIPHQIHLGELHAILRRQEDFYPFLKDNREKIEKILTFRIPYYVGPLARGNSRFAWMTRKSEETITPWNFEEVVDKGASAQSFIERMTNFDKNLPNEKVLPKHSLLYEYFTVYNELTKVKYVTEGMRKPAFLSGEQKKAIVDLLFKTNRKVTVKQLKEDYFKKIECFDSVEISGVEDRFNASLGTYHDLLKIIKDKDFLDNEENEDILEDIVLTLTLFEDREMIEERLKTYAHLFDDKVMKQLKRRRYTGWGRLSRKLINGIRDKQSGKTILDFLKSDGFANRNFMQLIHDDSLTFKEDIQKAQVSGQGDSLHEHIANLAGSPAIKKGILQTVKVVDELVKVMGRHKPENIVIEMARENQTTQKGQKNSRERMKRIEEGIKELGSQILKEHPVENTQLQNEKLYLYYLQNGRDMYVDQELDINRLSDYDVDHIVPQSFLKDDSIDNKVLTRSDKARGKSDNVPSEEVVKKMKNYWRQLLNAKLITQRKFDNLTKAERGGLSELDKAGFIKRQLVETRQITKHVAQILDSRMNTKYDENDKLIREVKVITLKSKLVSDFRKDFQFYKVREINNYHHAHDAYLNAVVGTALIKKYPKLESEFVYGDYKVYDVRKMIAKSEQEIGKATAKYFFYSNIMNFFKTEITLANGEIRKRPLIETNGETGEIVWDKGRDFATVRKVLSMPQVNIVKKTEVQTGGFSKESILPKRNSDKLIARKKDWDPKKYGGFDSPTVAYSVLVVAKVEKGKSKKLKSVKELLGITIMERSSFEKNPIDFLEAKGYKEVKKDLIIKLPKYSLFELENGRKRMLASAGELQKGNELALPSKYVNFLYLASHYEKLKGSPEDNEQKQLFVEQHKHYLDEIIEQISEFSKRVILADANLDKVLSAYNKHRDKPIREQAENIIHLFTLTNLGAPAAFKYFDTTIDRKRYTSTKEVLDATLIHQSITGLYETRIDLSQLGGDGGGSSEAAAKGGVLNLEEEYRLHEKPVPSSIDPSWLQLFPTVWAERAGMGLANQVPPVVVELRSGASPVAVRQYPMSKEAREGIRPHIQRFLDLGVLVPCQSPWNTPLLPVKKPGTNDYRPVQDLREINKRVQDIHPTVPNPYNLLSSLPPSHTWYSVLDLKDAFFCLKLHPNSQPLFAFEWRDPEKGNTGQLTWTRLPQGFKNSPTLFNEALHRDLAPFRALNPQVVLLQYVDDLLVAAPTYRDCKEGTQKLLQELSKLGYRVSAKKAQLCQKEVTYLGYLLKEGKRWLTPARKATVMKIPPPTTPRQVREFLGKAGFCRLFIPGFASLAAPLYPLTKPSIPFIWTEEHQKAFDRIKEALLSAPALALPDLTKPFTLYVDERAGVARGVLTQTLGPWRRPVAYLSKKLDPVASGWPTCLKAVAAVALLLKDADKLTLGQNVTVIASHSLESIVRQPPDRWMTNARMTHYQSLLLNERVSFAPPAVLNPATLLPVESEATPVHRCSEILAEETGTRRDLKDQPLPGVPAWYTDGSSFIAEGKRRAGAAIVDGKRTVWASSLPEGTSAQKAELVALTQALRLAEGKDINIYTDSRYAFATAHIHGAIYKQRGWLTSAGKDIKNKEEILALLEAIHLPKRVAIIHCPGHQKGNDPVATGNRRADEAAKQAALSTRVLAETTKPAGKRTADGSEFEKRTADGSEFESPKKKAKVE

SEQ ID NO: 884 - protein, 2089 aa, synthetic construct
MPAAKRVKLDGGDKKYSIGLDIGTNSVGWAVITDEYKVPSKKFKVLGNTDRHSIKKNLIGALLFDSGETAEATRLKRTARRRYTRRKNRICYLQEIFSNEMAKVDDSFFHRLEESFLVEEDKKHERHPIFGNIVDEVAYHEKYPTIYHLRKKLVDSTDKADLRLIYLALAHMIKFRGHFLIEGDLNPDNSDVDKLFIQLVQTYNQLFEENPINASGVDAKAILSARLSKSRRLENLIAQLPGEKKNGLFGNLIALSLGLTPNFKSNFDLAEDAKLQLSKDTYDDDLDNLLAQIGDQYADLFLAAKNLSDAILLSDILRVNTEITKAPLSASMIKRYDEHHQDLTLLKALVRQQLPEKYKEIFFDQSKNGYAGYIDGGASQEEFYKFIKPILEKMDGTEELLVKLNREDLLRKQRTFDNGSIPHQIHLGELHAILRRQEDFYPFLKDNREKIEKILTFRIPYYVGPLARGNSRFAWMTRKSEETITPWNFEEVVDKGASAQSFIERMTNFDKNLPNEKVLPKHSLLYEYFTVYNELTKVKYVTEGMRKPAFLSGEQKKAIVDLLFKTNRKVTVKQLKEDYFKKIECFDSVEISGVEDRFNASLGTYHDLLKIIKDKDFLDNEENEDILEDIVLTLTLFEDREMIEERLKTYAHLFDDKVMKQLKRRRYTGWGRLSRKLINGIRDKQSGKTILDFLKSDGFANRNFMQLIHDDSLTFKEDIQKAQVSGQGDSLHEHIANLAGSPAIKKGILQTVKVVDELVKVMGRHKPENIVIEMARENQTTQKGQKNSRERMKRIEEGIKELGSQILKEHPVENTQLQNEKLYLYYLQNGRDMYVDQELDINRLSDYDVDHIVPQSFLKDDSIDNKVLTRSDKARGKSDNVPSEEVVKKMKNYWRQLLNAKLITQRKFDNLTKAERGGLSELDKAGFIKRQLVETRQITKHVAQILDSRMNTKYDENDKLIREVKVITLKSKLVSDFRKDFQFYKVREINNYHHAHDAYLNAVVGTALIKKYPKLESEFVYGDYKVYDVRKMIAKSEQEIGKATAKYFFYSNIMNFFKTEITLANGEIRKRPLIETNGETGEIVWDKGRDFATVRKVLSMPQVNIVKKTEVQTGGFSKESILPKRNSDKLIARKKDWDPKKYGGFDSPTVAYSVLVVAKVEKGKSKKLKSVKELLGITIMERSSFEKNPIDFLEAKGYKEVKKDLIIKLPKYSLFELENGRKRMLASAGELQKGNELALPSKYVNFLYLASHYEKLKGSPEDNEQKQLFVEQHKHYLDEIIEQISEFSKRVILADANLDKVLSAYNKHRDKPIREQAENIIHLFTLTNLGAPAAFKYFDTTIDRKRYTSTKEVLDATLIHQSITGLYETRIDLSQLGGDGGGSSPAPGGVLNLEEEYRLHEKPVPSSIDPSWLQLFPTVWAERAGMGLANQVPPVVVELRSGASPVAVRQYPMSKEAREGIRPHIQRFLDLGVLVPCQSPWNTPLLPVKKPGTNDYRPVQDLREINKRVQDIHPTVPNPYNLLSSLPPSHTWYSVLDLKDAFFCLKLHPNSQPLFAFEWRDPEKGNTGQLTWTRLPQGFKNSPTLFNEALHRDLAPFRALNPQVVLLQYVDDLLVAAPTYRDCKEGTQKLLQELSKLGYRVSAKKAQLCQKEVTYLGYLLKEGKRWLTPARKATVMKIPPPTTPRQVREFLGKAGFCRLFIPGFASLAAPLYPLTKPSIPFIWTEEHQKAFDRIKEALLSAPALALPDLTKPFTLYVDERAGVARGVLTQTLGPWRRPVAYLSKKLDPVASGWPTCLKAVAAVALLLKDADKLTLGQNVTVIASHSLESIVRQPPDRWMTNARMTHYQSLLLNERVSFAPPAVLNPATLLPVESEATPVHRCSEILAEETGTRRDLKDQPLPGVPAWYTDGSSFIAEGKRRAGAAIVDGKRTVWASSLPEGTSAQKAELVALTQALRLAEGKDINIYTDSRYAFATAHIHGAIYKQRGWLTSAGKDIKNKEEILALLEAIHLPKRVAIIHCPGHQKGNDPVATGNRRADEAAKQAALSTRVLAETTKPAGKRTADGSEFEKRTADGSEFESPKKKAKVE

SEQ ID NO: 885 - protein, 2092 aa, synthetic construct
MPAAKRVKLDGGDKKYSIGLDIGTNSVGWAVITDEYKVPSKKFKVLGNTDRHSIKKNLIGALLFDSGETAEATRLKRTARRRYTRRKNRICYLQEIFSNEMAKVDDSFFHRLEESFLVEEDKKHERHPIFGNIVDEVAYHEKYPTIYHLRKKLVDSTDKADLRLIYLALAHMIKFRGHFLIEGDLNPDNSDVDKLFIQLVQTYNQLFEENPINASGVDAKAILSARLSKSRRLENLIAQLPGEKKNGLFGNLIALSLGLTPNFKSNFDLAEDAKLQLSKDTYDDDLDNLLAQIGDQYADLFLAAKNLSDAILLSDILRVNTEITKAPLSASMIKRYDEHHQDLTLLKALVRQQLPEKYKEIFFDQSKNGYAGYIDGGASQEEFYKFIKPILEKMDGTEELLVKLNREDLLRKQRTFDNGSIPHQIHLGELHAILRRQEDFYPFLKDNREKIEKILTFRIPYYVGPLARGNSRFAWMTRKSEETITPWNFEEVVDKGASAQSFIERMTNFDKNLPNEKVLPKHSLLYEYFTVYNELTKVKYVTEGMRKPAFLSGEQKKAIVDLLFKTNRKVTVKQLKEDYFKKIECFDSVEISGVEDRFNASLGTYHDLLKIIKDKDFLDNEENEDILEDIVLTLTLFEDREMIEERLKTYAHLFDDKVMKQLKRRRYTGWGRLSRKLINGIRDKQSGKTILDFLKSDGFANRNFMQLIHDDSLTFKEDIQKAQVSGQGDSLHEHIANLAGSPAIKKGILQTVKVVDELVKVMGRHKPENIVIEMARENQTTQKGQKNSRERMKRIEEGIKELGSQILKEHPVENTQLQNEKLYLYYLQNGRDMYVDQELDINRLSDYDVDHIVPQSFLKDDSIDNKVLTRSDKARGKSDNVPSEEVVKKMKNYWRQLLNAKLITQRKFDNLTKAERGGLSELDKAGFIKRQLVETRQITKHVAQILDSRMNTKYDENDKLIREVKVITLKSKLVSDFRKDFQFYKVREINNYHHAHDAYLNAVVGTALIKKYPKLESEFVYGDYKVYDVRKMIAKSEQEIGKATAKYFFYSNIMNFFKTEITLANGEIRKRPLIETNGETGEIVWDKGRDFATVRKVLSMPQVNIVKKTEVQTGGFSKESILPKRNSDKLIARKKDWDPKKYGGFDSPTVAYSVLVVAKVEKGKSKKLKSVKELLGITIMERSSFEKNPIDFLEAKGYKEVKKDLIIKLPKYSLFELENGRKRMLASAGELQKGNELALPSKYVNFLYLASHYEKLKGSPEDNEQKQLFVEQHKHYLDEIIEQISEFSKRVILADANLDKVLSAYNKHRDKPIREQAENIIHLFTLTNLGAPAAFKYFDTTIDRKRYTSTKEVLDATLIHQSITGLYETRIDLSQLGGDGGGGSGGSGGSGGVLNLEEEYRLHEKPVPSSIDPSWLQLFPTVWAERAGMGLANQVPPVVVELRSGASPVAVRQYPMSKEAREGIRPHIQRFLDLGVLVPCQSPWNTPLLPVKKPGTNDYRPVQDLREINKRVQDIHPTVPNPYNLLSSLPPSHTWYSVLDLKDAFFCLKLHPNSQPLFAFEWRDPEKGNTGQLTWTRLPQGFKNSPTLFNEALHRDLAPFRALNPQVVLLQYVDDLLVAAPTYRDCKEGTQKLLQELSKLGYRVSAKKAQLCQKEVTYLGYLLKEGKRWLTPARKATVMKIPPPTTPRQVREFLGKAGFCRLFIPGFASLAAPLYPLTKPSIPFIWTEEHQKAFDRIKEALLSAPALALPDLTKPFTLYVDERAGVARGVLTQTLGPWRRPVAYLSKKLDPVASGWPTCLKAVAAVALLLKDADKLTLGQNVTVIASHSLESIVRQPPDRWMTNARMTHYQSLLLNERVSFAPPAVLNPATLLPVESEATPVHRCSEILAEETGTRRDLKDQPLPGVPAWYTDGSSFIAEGKRRAGAAIVDGKRTVWASSLPEGTSAQKAELVALTQALRLAEGKDINIYTDSRYAFATAHIHGAIYKQRGWLTSAGKDIKNKEEILALLEAIHLPKRVAIIHCPGHQKGNDPVATGNRRADEAAKQAALSTRVLAETTKPAGKRTADGSEFEKRTADGSEFESPKKKAKVE

SEQ ID NO: 886 - protein, 2095 aa, synthetic construct
MPAAKRVKLDGGDKKYSIGLDIGTNSVGWAVITDEYKVPSKKFKVLGNTDRHSIKKNLIGALLFDSGETAEATRLKRTARRRYTRRKNRICYLQEIFSNEMAKVDDSFFHRLEESFLVEEDKKHERHPIFGNIVDEVAYHEKYPTIYHLRKKLVDSTDKADLRLIYLALAHMIKFRGHFLIEGDLNPDNSDVDKLFIQLVQTYNQLFEENPINASGVDAKAILSARLSKSRRLENLIAQLPGEKKNGLFGNLIALSLGLTPNFKSNFDLAEDAKLQLSKDTYDDDLDNLLAQIGDQYADLFLAAKNLSDAILLSDILRVNTEITKAPLSASMIKRYDEHHQDLTLLKALVRQQLPEKYKEIFFDQSKNGYAGYIDGGASQEEFYKFIKPILEKMDGTEELLVKLNREDLLRKQRTFDNGSIPHQIHLGELHAILRRQEDFYPFLKDNREKIEKILTFRIPYYVGPLARGNSRFAWMTRKSEETITPWNFEEVVDKGASAQSFIERMTNFDKNLPNEKVLPKHSLLYEYFTVYNELTKVKYVTEGMRKPAFLSGEQKKAIVDLLFKTNRKVTVKQLKEDYFKKIECFDSVEISGVEDRFNASLGTYHDLLKIIKDKDFLDNEENEDILEDIVLTLTLFEDREMIEERLKTYAHLFDDKVMKQLKRRRYTGWGRLSRKLINGIRDKQSGKTILDFLKSDGFANRNFMQLIHDDSLTFKEDIQKAQVSGQGDSLHEHIANLAGSPAIKKGILQTVKVVDELVKVMGRHKPENIVIEMARENQTTQKGQKNSRERMKRIEEGIKELGSQILKEHPVENTQLQNEKLYLYYLQNGRDMYVDQELDINRLSDYDVDHIVPQSFLKDDSIDNKVLTRSDKARGKSDNVPSEEVVKKMKNYWRQLLNAKLITQRKFDNLTKAERGGLSELDKAGFIKRQLVETRQITKHVAQILDSRMNTKYDENDKLIREVKVITLKSKLVSDFRKDFQFYKVREINNYHHAHDAYLNAVVGTALIKKYPKLESEFVYGDYKVYDVRKMIAKSEQEIGKATAKYFFYSNIMNFFKTEITLANGEIRKRPLIETNGETGEIVWDKGRDFATVRKVLSMPQVNIVKKTEVQTGGFSKESILPKRNSDKLIARKKDWDPKKYGGFDSPTVAYSVLVVAKVEKGKSKKLKSVKELLGITIMERSSFEKNPIDFLEAKGYKEVKKDLIIKLPKYSLFELENGRKRMLASAGELQKGNELALPSKYVNFLYLASHYEKLKGSPEDNEQKQLFVEQHKHYLDEIIEQISEFSKRVILADANLDKVLSAYNKHRDKPIREQAENIIHLFTLTNLGAPAAFKYFDTTIDRKRYTSTKEVLDATLIHQSITGLYETRIDLSQLGGDGGGGSGGSGGSGGSGGVLNLEEEYRLHEKPVPSSIDPSWLQLFPTVWAERAGMGLANQVPPVVVELRSGASPVAVRQYPMSKEAREGIRPHIQRFLDLGVLVPCQSPWNTPLLPVKKPGTNDYRPVQDLREINKRVQDIHPTVPNPYNLLSSLPPSHTWYSVLDLKDAFFCLKLHPNSQPLFAFEWRDPEKGNTGQLTWTRLPQGFKNSPTLFNEALHRDLAPFRALNPQVVLLQYVDDLLVAAPTYRDCKEGTQKLLQELSKLGYRVSAKKAQLCQKEVTYLGYLLKEGKRWLTPARKATVMKIPPPTTPRQVREFLGKAGFCRLFIPGFASLAAPLYPLTKPSIPFIWTEEHQKAFDRIKEALLSAPALALPDLTKPFTLYVDERAGVARGVLTQTLGPWRRPVAYLSKKLDPVASGWPTCLKAVAAVALLLKDADKLTLGQNVTVIASHSLESIVRQPPDRWMTNARMTHYQSLLLNERVSFAPPAVLNPATLLPVESEATPVHRCSEILAEETGTRRDLKDQPLPGVPAWYTDGSSFIAEGKRRAGAAIVDGKRTVWASSLPEGTSAQKAELVALTQALRLAEGKDINIYTDSRYAFATAHIHGAIYKQRGWLTSAGKDIKNKEEILALLEAIHLPKRVAIIHCPGHQKGNDPVATGNRRADEAAKQAALSTRVLAETTKPAGKRTADGSEFEKRTADGSEFESPKKKAKVE

SEQ ID NO: 887 - protein, 2095 aa, synthetic construct
MPAAKRVKLDGGDKKYSIGLDIGTNSVGWAVITDEYKVPSKKFKVLGNTDRHSIKKNLIGALLFDSGETAEATRLKRTARRRYTRRKNRICYLQEIFSNEMAKVDDSFFHRLEESFLVEEDKKHERHPIFGNIVDEVAYHEKYPTIYHLRKKLVDSTDKADLRLIYLALAHMIKFRGHFLIEGDLNPDNSDVDKLFIQLVQTYNQLFEENPINASGVDAKAILSARLSKSRRLENLIAQLPGEKKNGLFGNLIALSLGLTPNFKSNFDLAEDAKLQLSKDTYDDDLDNLLAQIGDQYADLFLAAKNLSDAILLSDILRVNTEITKAPLSASMIKRYDEHHQDLTLLKALVRQQLPEKYKEIFFDQSKNGYAGYIDGGASQEEFYKFIKPILEKMDGTEELLVKLNREDLLRKQRTFDNGSIPHQIHLGELHAILRRQEDFYPFLKDNREKIEKILTFRIPYYVGPLARGNSRFAWMTRKSEETITPWNFEEVVDKGASAQSFIERMTNFDKNLPNEKVLPKHSLLYEYFTVYNELTKVKYVTEGMRKPAFLSGEQKKAIVDLLFKTNRKVTVKQLKEDYFKKIECFDSVEISGVEDRFNASLGTYHDLLKIIKDKDFLDNEENEDILEDIVLTLTLFEDREMIEERLKTYAHLFDDKVMKQLKRRRYTGWGRLSRKLINGIRDKQSGKTILDFLKSDGFANRNFMQLIHDDSLTFKEDIQKAQVSGQGDSLHEHIANLAGSPAIKKGILQTVKVVDELVKVMGRHKPENIVIEMARENQTTQKGQKNSRERMKRIEEGIKELGSQILKEHPVENTQLQNEKLYLYYLQNGRDMYVDQELDINRLSDYDVDHIVPQSFLKDDSIDNKVLTRSDKARGKSDNVPSEEVVKKMKNYWRQLLNAKLITQRKFDNLTKAERGGLSELDKAGFIKRQLVETRQITKHVAQILDSRMNTKYDENDKLIREVKVITLKSKLVSDFRKDFQFYKVREINNYHHAHDAYLNAVVGTALIKKYPKLESEFVYGDYKVYDVRKMIAKSEQEIGKATAKYFFYSNIMNFFKTEITLANGEIRKRPLIETNGETGEIVWDKGRDFATVRKVLSMPQVNIVKKTEVQTGGFSKESILPKRNSDKLIARKKDWDPKKYGGFDSPTVAYSVLVVAKVEKGKSKKLKSVKELLGITIMERSSFEKNPIDFLEAKGYKEVKKDLIIKLPKYSLFELENGRKRMLASAGELQKGNELALPSKYVNFLYLASHYEKLKGSPEDNEQKQLFVEQHKHYLDEIIEQISEFSKRVILADANLDKVLSAYNKHRDKPIREQAENIIHLFTLTNLGAPAAFKYFDTTIDRKRYTSTKEVLDATLIHQSITGLYETRIDLSQLGGDGGGSSGSSGSSGSSGGVLNLEEEYRLHEKPVPSSIDPSWLQLFPTVWAERAGMGLANQVPPVVVELRSGASPVAVRQYPMSKEAREGIRPHIQRFLDLGVLVPCQSPWNTPLLPVKKPGTNDYRPVQDLREINKRVQDIHPTVPNPYNLLSSLPPSHTWYSVLDLKDAFFCLKLHPNSQPLFAFEWRDPEKGNTGQLTWTRLPQGFKNSPTLFNEALHRDLAPFRALNPQVVLLQYVDDLLVAAPTYRDCKEGTQKLLQELSKLGYRVSAKKAQLCQKEVTYLGYLLKEGKRWLTPARKATVMKIPPPTTPRQVREFLGKAGFCRLFIPGFASLAAPLYPLTKPSIPFIWTEEHQKAFDRIKEALLSAPALALPDLTKPFTLYVDERAGVARGVLTQTLGPWRRPVAYLSKKLDPVASGWPTCLKAVAAVALLLKDADKLTLGQNVTVIASHSLESIVRQPPDRWMTNARMTHYQSLLLNERVSFAPPAVLNPATLLPVESEATPVHRCSEILAEETGTRRDLKDQPLPGVPAWYTDGSSFIAEGKRRAGAAIVDGKRTVWASSLPEGTSAQKAELVALTQALRLAEGKDINIYTDSRYAFATAHIHGAIYKQRGWLTSAGKDIKNKEEILALLEAIHLPKRVAIIHCPGHQKGNDPVATGNRRADEAAKQAALSTRVLAETTKPAGKRTADGSEFEKRTADGSEFESPKKKAKVE

SEQ ID NO: 888 - protein, 2092 aa, synthetic construct
MPAAKRVKLDGGDKKYSIGLDIGTNSVGWAVITDEYKVPSKKFKVLGNTDRHSIKKNLIGALLFDSGETAEATRLKRTARRRYTRRKNRICYLQEIFSNEMAKVDDSFFHRLEESFLVEEDKKHERHPIFGNIVDEVAYHEKYPTIYHLRKKLVDSTDKADLRLIYLALAHMIKFRGHFLIEGDLNPDNSDVDKLFIQLVQTYNQLFEENPINASGVDAKAILSARLSKSRRLENLIAQLPGEKKNGLFGNLIALSLGLTPNFKSNFDLAEDAKLQLSKDTYDDDLDNLLAQIGDQYADLFLAAKNLSDAILLSDILRVNTEITKAPLSASMIKRYDEHHQDLTLLKALVRQQLPEKYKEIFFDQSKNGYAGYIDGGASQEEFYKFIKPILEKMDGTEELLVKLNREDLLRKQRTFDNGSIPHQIHLGELHAILRRQEDFYPFLKDNREKIEKILTFRIPYYVGPLARGNSRFAWMTRKSEETITPWNFEEVVDKGASAQSFIERMTNFDKNLPNEKVLPKHSLLYEYFTVYNELTKVKYVTEGMRKPAFLSGEQKKAIVDLLFKTNRKVTVKQLKEDYFKKIECFDSVEISGVEDRFNASLGTYHDLLKIIKDKDFLDNEENEDILEDIVLTLTLFEDREMIEERLKTYAHLFDDKVMKQLKRRRYTGWGRLSRKLINGIRDKQSGKTILDFLKSDGFANRNFMQLIHDDSLTFKEDIQKAQVSGQGDSLHEHIANLAGSPAIKKGILQTVKVVDELVKVMGRHKPENIVIEMARENQTTQKGQKNSRERMKRIEEGIKELGSQILKEHPVENTQLQNEKLYLYYLQNGRDMYVDQELDINRLSDYDVDHIVPQSFLKDDSIDNKVLTRSDKARGKSDNVPSEEVVKKMKNYWRQLLNAKLITQRKFDNLTKAERGGLSELDKAGFIKRQLVETRQITKHVAQILDSRMNTKYDENDKLIREVKVITLKSKLVSDFRKDFQFYKVREINNYHHAHDAYLNAVVGTALIKKYPKLESEFVYGDYKVYDVRKMIAKSEQEIGKATAKYFFYSNIMNFFKTEITLANGEIRKRPLIETNGETGEIVWDKGRDFATVRKVLSMPQVNIVKKTEVQTGGFSKESILPKRNSDKLIARKKDWDPKKYGGFDSPTVAYSVLVVAKVEKGKSKKLKSVKELLGITIMERSSFEKNPIDFLEAKGYKEVKKDLIIKLPKYSLFELENGRKRMLASAGELQKGNELALPSKYVNFLYLASHYEKLKGSPEDNEQKQLFVEQHKHYLDEIIEQISEFSKRVILADANLDKVLSAYNKHRDKPIREQAENIIHLFTLTNLGAPAAFKYFDTTIDRKRYTSTKEVLDATLIHQSITGLYETRIDLSQLGGDGGGGGGSSPAPGGVLNLEEEYRLHEKPVPSSIDPSWLQLFPTVWAERAGMGLANQVPPVVVELRSGASPVAVRQYPMSKEAREGIRPHIQRFLDLGVLVPCQSPWNTPLLPVKKPGTNDYRPVQDLREINKRVQDIHPTVPNPYNLLSSLPPSHTWYSVLDLKDAFFCLKLHPNSQPLFAFEWRDPEKGNTGQLTWTRLPQGFKNSPTLFNEALHRDLAPFRALNPQVVLLQYVDDLLVAAPTYRDCKEGTQKLLQELSKLGYRVSAKKAQLCQKEVTYLGYLLKEGKRWLTPARKATVMKIPPPTTPRQVREFLGKAGFCRLFIPGFASLAAPLYPLTKPSIPFIWTEEHQKAFDRIKEALLSAPALALPDLTKPFTLYVDERAGVARGVLTQTLGPWRRPVAYLSKKLDPVASGWPTCLKAVAAVALLLKDADKLTLGQNVTVIASHSLESIVRQPPDRWMTNARMTHYQSLLLNERVSFAPPAVLNPATLLPVESEATPVHRCSEILAEETGTRRDLKDQPLPGVPAWYTDGSSFIAEGKRRAGAAIVDGKRTVWASSLPEGTSAQKAELVALTQALRLAEGKDINIYTDSRYAFATAHIHGAIYKQRGWLTSAGKDIKNKEEILALLEAIHLPKRVAIIHCPGHQKGNDPVATGNRRADEAAKQAALSTRVLAETTKPAGKRTADGSEFEKRTADGSEFESPKKKAKVE

SEQ ID NO: 889 - protein, 2092 aa, synthetic construct
MPAAKRVKLDGGDKKYSIGLDIGTNSVGWAVITDEYKVPSKKFKVLGNTDRHSIKKNLIGALLFDSGETAEATRLKRTARRRYTRRKNRICYLQEIFSNEMAKVDDSFFHRLEESFLVEEDKKHERHPIFGNIVDEVAYHEKYPTIYHLRKKLVDSTDKADLRLIYLALAHMIKFRGHFLIEGDLNPDNSDVDKLFIQLVQTYNQLFEENPINASGVDAKAILSARLSKSRRLENLIAQLPGEKKNGLFGNLIALSLGLTPNFKSNFDLAEDAKLQLSKDTYDDDLDNLLAQIGDQYADLFLAAKNLSDAILLSDILRVNTEITKAPLSASMIKRYDEHHQDLTLLKALVRQQLPEKYKEIFFDQSKNGYAGYIDGGASQEEFYKFIKPILEKMDGTEELLVKLNREDLLRKQRTFDNGSIPHQIHLGELHAILRRQEDFYPFLKDNREKIEKILTFRIPYYVGPLARGNSRFAWMTRKSEETITPWNFEEVVDKGASAQSFIERMTNFDKNLPNEKVLPKHSLLYEYFTVYNELTKVKYVTEGMRKPAFLSGEQKKAIVDLLFKTNRKVTVKQLKEDYFKKIECFDSVEISGVEDRFNASLGTYHDLLKIIKDKDFLDNEENEDILEDIVLTLTLFEDREMIEERLKTYAHLFDDKVMKQLKRRRYTGWGRLSRKLINGIRDKQSGKTILDFLKSDGFANRNFMQLIHDDSLTFKEDIQKAQVSGQGDSLHEHIANLAGSPAIKKGILQTVKVVDELVKVMGRHKPENIVIEMARENQTTQKGQKNSRERMKRIEEGIKELGSQILKEHPVENTQLQNEKLYLYYLQNGRDMYVDQELDINRLSDYDVDHIVPQSFLKDDSIDNKVLTRSDKARGKSDNVPSEEVVKKMKNYWRQLLNAKLITQRKFDNLTKAERGGLSELDKAGFIKRQLVETRQITKHVAQILDSRMNTKYDENDKLIREVKVITLKSKLVSDFRKDFQFYKVREINNYHHAHDAYLNAVVGTALIKKYPKLESEFVYGDYKVYDVRKMIAKSEQEIGKATAKYFFYSNIMNFFKTEITLANGEIRKRPLIETNGETGEIVWDKGRDFATVRKVLSMPQVNIVKKTEVQTGGFSKESILPKRNSDKLIARKKDWDPKKYGGFDSPTVAYSVLVVAKVEKGKSKKLKSVKELLGITIMERSSFEKNPIDFLEAKGYKEVKKDLIIKLPKYSLFELENGRKRMLASAGELQKGNELALPSKYVNFLYLASHYEKLKGSPEDNEQKQLFVEQHKHYLDEIIEQISEFSKRVILADANLDKVLSAYNKHRDKPIREQAENIIHLFTLTNLGAPAAFKYFDTTIDRKRYTSTKEVLDATLIHQSITGLYETRIDLSQLGGDGGPAPGGSGGGGGVLNLEEEYRLHEKPVPSSIDPSWLQLFPTVWAERAGMGLANQVPPVVVELRSGASPVAVRQYPMSKEAREGIRPHIQRFLDLGVLVPCQSPWNTPLLPVKKPGTNDYRPVQDLREINKRVQDIHPTVPNPYNLLSSLPPSHTWYSVLDLKDAFFCLKLHPNSQPLFAFEWRDPEKGNTGQLTWTRLPQGFKNSPTLFNEALHRDLAPFRALNPQVVLLQYVDDLLVAAPTYRDCKEGTQKLLQELSKLGYRVSAKKAQLCQKEVTYLGYLLKEGKRWLTPARKATVMKIPPPTTPRQVREFLGKAGFCRLFIPGFASLAAPLYPLTKPSIPFIWTEEHQKAFDRIKEALLSAPALALPDLTKPFTLYVDERAGVARGVLTQTLGPWRRPVAYLSKKLDPVASGWPTCLKAVAAVALLLKDADKLTLGQNVTVIASHSLESIVRQPPDRWMTNARMTHYQSLLLNERVSFAPPAVLNPATLLPVESEATPVHRCSEILAEETGTRRDLKDQPLPGVPAWYTDGSSFIAEGKRRAGAAIVDGKRTVWASSLPEGTSAQKAELVALTQALRLAEGKDINIYTDSRYAFATAHIHGAIYKQRGWLTSAGKDIKNKEEILALLEAIHLPKRVAIIHCPGHQKGNDPVATGNRRADEAAKQAALSTRVLAETTKPAGKRTADGSEFEKRTADGSEFESPKKKAKVE

SEQ ID NO: 890 - protein, 2096 aa, synthetic construct
MPAAKRVKLDGGDKKYSIGLDIGTNSVGWAVITDEYKVPSKKFKVLGNTDRHSIKKNLIGALLFDSGETAEATRLKRTARRRYTRRKNRICYLQEIFSNEMAKVDDSFFHRLEESFLVEEDKKHERHPIFGNIVDEVAYHEKYPTIYHLRKKLVDSTDKADLRLIYLALAHMIKFRGHFLIEGDLNPDNSDVDKLFIQLVQTYNQLFEENPINASGVDAKAILSARLSKSRRLENLIAQLPGEKKNGLFGNLIALSLGLTPNFKSNFDLAEDAKLQLSKDTYDDDLDNLLAQIGDQYADLFLAAKNLSDAILLSDILRVNTEITKAPLSASMIKRYDEHHQDLTLLKALVRQQLPEKYKEIFFDQSKNGYAGYIDGGASQEEFYKFIKPILEKMDGTEELLVKLNREDLLRKQRTFDNGSIPHQIHLGELHAILRRQEDFYPFLKDNREKIEKILTFRIPYYVGPLARGNSRFAWMTRKSEETITPWNFEEVVDKGASAQSFIERMTNFDKNLPNEKVLPKHSLLYEYFTVYNELTKVKYVTEGMRKPAFLSGEQKKAIVDLLFKTNRKVTVKQLKEDYFKKIECFDSVEISGVEDRFNASLGTYHDLLKIIKDKDFLDNEENEDILEDIVLTLTLFEDREMIEERLKTYAHLFDDKVMKQLKRRRYTGWGRLSRKLINGIRDKQSGKTILDFLKSDGFANRNFMQLIHDDSLTFKEDIQKAQVSGQGDSLHEHIANLAGSPAIKKGILQTVKVVDELVKVMGRHKPENIVIEMARENQTTQKGQKNSRERMKRIEEGIKELGSQILKEHPVENTQLQNEKLYLYYLQNGRDMYVDQELDINRLSDYDVDHIVPQSFLKDDSIDNKVLTRSDKARGKSDNVPSEEVVKKMKNYWRQLLNAKLITQRKFDNLTKAERGGLSELDKAGFIKRQLVETRQITKHVAQILDSRMNTKYDENDKLIREVKVITLKSKLVSDFRKDFQFYKVREINNYHHAHDAYLNAVVGTALIKKYPKLESEFVYGDYKVYDVRKMIAKSEQEIGKATAKYFFYSNIMNFFKTEITLANGEIRKRPLIETNGETGEIVWDKGRDFATVRKVLSMPQVNIVKKTEVQTGGFSKESILPKRNSDKLIARKKDWDPKKYGGFDSPTVAYSVLVVAKVEKGKSKKLKSVKELLGITIMERSSFEKNPIDFLEAKGYKEVKKDLIIKLPKYSLFELENGRKRMLASAGELQKGNELALPSKYVNFLYLASHYEKLKGSPEDNEQKQLFVEQHKHYLDEIIEQISEFSKRVILADANLDKVLSAYNKHRDKPIREQAENIIHLFTLTNLGAPAAFKYFDTTIDRKRYTSTKEVLDATLIHQSITGLYETRIDLSQLGGDGGPAPAPAPAPAPAPGGVLNLEEEYRLHEKPVPSSIDPSWLQLFPTVWAERAGMGLANQVPPVVVELRSGASPVAVRQYPMSKEAREGIRPHIQRFLDLGVLVPCQSPWNTPLLPVKKPGTNDYRPVQDLREINKRVQDIHPTVPNPYNLLSSLPPSHTWYSVLDLKDAFFCLKLHPNSQPLFAFEWRDPEKGNTGQLTWTRLPQGFKNSPTLFNEALHRDLAPFRALNPQVVLLQYVDDLLVAAPTYRDCKEGTQKLLQELSKLGYRVSAKKAQLCQKEVTYLGYLLKEGKRWLTPARKATVMKIPPPTTPRQVREFLGKAGFCRLFIPGFASLAAPLYPLTKPSIPFIWTEEHQKAFDRIKEALLSAPALALPDLTKPFTLYVDERAGVARGVLTQTLGPWRRPVAYLSKKLDPVASGWPTCLKAVAAVALLLKDADKLTLGQNVTVIASHSLESIVRQPPDRWMTNARMTHYQSLLLNERVSFAPPAVLNPATLLPVESEATPVHRCSEILAEETGTRRDLKDQPLPGVPAWYTDGSSFIAEGKRRAGAAIVDGKRTVWASSLPEGTSAQKAELVALTQALRLAEGKDINIYTDSRYAFATAHIHGAIYKQRGWLTSAGKDIKNKEEILALLEAIHLPKRVAIIHCPGHQKGNDPVATGNRRADEAAKQAALSTRVLAETTKPAGKRTADGSEFEKRTADGSEFESPKKKAKVE

SEQ ID NO: 891 - protein, 2094 aa, synthetic construct
MPAAKRVKLDGGDKKYSIGLDIGTNSVGWAVITDEYKVPSKKFKVLGNTDRHSIKKNLIGALLFDSGETAEATRLKRTARRRYTRRKNRICYLQEIFSNEMAKVDDSFFHRLEESFLVEEDKKHERHPIFGNIVDEVAYHEKYPTIYHLRKKLVDSTDKADLRLIYLALAHMIKFRGHFLIEGDLNPDNSDVDKLFIQLVQTYNQLFEENPINASGVDAKAILSARLSKSRRLENLIAQLPGEKKNGLFGNLIALSLGLTPNFKSNFDLAEDAKLQLSKDTYDDDLDNLLAQIGDQYADLFLAAKNLSDAILLSDILRVNTEITKAPLSASMIKRYDEHHQDLTLLKALVRQQLPEKYKEIFFDQSKNGYAGYIDGGASQEEFYKFIKPILEKMDGTEELLVKLNREDLLRKQRTFDNGSIPHQIHLGELHAILRRQEDFYPFLKDNREKIEKILTFRIPYYVGPLARGNSRFAWMTRKSEETITPWNFEEVVDKGASAQSFIERMTNFDKNLPNEKVLPKHSLLYEYFTVYNELTKVKYVTEGMRKPAFLSGEQKKAIVDLLFKTNRKVTVKQLKEDYFKKIECFDSVEISGVEDRFNASLGTYHDLLKIIKDKDFLDNEENEDILEDIVLTLTLFEDREMIEERLKTYAHLFDDKVMKQLKRRRYTGWGRLSRKLINGIRDKQSGKTILDFLKSDGFANRNFMQLIHDDSLTFKEDIQKAQVSGQGDSLHEHIANLAGSPAIKKGILQTVKVVDELVKVMGRHKPENIVIEMARENQTTQKGQKNSRERMKRIEEGIKELGSQILKEHPVENTQLQNEKLYLYYLQNGRDMYVDQELDINRLSDYDVDHIVPQSFLKDDSIDNKVLTRSDKARGKSDNVPSEEVVKKMKNYWRQLLNAKLITQRKFDNLTKAERGGLSELDKAGFIKRQLVETRQITKHVAQILDSRMNTKYDENDKLIREVKVITLKSKLVSDFRKDFQFYKVREINNYHHAHDAYLNAVVGTALIKKYPKLESEFVYGDYKVYDVRKMIAKSEQEIGKATAKYFFYSNIMNFFKTEITLANGEIRKRPLIETNGETGEIVWDKGRDFATVRKVLSMPQVNIVKKTEVQTGGFSKESILPKRNSDKLIARKKDWDPKKYGGFDSPTVAYSVLVVAKVEKGKSKKLKSVKELLGITIMERSSFEKNPIDFLEAKGYKEVKKDLIIKLPKYSLFELENGRKRMLASAGELQKGNELALPSKYVNFLYLASHYEKLKGSPEDNEQKQLFVEQHKHYLDEIIEQISEFSKRVILADANLDKVLSAYNKHRDKPIREQAENIIHLFTLTNLGAPAAFKYFDTTIDRKRYTSTKEVLDATLIHQSITGLYETRIDLSQLGGDGGEAAAKGSSGGGGGVLNLEEEYRLHEKPVPSSIDPSWLQLFPTVWAERAGMGLANQVPPVVVELRSGASPVAVRQYPMSKEAREGIRPHIQRFLDLGVLVPCQSPWNTPLLPVKKPGTNDYRPVQDLREINKRVQDIHPTVPNPYNLLSSLPPSHTWYSVLDLKDAFFCLKLHPNSQPLFAFEWRDPEKGNTGQLTWTRLPQGFKNSPTLFNEALHRDLAPFRALNPQVVLLQYVDDLLVAAPTYRDCKEGTQKLLQELSKLGYRVSAKKAQLCQKEVTYLGYLLKEGKRWLTPARKATVMKIPPPTTPRQVREFLGKAGFCRLFIPGFASLAAPLYPLTKPSIPFIWTEEHQKAFDRIKEALLSAPALALPDLTKPFTLYVDERAGVARGVLTQTLGPWRRPVAYLSKKLDPVASGWPTCLKAVAAVALLLKDADKLTLGQNVTVIASHSLESIVRQPPDRWMTNARMTHYQSLLLNERVSFAPPAVLNPATLLPVESEATPVHRCSEILAEETGTRRDLKDQPLPGVPAWYTDGSSFIAEGKRRAGAAIVDGKRTVWASSLPEGTSAQKAELVALTQALRLAEGKDINIYTDSRYAFATAHIHGAIYKQRGWLTSAGKDIKNKEEILALLEAIHLPKRVAIIHCPGHQKGNDPVATGNRRADEAAKQAALSTRVLAETTKPAGKRTADGSEFEKRTADGSEFESPKKKAKVE

SEQ ID NO: 892 - protein, 2094 aa, synthetic construct
MPAAKRVKLDGGDKKYSIGLDIGTNSVGWAVITDEYKVPSKKFKVLGNTDRHSIKKNLIGALLFDSGETAEATRLKRTARRRYTRRKNRICYLQEIFSNEMAKVDDSFFHRLEESFLVEEDKKHERHPIFGNIVDEVAYHEKYPTIYHLRKKLVDSTDKADLRLIYLALAHMIKFRGHFLIEGDLNPDNSDVDKLFIQLVQTYNQLFEENPINASGVDAKAILSARLSKSRRLENLIAQLPGEKKNGLFGNLIALSLGLTPNFKSNFDLAEDAKLQLSKDTYDDDLDNLLAQIGDQYADLFLAAKNLSDAILLSDILRVNTEITKAPLSASMIKRYDEHHQDLTLLKALVRQQLPEKYKEIFFDQSKNGYAGYIDGGASQEEFYKFIKPILEKMDGTEELLVKLNREDLLRKQRTFDNGSIPHQIHLGELHAILRRQEDFYPFLKDNREKIEKILTFRIPYYVGPLARGNSRFAWMTRKSEETITPWNFEEVVDKGASAQSFIERMTNFDKNLPNEKVLPKHSLLYEYFTVYNELTKVKYVTEGMRKPAFLSGEQKKAIVDLLFKTNRKVTVKQLKEDYFKKIECFDSVEISGVEDRFNASLGTYHDLLKIIKDKDFLDNEENEDILEDIVLTLTLFEDREMIEERLKTYAHLFDDKVMKQLKRRRYTGWGRLSRKLINGIRDKQSGKTILDFLKSDGFANRNFMQLIHDDSLTFKEDIQKAQVSGQGDSLHEHIANLAGSPAIKKGILQTVKVVDELVKVMGRHKPENIVIEMARENQTTQKGQKNSRERMKRIEEGIKELGSQILKEHPVENTQLQNEKLYLYYLQNGRDMYVDQELDINRLSDYDVDHIVPQSFLKDDSIDNKVLTRSDKARGKSDNVPSEEVVKKMKNYWRQLLNAKLITQRKFDNLTKAERGGLSELDKAGFIKRQLVETRQITKHVAQILDSRMNTKYDENDKLIREVKVITLKSKLVSDFRKDFQFYKVREINNYHHAHDAYLNAVVGTALIKKYPKLESEFVYGDYKVYDVRKMIAKSEQEIGKATAKYFFYSNIMNFFKTEITLANGEIRKRPLIETNGETGEIVWDKGRDFATVRKVLSMPQVNIVKKTEVQTGGFSKESILPKRNSDKLIARKKDWDPKKYGGFDSPTVAYSVLVVAKVEKGKSKKLKSVKELLGITIMERSSFEKNPIDFLEAKGYKEVKKDLIIKLPKYSLFELENGRKRMLASAGELQKGNELALPSKYVNFLYLASHYEKLKGSPEDNEQKQLFVEQHKHYLDEIIEQISEFSKRVILADANLDKVLSAYNKHRDKPIREQAENIIHLFTLTNLGAPAAFKYFDTTIDRKRYTSTKEVLDATLIHQSITGLYETRIDLSQLGGDGGPAPEAAAKGSSGGVLNLEEEYRLHEKPVPSSIDPSWLQLFPTVWAERAGMGLANQVPPVVVELRSGASPVAVRQYPMSKEAREGIRPHIQRFLDLGVLVPCQSPWNTPLLPVKKPGTNDYRPVQDLREINKRVQDIHPTVPNPYNLLSSLPPSHTWYSVLDLKDAFFCLKLHPNSQPLFAFEWRDPEKGNTGQLTWTRLPQGFKNSPTLFNEALHRDLAPFRALNPQVVLLQYVDDLLVAAPTYRDCKEGTQKLLQELSKLGYRVSAKKAQLCQKEVTYLGYLLKEGKRWLTPARKATVMKIPPPTTPRQVREFLGKAGFCRLFIPGFASLAAPLYPLTKPSIPFIWTEEHQKAFDRIKEALLSAPALALPDLTKPFTLYVDERAGVARGVLTQTLGPWRRPVAYLSKKLDPVASGWPTCLKAVAAVALLLKDADKLTLGQNVTVIASHSLESIVRQPPDRWMTNARMTHYQSLLLNERVSFAPPAVLNPATLLPVESEATPVHRCSEILAEETGTRRDLKDQPLPGVPAWYTDGSSFIAEGKRRAGAAIVDGKRTVWASSLPEGTSAQKAELVALTQALRLAEGKDINIYTDSRYAFATAHIHGAIYKQRGWLTSAGKDIKNKEEILALLEAIHLPKRVAIIHCPGHQKGNDPVATGNRRADEAAKQAALSTRVLAETTKPAGKRTADGSEFEKRTADGSEFESPKKKAKVE

SEQ ID NO: 893 - protein, 2113 aa, synthetic construct
MPAAKRVKLDGGDKKYSIGLDIGTNSVGWAVITDEYKVPSKKFKVLGNTDRHSIKKNLIGALLFDSGETAEATRLKRTARRRYTRRKNRICYLQEIFSNEMAKVDDSFFHRLEESFLVEEDKKHERHPIFGNIVDEVAYHEKYPTIYHLRKKLVDSTDKADLRLIYLALAHMIKFRGHFLIEGDLNPDNSDVDKLFIQLVQTYNQLFEENPINASGVDAKAILSARLSKSRRLENLIAQLPGEKKNGLFGNLIALSLGLTPNFKSNFDLAEDAKLQLSKDTYDDDLDNLLAQIGDQYADLFLAAKNLSDAILLSDILRVNTEITKAPLSASMIKRYDEHHQDLTLLKALVRQQLPEKYKEIFFDQSKNGYAGYIDGGASQEEFYKFIKPILEKMDGTEELLVKLNREDLLRKQRTFDNGSIPHQIHLGELHAILRRQEDFYPFLKDNREKIEKILTFRIPYYVGPLARGNSRFAWMTRKSEETITPWNFEEVVDKGASAQSFIERMTNFDKNLPNEKVLPKHSLLYEYFTVYNELTKVKYVTEGMRKPAFLSGEQKKAIVDLLFKTNRKVTVKQLKEDYFKKIECFDSVEISGVEDRFNASLGTYHDLLKIIKDKDFLDNEENEDILEDIVLTLTLFEDREMIEERLKTYAHLFDDKVMKQLKRRRYTGWGRLSRKLINGIRDKQSGKTILDFLKSDGFANRNFMQLIHDDSLTFKEDIQKAQVSGQGDSLHEHIANLAGSPAIKKGILQTVKVVDELVKVMGRHKPENIVIEMARENQTTQKGQKNSRERMKRIEEGIKELGSQILKEHPVENTQLQNEKLYLYYLQNGRDMYVDQELDINRLSDYDVDHIVPQSFLKDDSIDNKVLTRSDKARGKSDNVPSEEVVKKMKNYWRQLLNAKLITQRKFDNLTKAERGGLSELDKAGFIKRQLVETRQITKHVAQILDSRMNTKYDENDKLIREVKVITLKSKLVSDFRKDFQFYKVREINNYHHAHDAYLNAVVGTALIKKYPKLESEFVYGDYKVYDVRKMIAKSEQEIGKATAKYFFYSNIMNFFKTEITLANGEIRKRPLIETNGETGEIVWDKGRDFATVRKVLSMPQVNIVKKTEVQTGGFSKESILPKRNSDKLIARKKDWDPKKYGGFDSPTVAYSVLVVAKVEKGKSKKLKSVKELLGITIMERSSFEKNPIDFLEAKGYKEVKKDLIIKLPKYSLFELENGRKRMLASAGELQKGNELALPSKYVNFLYLASHYEKLKGSPEDNEQKQLFVEQHKHYLDEIIEQISEFSKRVILADANLDKVLSAYNKHRDKPIREQAENIIHLFTLTNLGAPAAFKYFDTTIDRKRYTSTKEVLDATLIHQSITGLYETRIDLSQLGGDGGEAAAKEAAAKEAAAKEAAAKEAAAKEAAAKGGVLNLEEEYRLHEKPVPSSIDPSWLQLFPTVWAERAGMGLANQVPPVVVELRSGASPVAVRQYPMSKEAREGIRPHIQRFLDLGVLVPCQSPWNTPLLPVKKPGTNDYRPVQDLREINKRVQDIHPTVPNPYNLLSSLPPSHTWYSVLDLKDAFFCLKLHPNSQPLFAFEWRDPEKGNTGQLTWTRLPQGFKNSPTLFNEALHRDLAPFRALNPQVVLLQYVDDLLVAAPTYRDCKEGTQKLLQELSKLGYRVSAKKAQLCQKEVTYLGYLLKEGKRWLTPARKATVMKIPPPTTPRQVREFLGKAGFCRLFIPGFASLAAPLYPLTKPSIPFIWTEEHQKAFDRIKEALLSAPALALPDLTKPFTLYVDERAGVARGVLTQTLGPWRRPVAYLSKKLDPVASGWPTCLKAVAAVALLLKDADKLTLGQNVTVIASHSLESIVRQPPDRWMTNARMTHYQSLLLNERVSFAPPAVLNPATLLPVESEATPVHRCSEILAEETGTRRDLKDQPLPGVPAWYTDGSSFIAEGKRRAGAAIVDGKRTVWASSLPEGTSAQKAELVALTQALRLAEGKDINIYTDSRYAFATAHIHGAIYKQRGWLTSAGKDIKNKEEILALLEAIHLPKRVAIIHCPGHQKGNDPVATGNRRADEAAKQAALSTRVLAETTKPAGKRTADGSEFEKRTADGSEFESPKKKAKVE

SEQ ID NO: 894 - protein, 2088 aa, synthetic construct
MPAAKRVKLDGGDKKYSIGLDIGTNSVGWAVITDEYKVPSKKFKVLGNTDRHSIKKNLIGALLFDSGETAEATRLKRTARRRYTRRKNRICYLQEIFSNEMAKVDDSFFHRLEESFLVEEDKKHERHPIFGNIVDEVAYHEKYPTIYHLRKKLVDSTDKADLRLIYLALAHMIKFRGHFLIEGDLNPDNSDVDKLFIQLVQTYNQLFEENPINASGVDAKAILSARLSKSRRLENLIAQLPGEKKNGLFGNLIALSLGLTPNFKSNFDLAEDAKLQLSKDTYDDDLDNLLAQIGDQYADLFLAAKNLSDAILLSDILRVNTEITKAPLSASMIKRYDEHHQDLTLLKALVRQQLPEKYKEIFFDQSKNGYAGYIDGGASQEEFYKFIKPILEKMDGTEELLVKLNREDLLRKQRTFDNGSIPHQIHLGELHAILRRQEDFYPFLKDNREKIEKILTFRIPYYVGPLARGNSRFAWMTRKSEETITPWNFEEVVDKGASAQSFIERMTNFDKNLPNEKVLPKHSLLYEYFTVYNELTKVKYVTEGMRKPAFLSGEQKKAIVDLLFKTNRKVTVKQLKEDYFKKIECFDSVEISGVEDRFNASLGTYHDLLKIIKDKDFLDNEENEDILEDIVLTLTLFEDREMIEERLKTYAHLFDDKVMKQLKRRRYTGWGRLSRKLINGIRDKQSGKTILDFLKSDGFANRNFMQLIHDDSLTFKEDIQKAQVSGQGDSLHEHIANLAGSPAIKKGILQTVKVVDELVKVMGRHKPENIVIEMARENQTTQKGQKNSRERMKRIEEGIKELGSQILKEHPVENTQLQNEKLYLYYLQNGRDMYVDQELDINRLSDYDVDHIVPQSFLKDDSIDNKVLTRSDKARGKSDNVPSEEVVKKMKNYWRQLLNAKLITQRKFDNLTKAERGGLSELDKAGFIKRQLVETRQITKHVAQILDSRMNTKYDENDKLIREVKVITLKSKLVSDFRKDFQFYKVREINNYHHAHDAYLNAVVGTALIKKYPKLESEFVYGDYKVYDVRKMIAKSEQEIGKATAKYFFYSNIMNFFKTEITLANGEIRKRPLIETNGETGEIVWDKGRDFATVRKVLSMPQVNIVKKTEVQTGGFSKESILPKRNSDKLIARKKDWDPKKYGGFDSPTVAYSVLVVAKVEKGKSKKLKSVKELLGITIMERSSFEKNPIDFLEAKGYKEVKKDLIIKLPKYSLFELENGRKRMLASAGELQKGNELALPSKYVNFLYLASHYEKLKGSPEDNEQKQLFVEQHKHYLDEIIEQISEFSKRVILADANLDKVLSAYNKHRDKPIREQAENIIHLFTLTNLGAPAAFKYFDTTIDRKRYTSTKEVLDATLIHQSITGLYETRIDLSQLGGDGGEAAAKGGVLNLEEEYRLHEKPVPSSIDPSWLQLFPTVWAERAGMGLANQVPPVVVELRSGASPVAVRQYPMSKEAREGIRPHIQRFLDLGVLVPCQSPWNTPLLPVKKPGTNDYRPVQDLREINKRVQDIHPTVPNPYNLLSSLPPSHTWYSVLDLKDAFFCLKLHPNSQPLFAFEWRDPEKGNTGQLTWTRLPQGFKNSPTLFNEALHRDLAPFRALNPQVVLLQYVDDLLVAAPTYRDCKEGTQKLLQELSKLGYRVSAKKAQLCQKEVTYLGYLLKEGKRWLTPARKATVMKIPPPTTPRQVREFLGKAGFCRLFIPGFASLAAPLYPLTKPSIPFIWTEEHQKAFDRIKEALLSAPALALPDLTKPFTLYVDERAGVARGVLTQTLGPWRRPVAYLSKKLDPVASGWPTCLKAVAAVALLLKDADKLTLGQNVTVIASHSLESIVRQPPDRWMTNARMTHYQSLLLNERVSFAPPAVLNPATLLPVESEATPVHRCSEILAEETGTRRDLKDQPLPGVPAWYTDGSSFIAEGKRRAGAAIVDGKRTVWASSLPEGTSAQKAELVALTQALRLAEGKDINIYTDSRYAFATAHIHGAIYKQRGWLTSAGKDIKNKEEILALLEAIHLPKRVAIIHCPGHQKGNDPVATGNRRADEAAKQAALSTRVLAETTKPAGKRTADGSEFEKRTADGSEFESPKKKAKVE

SEQ ID NO: 895 - protein, 2088 aa, synthetic construct
MPAAKRVKLDGGDKKYSIGLDIGTNSVGWAVITDEYKVPSKKFKVLGNTDRHSIKKNLIGALLFDSGETAEATRLKRTARRRYTRRKNRICYLQEIFSNEMAKVDDSFFHRLEESFLVEEDKKHERHPIFGNIVDEVAYHEKYPTIYHLRKKLVDSTDKADLRLIYLALAHMIKFRGHFLIEGDLNPDNSDVDKLFIQLVQTYNQLFEENPINASGVDAKAILSARLSKSRRLENLIAQLPGEKKNGLFGNLIALSLGLTPNFKSNFDLAEDAKLQLSKDTYDDDLDNLLAQIGDQYADLFLAAKNLSDAILLSDILRVNTEITKAPLSASMIKRYDEHHQDLTLLKALVRQQLPEKYKEIFFDQSKNGYAGYIDGGASQEEFYKFIKPILEKMDGTEELLVKLNREDLLRKQRTFDNGSIPHQIHLGELHAILRRQEDFYPFLKDNREKIEKILTFRIPYYVGPLARGNSRFAWMTRKSEETITPWNFEEVVDKGASAQSFIERMTNFDKNLPNEKVLPKHSLLYEYFTVYNELTKVKYVTEGMRKPAFLSGEQKKAIVDLLFKTNRKVTVKQLKEDYFKKIECFDSVEISGVEDRFNASLGTYHDLLKIIKDKDFLDNEENEDILEDIVLTLTLFEDREMIEERLKTYAHLFDDKVMKQLKRRRYTGWGRLSRKLINGIRDKQSGKTILDFLKSDGFANRNFMQLIHDDSLTFKEDIQKAQVSGQGDSLHEHIANLAGSPAIKKGILQTVKVVDELVKVMGRHKPENIVIEMARENQTTQKGQKNSRERMKRIEEGIKELGSQILKEHPVENTQLQNEKLYLYYLQNGRDMYVDQELDINRLSDYDVDHIVPQSFLKDDSIDNKVLTRSDKARGKSDNVPSEEVVKKMKNYWRQLLNAKLITQRKFDNLTKAERGGLSELDKAGFIKRQLVETRQITKHVAQILDSRMNTKYDENDKLIREVKVITLKSKLVSDFRKDFQFYKVREINNYHHAHDAYLNAVVGTALIKKYPKLESEFVYGDYKVYDVRKMIAKSEQEIGKATAKYFFYSNIMNFFKTEITLANGEIRKRPLIETNGETGEIVWDKGRDFATVRKVLSMPQVNIVKKTEVQTGGFSKESILPKRNSDKLIARKKDWDPKKYGGFDSPTVAYSVLVVAKVEKGKSKKLKSVKELLGITIMERSSFEKNPIDFLEAKGYKEVKKDLIIKLPKYSLFELENGRKRMLASAGELQKGNELALPSKYVNFLYLASHYEKLKGSPEDNEQKQLFVEQHKHYLDEIIEQISEFSKRVILADANLDKVLSAYNKHRDKPIREQAENIIHLFTLTNLGAPAAFKYFDTTIDRKRYTSTKEVLDATLIHQSITGLYETRIDLSQLGGDGGGGGGGGGVLNLEEEYRLHEKPVPSSIDPSWLQLFPTVWAERAGMGLANQVPPVVVELRSGASPVAVRQYPMSKEAREGIRPHIQRFLDLGVLVPCQSPWNTPLLPVKKPGTNDYRPVQDLREINKRVQDIHPTVPNPYNLLSSLPPSHTWYSVLDLKDAFFCLKLHPNSQPLFAFEWRDPEKGNTGQLTWTRLPQGFKNSPTLFNEALHRDLAPFRALNPQVVLLQYVDDLLVAAPTYRDCKEGTQKLLQELSKLGYRVSAKKAQLCQKEVTYLGYLLKEGKRWLTPARKATVMKIPPPTTPRQVREFLGKAGFCRLFIPGFASLAAPLYPLTKPSIPFIWTEEHQKAFDRIKEALLSAPALALPDLTKPFTLYVDERAGVARGVLTQTLGPWRRPVAYLSKKLDPVASGWPTCLKAVAAVALLLKDADKLTLGQNVTVIASHSLESIVRQPPDRWMTNARMTHYQSLLLNERVSFAPPAVLNPATLLPVESEATPVHRCSEILAEETGTRRDLKDQPLPGVPAWYTDGSSFIAEGKRRAGAAIVDGKRTVWASSLPEGTSAQKAELVALTQALRLAEGKDINIYTDSRYAFATAHIHGAIYKQRGWLTSAGKDIKNKEEILALLEAIHLPKRVAIIHCPGHQKGNDPVATGNRRADEAAKQAALSTRVLAETTKPAGKRTADGSEFEKRTADGSEFESPKKKAKVE

SEQ ID NO: 896 - protein, 2094 aa, synthetic construct
MPAAKRVKLDGGDKKYSIGLDIGTNSVGWAVITDEYKVPSKKFKVLGNTDRHSIKKNLIGALLFDSGETAEATRLKRTARRRYTRRKNRICYLQEIFSNEMAKVDDSFFHRLEESFLVEEDKKHERHPIFGNIVDEVAYHEKYPTIYHLRKKLVDSTDKADLRLIYLALAHMIKFRGHFLIEGDLNPDNSDVDKLFIQLVQTYNQLFEENPINASGVDAKAILSARLSKSRRLENLIAQLPGEKKNGLFGNLIALSLGLTPNFKSNFDLAEDAKLQLSKDTYDDDLDNLLAQIGDQYADLFLAAKNLSDAILLSDILRVNTEITKAPLSASMIKRYDEHHQDLTLLKALVRQQLPEKYKEIFFDQSKNGYAGYIDGGASQEEFYKFIKPILEKMDGTEELLVKLNREDLLRKQRTFDNGSIPHQIHLGELHAILRRQEDFYPFLKDNREKIEKILTFRIPYYVGPLARGNSRFAWMTRKSEETITPWNFEEVVDKGASAQSFIERMTNFDKNLPNEKVLPKHSLLYEYFTVYNELTKVKYVTEGMRKPAFLSGEQKKAIVDLLFKTNRKVTVKQLKEDYFKKIECFDSVEISGVEDRFNASLGTYHDLLKIIKDKDFLDNEENEDILEDIVLTLTLFEDREMIEERLKTYAHLFDDKVMKQLKRRRYTGWGRLSRKLINGIRDKQSGKTILDFLKSDGFANRNFMQLIHDDSLTFKEDIQKAQVSGQGDSLHEHIANLAGSPAIKKGILQTVKVVDELVKVMGRHKPENIVIEMARENQTTQKGQKNSRERMKRIEEGIKELGSQILKEHPVENTQLQNEKLYLYYLQNGRDMYVDQELDINRLSDYDVDHIVPQSFLKDDSIDNKVLTRSDKARGKSDNVPSEEVVKKMKNYWRQLLNAKLITQRKFDNLTKAERGGLSELDKAGFIKRQLVETRQITKHVAQILDSRMNTKYDENDKLIREVKVITLKSKLVSDFRKDFQFYKVREINNYHHAHDAYLNAVVGTALIKKYPKLESEFVYGDYKVYDVRKMIAKSEQEIGKATAKYFFYSNIMNFFKTEITLANGEIRKRPLIETNGETGEIVWDKGRDFATVRKVLSMPQVNIVKKTEVQTGGFSKESILPKRNSDKLIARKKDWDPKKYGGFDSPTVAYSVLVVAKVEKGKSKKLKSVKELLGITIMERSSFEKNPIDFLEAKGYKEVKKDLIIKLPKYSLFELENGRKRMLASAGELQKGNELALPSKYVNFLYLASHYEKLKGSPEDNEQKQLFVEQHKHYLDEIIEQISEFSKRVILADANLDKVLSAYNKHRDKPIREQAENIIHLFTLTNLGAPAAFKYFDTTIDRKRYTSTKEVLDATLIHQSITGLYETRIDLSQLGGDGGPAPEAAAKGGGGGVLNLEEEYRLHEKPVPSSIDPSWLQLFPTVWAERAGMGLANQVPPVVVELRSGASPVAVRQYPMSKEAREGIRPHIQRFLDLGVLVPCQSPWNTPLLPVKKPGTNDYRPVQDLREINKRVQDIHPTVPNPYNLLSSLPPSHTWYSVLDLKDAFFCLKLHPNSQPLFAFEWRDPEKGNTGQLTWTRLPQGFKNSPTLFNEALHRDLAPFRALNPQVVLLQYVDDLLVAAPTYRDCKEGTQKLLQELSKLGYRVSAKKAQLCQKEVTYLGYLLKEGKRWLTPARKATVMKIPPPTTPRQVREFLGKAGFCRLFIPGFASLAAPLYPLTKPSIPFIWTEEHQKAFDRIKEALLSAPALALPDLTKPFTLYVDERAGVARGVLTQTLGPWRRPVAYLSKKLDPVASGWPTCLKAVAAVALLLKDADKLTLGQNVTVIASHSLESIVRQPPDRWMTNARMTHYQSLLLNERVSFAPPAVLNPATLLPVESEATPVHRCSEILAEETGTRRDLKDQPLPGVPAWYTDGSSFIAEGKRRAGAAIVDGKRTVWASSLPEGTSAQKAELVALTQALRLAEGKDINIYTDSRYAFATAHIHGAIYKQRGWLTSAGKDIKNKEEILALLEAIHLPKRVAIIHCPGHQKGNDPVATGNRRADEAAKQAALSTRVLAETTKPAGKRTADGSEFEKRTADGSEFESPKKKAKVE

SEQ ID NO: 897 - protein, 2091 aa, synthetic construct
MPAAKRVKLDGGDKKYSIGLDIGTNSVGWAVITDEYKVPSKKFKVLGNTDRHSIKKNLIGALLFDSGETAEATRLKRTARRRYTRRKNRICYLQEIFSNEMAKVDDSFFHRLEESFLVEEDKKHERHPIFGNIVDEVAYHEKYPTIYHLRKKLVDSTDKADLRLIYLALAHMIKFRGHFLIEGDLNPDNSDVDKLFIQLVQTYNQLFEENPINASGVDAKAILSARLSKSRRLENLIAQLPGEKKNGLFGNLIALSLGLTPNFKSNFDLAEDAKLQLSKDTYDDDLDNLLAQIGDQYADLFLAAKNLSDAILLSDILRVNTEITKAPLSASMIKRYDEHHQDLTLLKALVRQQLPEKYKEIFFDQSKNGYAGYIDGGASQEEFYKFIKPILEKMDGTEELLVKLNREDLLRKQRTFDNGSIPHQIHLGELHAILRRQEDFYPFLKDNREKIEKILTFRIPYYVGPLARGNSRFAWMTRKSEETITPWNFEEVVDKGASAQSFIERMTNFDKNLPNEKVLPKHSLLYEYFTVYNELTKVKYVTEGMRKPAFLSGEQKKAIVDLLFKTNRKVTVKQLKEDYFKKIECFDSVEISGVEDRFNASLGTYHDLLKIIKDKDFLDNEENEDILEDIVLTLTLFEDREMIEERLKTYAHLFDDKVMKQLKRRRYTGWGRLSRKLINGIRDKQSGKTILDFLKSDGFANRNFMQLIHDDSLTFKEDIQKAQVSGQGDSLHEHIANLAGSPAIKKGILQTVKVVDELVKVMGRHKPENIVIEMARENQTTQKGQKNSRERMKRIEEGIKELGSQILKEHPVENTQLQNEKLYLYYLQNGRDMYVDQELDINRLSDYDVDHIVPQSFLKDDSIDNKVLTRSDKARGKSDNVPSEEVVKKMKNYWRQLLNAKLITQRKFDNLTKAERGGLSELDKAGFIKRQLVETRQITKHVAQILDSRMNTKYDENDKLIREVKVITLKSKLVSDFRKDFQFYKVREINNYHHAHDAYLNAVVGTALIKKYPKLESEFVYGDYKVYDVRKMIAKSEQEIGKATAKYFFYSNIMNFFKTEITLANGEIRKRPLIETNGETGEIVWDKGRDFATVRKVLSMPQVNIVKKTEVQTGGFSKESILPKRNSDKLIARKKDWDPKKYGGFDSPTVAYSVLVVAKVEKGKSKKLKSVKELLGITIMERSSFEKNPIDFLEAKGYKEVKKDLIIKLPKYSLFELENGRKRMLASAGELQKGNELALPSKYVNFLYLASHYEKLKGSPEDNEQKQLFVEQHKHYLDEIIEQISEFSKRVILADANLDKVLSAYNKHRDKPIREQAENIIHLFTLTNLGAPAAFKYFDTTIDRKRYTSTKEVLDATLIHQSITGLYETRIDLSQLGGDGGEAAAKGGSGGVLNLEEEYRLHEKPVPSSIDPSWLQLFPTVWAERAGMGLANQVPPVVVELRSGASPVAVRQYPMSKEAREGIRPHIQRFLDLGVLVPCQSPWNTPLLPVKKPGTNDYRPVQDLREINKRVQDIHPTVPNPYNLLSSLPPSHTWYSVLDLKDAFFCLKLHPNSQPLFAFEWRDPEKGNTGQLTWTRLPQGFKNSPTLFNEALHRDLAPFRALNPQVVLLQYVDDLLVAAPTYRDCKEGTQKLLQELSKLGYRVSAKKAQLCQKEVTYLGYLLKEGKRWLTPARKATVMKIPPPTTPRQVREFLGKAGFCRLFIPGFASLAAPLYPLTKPSIPFIWTEEHQKAFDRIKEALLSAPALALPDLTKPFTLYVDERAGVARGVLTQTLGPWRRPVAYLSKKLDPVASGWPTCLKAVAAVALLLKDADKLTLGQNVTVIASHSLESIVRQPPDRWMTNARMTHYQSLLLNERVSFAPPAVLNPATLLPVESEATPVHRCSEILAEETGTRRDLKDQPLPGVPAWYTDGSSFIAEGKRRAGAAIVDGKRTVWASSLPEGTSAQKAELVALTQALRLAEGKDINIYTDSRYAFATAHIHGAIYKQRGWLTSAGKDIKNKEEILALLEAIHLPKRVAIIHCPGHQKGNDPVATGNRRADEAAKQAALSTRVLAETTKPAGKRTADGSEFEKRTADGSEFESPKKKAKVE

SEQ ID NO: 898 - protein, 2094 aa, synthetic construct
MPAAKRVKLDGGDKKYSIGLDIGTNSVGWAVITDEYKVPSKKFKVLGNTDRHSIKKNLIGALLFDSGETAEATRLKRTARRRYTRRKNRICYLQEIFSNEMAKVDDSFFHRLEESFLVEEDKKHERHPIFGNIVDEVAYHEKYPTIYHLRKKLVDSTDKADLRLIYLALAHMIKFRGHFLIEGDLNPDNSDVDKLFIQLVQTYNQLFEENPINASGVDAKAILSARLSKSRRLENLIAQLPGEKKNGLFGNLIALSLGLTPNFKSNFDLAEDAKLQLSKDTYDDDLDNLLAQIGDQYADLFLAAKNLSDAILLSDILRVNTEITKAPLSASMIKRYDEHHQDLTLLKALVRQQLPEKYKEIFFDQSKNGYAGYIDGGASQEEFYKFIKPILEKMDGTEELLVKLNREDLLRKQRTFDNGSIPHQIHLGELHAILRRQEDFYPFLKDNREKIEKILTFRIPYYVGPLARGNSRFAWMTRKSEETITPWNFEEVVDKGASAQSFIERMTNFDKNLPNEKVLPKHSLLYEYFTVYNELTKVKYVTEGMRKPAFLSGEQKKAIVDLLFKTNRKVTVKQLKEDYFKKIECFDSVEISGVEDRFNASLGTYHDLLKIIKDKDFLDNEENEDILEDIVLTLTLFEDREMIEERLKTYAHLFDDKVMKQLKRRRYTGWGRLSRKLINGIRDKQSGKTILDFLKSDGFANRNFMQLIHDDSLTFKEDIQKAQVSGQGDSLHEHIANLAGSPAIKKGILQTVKVVDELVKVMGRHKPENIVIEMARENQTTQKGQKNSRERMKRIEEGIKELGSQILKEHPVENTQLQNEKLYLYYLQNGRDMYVDQELDINRLSDYDVDHIVPQSFLKDDSIDNKVLTRSDKARGKSDNVPSEEVVKKMKNYWRQLLNAKLITQRKFDNLTKAERGGLSELDKAGFIKRQLVETRQITKHVAQILDSRMNTKYDENDKLIREVKVITLKSKLVSDFRKDFQFYKVREINNYHHAHDAYLNAVVGTALIKKYPKLESEFVYGDYKVYDVRKMIAKSEQEIGKATAKYFFYSNIMNFFKTEITLANGEIRKRPLIETNGETGEIVWDKGRDFATVRKVLSMPQVNIVKKTEVQTGGFSKESILPKRNSDKLIARKKDWDPKKYGGFDSPTVAYSVLVVAKVEKGKSKKLKSVKELLGITIMERSSFEKNPIDFLEAKGYKEVKKDLIIKLPKYSLFELENGRKRMLASAGELQKGNELALPSKYVNFLYLASHYEKLKGSPEDNEQKQLFVEQHKHYLDEIIEQISEFSKRVILADANLDKVLSAYNKHRDKPIREQAENIIHLFTLTNLGAPAAFKYFDTTIDRKRYTSTKEVLDATLIHQSITGLYETRIDLSQLGGDGGGGSPAPEAAAKGGVLNLEEEYRLHEKPVPSSIDPSWLQLFPTVWAERAGMGLANQVPPVVVELRSGASPVAVRQYPMSKEAREGIRPHIQRFLDLGVLVPCQSPWNTPLLPVKKPGTNDYRPVQDLREINKRVQDIHPTVPNPYNLLSSLPPSHTWYSVLDLKDAFFCLKLHPNSQPLFAFEWRDPEKGNTGQLTWTRLPQGFKNSPTLFNEALHRDLAPFRALNPQVVLLQYVDDLLVAAPTYRDCKEGTQKLLQELSKLGYRVSAKKAQLCQKEVTYLGYLLKEGKRWLTPARKATVMKIPPPTTPRQVREFLGKAGFCRLFIPGFASLAAPLYPLTKPSIPFIWTEEHQKAFDRIKEALLSAPALALPDLTKPFTLYVDERAGVARGVLTQTLGPWRRPVAYLSKKLDPVASGWPTCLKAVAAVALLLKDADKLTLGQNVTVIASHSLESIVRQPPDRWMTNARMTHYQSLLLNERVSFAPPAVLNPATLLPVESEATPVHRCSEILAEETGTRRDLKDQPLPGVPAWYTDGSSFIAEGKRRAGAAIVDGKRTVWASSLPEGTSAQKAELVALTQALRLAEGKDINIYTDSRYAFATAHIHGAIYKQRGWLTSAGKDIKNKEEILALLEAIHLPKRVAIIHCPGHQKGNDPVATGNRRADEAAKQAALSTRVLAETTKPAGKRTADGSEFEKRTADGSEFESPKKKAKVE

SEQ ID NO: 899 - protein, 2101 aa, synthetic construct
MPAAKRVKLDGGDKKYSIGLDIGTNSVGWAVITDEYKVPSKKFKVLGNTDRHSIKKNLIGALLFDSGETAEATRLKRTARRRYTRRKNRICYLQEIFSNEMAKVDDSFFHRLEESFLVEEDKKHERHPIFGNIVDEVAYHEKYPTIYHLRKKLVDSTDKADLRLIYLALAHMIKFRGHFLIEGDLNPDNSDVDKLFIQLVQTYNQLFEENPINASGVDAKAILSARLSKSRRLENLIAQLPGEKKNGLFGNLIALSLGLTPNFKSNFDLAEDAKLQLSKDTYDDDLDNLLAQIGDQYADLFLAAKNLSDAILLSDILRVNTEITKAPLSASMIKRYDEHHQDLTLLKALVRQQLPEKYKEIFFDQSKNGYAGYIDGGASQEEFYKFIKPILEKMDGTEELLVKLNREDLLRKQRTFDNGSIPHQIHLGELHAILRRQEDFYPFLKDNREKIEKILTFRIPYYVGPLARGNSRFAWMTRKSEETITPWNFEEVVDKGASAQSFIERMTNFDKNLPNEKVLPKHSLLYEYFTVYNELTKVKYVTEGMRKPAFLSGEQKKAIVDLLFKTNRKVTVKQLKEDYFKKIECFDSVEISGVEDRFNASLGTYHDLLKIIKDKDFLDNEENEDILEDIVLTLTLFEDREMIEERLKTYAHLFDDKVMKQLKRRRYTGWGRLSRKLINGIRDKQSGKTILDFLKSDGFANRNFMQLIHDDSLTFKEDIQKAQVSGQGDSLHEHIANLAGSPAIKKGILQTVKVVDELVKVMGRHKPENIVIEMARENQTTQKGQKNSRERMKRIEEGIKELGSQILKEHPVENTQLQNEKLYLYYLQNGRDMYVDQELDINRLSDYDVDHIVPQSFLKDDSIDNKVLTRSDKARGKSDNVPSEEVVKKMKNYWRQLLNAKLITQRKFDNLTKAERGGLSELDKAGFIKRQLVETRQITKHVAQILDSRMNTKYDENDKLIREVKVITLKSKLVSDFRKDFQFYKVREINNYHHAHDAYLNAVVGTALIKKYPKLESEFVYGDYKVYDVRKMIAKSEQEIGKATAKYFFYSNIMNFFKTEITLANGEIRKRPLIETNGETGEIVWDKGRDFATVRKVLSMPQVNIVKKTEVQTGGFSKESILPKRNSDKLIARKKDWDPKKYGGFDSPTVAYSVLVVAKVEKGKSKKLKSVKELLGITIMERSSFEKNPIDFLEAKGYKEVKKDLIIKLPKYSLFELENGRKRMLASAGELQKGNELALPSKYVNFLYLASHYEKLKGSPEDNEQKQLFVEQHKHYLDEIIEQISEFSKRVILADANLDKVLSAYNKHRDKPIREQAENIIHLFTLTNLGAPAAFKYFDTTIDRKRYTSTKEVLDATLIHQSITGLYETRIDLSQLGGDGGGGSGGSGGSGGSGGSGGSGGVLNLEEEYRLHEKPVPSSIDPSWLQLFPTVWAERAGMGLANQVPPVVVELRSGASPVAVRQYPMSKEAREGIRPHIQRFLDLGVLVPCQSPWNTPLLPVKKPGTNDYRPVQDLREINKRVQDIHPTVPNPYNLLSSLPPSHTWYSVLDLKDAFFCLKLHPNSQPLFAFEWRDPEKGNTGQLTWTRLPQGFKNSPTLFNEALHRDLAPFRALNPQVVLLQYVDDLLVAAPTYRDCKEGTQKLLQELSKLGYRVSAKKAQLCQKEVTYLGYLLKEGKRWLTPARKATVMKIPPPTTPRQVREFLGKAGFCRLFIPGFASLAAPLYPLTKPSIPFIWTEEHQKAFDRIKEALLSAPALALPDLTKPFTLYVDERAGVARGVLTQTLGPWRRPVAYLSKKLDPVASGWPTCLKAVAAVALLLKDADKLTLGQNVTVIASHSLESIVRQPPDRWMTNARMTHYQSLLLNERVSFAPPAVLNPATLLPVESEATPVHRCSEILAEETGTRRDLKDQPLPGVPAWYTDGSSFIAEGKRRAGAAIVDGKRTVWASSLPEGTSAQKAELVALTQALRLAEGKDINIYTDSRYAFATAHIHGAIYKQRGWLTSAGKDIKNKEEILALLEAIHLPKRVAIIHCPGHQKGNDPVATGNRRADEAAKQAALSTRVLAETTKPAGKRTADGSEFEKRTADGSEFESPKKKAKVE

SEQ ID NO: 900 - protein, 2098 aa, synthetic construct
MPAAKRVKLDGGDKKYSIGLDIGTNSVGWAVITDEYKVPSKKFKVLGNTDRHSIKKNLIGALLFDSGETAEATRLKRTARRRYTRRKNRICYLQEIFSNEMAKVDDSFFHRLEESFLVEEDKKHERHPIFGNIVDEVAYHEKYPTIYHLRKKLVDSTDKADLRLIYLALAHMIKFRGHFLIEGDLNPDNSDVDKLFIQLVQTYNQLFEENPINASGVDAKAILSARLSKSRRLENLIAQLPGEKKNGLFGNLIALSLGLTPNFKSNFDLAEDAKLQLSKDTYDDDLDNLLAQIGDQYADLFLAAKNLSDAILLSDILRVNTEITKAPLSASMIKRYDEHHQDLTLLKALVRQQLPEKYKEIFFDQSKNGYAGYIDGGASQEEFYKFIKPILEKMDGTEELLVKLNREDLLRKQRTFDNGSIPHQIHLGELHAILRRQEDFYPFLKDNREKIEKILTFRIPYYVGPLARGNSRFAWMTRKSEETITPWNFEEVVDKGASAQSFIERMTNFDKNLPNEKVLPKHSLLYEYFTVYNELTKVKYVTEGMRKPAFLSGEQKKAIVDLLFKTNRKVTVKQLKEDYFKKIECFDSVEISGVEDRFNASLGTYHDLLKIIKDKDFLDNEENEDILEDIVLTLTLFEDREMIEERLKTYAHLFDDKVMKQLKRRRYTGWGRLSRKLINGIRDKQSGKTILDFLKSDGFANRNFMQLIHDDSLTFKEDIQKAQVSGQGDSLHEHIANLAGSPAIKKGILQTVKVVDELVKVMGRHKPENIVIEMARENQTTQKGQKNSRERMKRIEEGIKELGSQILKEHPVENTQLQNEKLYLYYLQNGRDMYVDQELDINRLSDYDVDHIVPQSFLKDDSIDNKVLTRSDKARGKSDNVPSEEVVKKMKNYWRQLLNAKLITQRKFDNLTKAERGGLSELDKAGFIKRQLVETRQITKHVAQILDSRMNTKYDENDKLIREVKVITLKSKLVSDFRKDFQFYKVREINNYHHAHDAYLNAVVGTALIKKYPKLESEFVYGDYKVYDVRKMIAKSEQEIGKATAKYFFYSNIMNFFKTEITLANGEIRKRPLIETNGETGEIVWDKGRDFATVRKVLSMPQVNIVKKTEVQTGGFSKESILPKRNSDKLIARKKDWDPKKYGGFDSPTVAYSVLVVAKVEKGKSKKLKSVKELLGITIMERSSFEKNPIDFLEAKGYKEVKKDLIIKLPKYSLFELENGRKRMLASAGELQKGNELALPSKYVNFLYLASHYEKLKGSPEDNEQKQLFVEQHKHYLDEIIEQISEFSKRVILADANLDKVLSAYNKHRDKPIREQAENIIHLFTLTNLGAPAAFKYFDTTIDRKRYTSTKEVLDATLIHQSITGLYETRIDLSQLGGDGGEAAAKGGGGSEAAAKGGVLNLEEEYRLHEKPVPSSIDPSWLQLFPTVWAERAGMGLANQVPPVVVELRSGASPVAVRQYPMSKEAREGIRPHIQRFLDLGVLVPCQSPWNTPLLPVKKPGTNDYRPVQDLREINKRVQDIHPTVPNPYNLLSSLPPSHTWYSVLDLKDAFFCLKLHPNSQPLFAFEWRDPEKGNTGQLTWTRLPQGFKNSPTLFNEALHRDLAPFRALNPQVVLLQYVDDLLVAAPTYRDCKEGTQKLLQELSKLGYRVSAKKAQLCQKEVTYLGYLLKEGKRWLTPARKATVMKIPPPTTPRQVREFLGKAGFCRLFIPGFASLAAPLYPLTKPSIPFIWTEEHQKAFDRIKEALLSAPALALPDLTKPFTLYVDERAGVARGVLTQTLGPWRRPVAYLSKKLDPVASGWPTCLKAVAAVALLLKDADKLTLGQNVTVIASHSLESIVRQPPDRWMTNARMTHYQSLLLNERVSFAPPAVLNPATLLPVESEATPVHRCSEILAEETGTRRDLKDQPLPGVPAWYTDGSSFIAEGKRRAGAAIVDGKRTVWASSLPEGTSAQKAELVALTQALRLAEGKDINIYTDSRYAFATAHIHGAIYKQRGWLTSAGKDIKNKEEILALLEAIHLPKRVAIIHCPGHQKGNDPVATGNRRADEAAKQAALSTRVLAETTKPAGKRTADGSEFEKRTADGSEFESPKKKAKVE

SEQ ID NO: 901 - protein, 2094 aa, synthetic construct
MPAAKRVKLDGGDKKYSIGLDIGTNSVGWAVITDEYKVPSKKFKVLGNTDRHSIKKNLIGALLFDSGETAEATRLKRTARRRYTRRKNRICYLQEIFSNEMAKVDDSFFHRLEESFLVEEDKKHERHPIFGNIVDEVAYHEKYPTIYHLRKKLVDSTDKADLRLIYLALAHMIKFRGHFLIEGDLNPDNSDVDKLFIQLVQTYNQLFEENPINASGVDAKAILSARLSKSRRLENLIAQLPGEKKNGLFGNLIALSLGLTPNFKSNFDLAEDAKLQLSKDTYDDDLDNLLAQIGDQYADLFLAAKNLSDAILLSDILRVNTEITKAPLSASMIKRYDEHHQDLTLLKALVRQQLPEKYKEIFFDQSKNGYAGYIDGGASQEEFYKFIKPILEKMDGTEELLVKLNREDLLRKQRTFDNGSIPHQIHLGELHAILRRQEDFYPFLKDNREKIEKILTFRIPYYVGPLARGNSRFAWMTRKSEETITPWNFEEVVDKGASAQSFIERMTNFDKNLPNEKVLPKHSLLYEYFTVYNELTKVKYVTEGMRKPAFLSGEQKKAIVDLLFKTNRKVTVKQLKEDYFKKIECFDSVEISGVEDRFNASLGTYHDLLKIIKDKDFLDNEENEDILEDIVLTLTLFEDREMIEERLKTYAHLFDDKVMKQLKRRRYTGWGRLSRKLINGIRDKQSGKTILDFLKSDGFANRNFMQLIHDDSLTFKEDIQKAQVSGQGDSLHEHIANLAGSPAIKKGILQTVKVVDELVKVMGRHKPENIVIEMARENQTTQKGQKNSRERMKRIEEGIKELGSQILKEHPVENTQLQNEKLYLYYLQNGRDMYVDQELDINRLSDYDVDHIVPQSFLKDDSIDNKVLTRSDKARGKSDNVPSEEVVKKMKNYWRQLLNAKLITQRKFDNLTKAERGGLSELDKAGFIKRQLVETRQITKHVAQILDSRMNTKYDENDKLIREVKVITLKSKLVSDFRKDFQFYKVREINNYHHAHDAYLNAVVGTALIKKYPKLESEFVYGDYKVYDVRKMIAKSEQEIGKATAKYFFYSNIMNFFKTEITLANGEIRKRPLIETNGETGEIVWDKGRDFATVRKVLSMPQVNIVKKTEVQTGGFSKESILPKRNSDKLIARKKDWDPKKYGGFDSPTVAYSVLVVAKVEKGKSKKLKSVKELLGITIMERSSFEKNPIDFLEAKGYKEVKKDLIIKLPKYSLFELENGRKRMLASAGELQKGNELALPSKYVNFLYLASHYEKLKGSPEDNEQKQLFVEQHKHYLDEIIEQISEFSKRVILADANLDKVLSAYNKHRDKPIREQAENIIHLFTLTNLGAPAAFKYFDTTIDRKRYTSTKEVLDATLIHQSITGLYETRIDLSQLGGDGGGGGEAAAKGGSGGVLNLEEEYRLHEKPVPSSIDPSWLQLFPTVWAERAGMGLANQVPPVVVELRSGASPVAVRQYPMSKEAREGIRPHIQRFLDLGVLVPCQSPWNTPLLPVKKPGTNDYRPVQDLREINKRVQDIHPTVPNPYNLLSSLPPSHTWYSVLDLKDAFFCLKLHPNSQPLFAFEWRDPEKGNTGQLTWTRLPQGFKNSPTLFNEALHRDLAPFRALNPQVVLLQYVDDLLVAAPTYRDCKEGTQKLLQELSKLGYRVSAKKAQLCQKEVTYLGYLLKEGKRWLTPARKATVMKIPPPTTPRQVREFLGKAGFCRLFIPGFASLAAPLYPLTKPSIPFIWTEEHQKAFDRIKEALLSAPALALPDLTKPFTLYVDERAGVARGVLTQTLGPWRRPVAYLSKKLDPVASGWPTCLKAVAAVALLLKDADKLTLGQNVTVIASHSLESIVRQPPDRWMTNARMTHYQSLLLNERVSFAPPAVLNPATLLPVESEATPVHRCSEILAEETGTRRDLKDQPLPGVPAWYTDGSSFIAEGKRRAGAAIVDGKRTVWASSLPEGTSAQKAELVALTQALRLAEGKDINIYTDSRYAFATAHIHGAIYKQRGWLTSAGKDIKNKEEILALLEAIHLPKRVAIIHCPGHQKGNDPVATGNRRADEAAKQAALSTRVLAETTKPAGKRTADGSEFEKRTADGSEFESPKKKAKVE

SEQ ID NO: 902 - protein, 2094 aa, synthetic construct
MPAAKRVKLDGGDKKYSIGLDIGTNSVGWAVITDEYKVPSKKFKVLGNTDRHSIKKNLIGALLFDSGETAEATRLKRTARRRYTRRKNRICYLQEIFSNEMAKVDDSFFHRLEESFLVEEDKKHERHPIFGNIVDEVAYHEKYPTIYHLRKKLVDSTDKADLRLIYLALAHMIKFRGHFLIEGDLNPDNSDVDKLFIQLVQTYNQLFEENPINASGVDAKAILSARLSKSRRLENLIAQLPGEKKNGLFGNLIALSLGLTPNFKSNFDLAEDAKLQLSKDTYDDDLDNLLAQIGDQYADLFLAAKNLSDAILLSDILRVNTEITKAPLSASMIKRYDEHHQDLTLLKALVRQQLPEKYKEIFFDQSKNGYAGYIDGGASQEEFYKFIKPILEKMDGTEELLVKLNREDLLRKQRTFDNGSIPHQIHLGELHAILRRQEDFYPFLKDNREKIEKILTFRIPYYVGPLARGNSRFAWMTRKSEETITPWNFEEVVDKGASAQSFIERMTNFDKNLPNEKVLPKHSLLYEYFTVYNELTKVKYVTEGMRKPAFLSGEQKKAIVDLLFKTNRKVTVKQLKEDYFKKIECFDSVEISGVEDRFNASLGTYHDLLKIIKDKDFLDNEENEDILEDIVLTLTLFEDREMIEERLKTYAHLFDDKVMKQLKRRRYTGWGRLSRKLINGIRDKQSGKTILDFLKSDGFANRNFMQLIHDDSLTFKEDIQKAQVSGQGDSLHEHIANLAGSPAIKKGILQTVKVVDELVKVMGRHKPENIVIEMARENQTTQKGQKNSRERMKRIEEGIKELGSQILKEHPVENTQLQNEKLYLYYLQNGRDMYVDQELDINRLSDYDVDHIVPQSFLKDDSIDNKVLTRSDKARGKSDNVPSEEVVKKMKNYWRQLLNAKLITQRKFDNLTKAERGGLSELDKAGFIKRQLVETRQITKHVAQILDSRMNTKYDENDKLIREVKVITLKSKLVSDFRKDFQFYKVREINNYHHAHDAYLNAVVGTALIKKYPKLESEFVYGDYKVYDVRKMIAKSEQEIGKATAKYFFYSNIMNFFKTEITLANGEIRKRPLIETNGETGEIVWDKGRDFATVRKVLSMPQVNIVKKTEVQTGGFSKESILPKRNSDKLIARKKDWDPKKYGGFDSPTVAYSVLVVAKVEKGKSKKLKSVKELLGITIMERSSFEKNPIDFLEAKGYKEVKKDLIIKLPKYSLFELENGRKRMLASAGELQKGNELALPSKYVNFLYLASHYEKLKGSPEDNEQKQLFVEQHKHYLDEIIEQISEFSKRVILADANLDKVLSAYNKHRDKPIREQAENIIHLFTLTNLGAPAAFKYFDTTIDRKRYTSTKEVLDATLIHQSITGLYETRIDLSQLGGDGGGGSEAAAKGGGGGVLNLEEEYRLHEKPVPSSIDPSWLQLFPTVWAERAGMGLANQVPPVVVELRSGASPVAVRQYPMSKEAREGIRPHIQRFLDLGVLVPCQSPWNTPLLPVKKPGTNDYRPVQDLREINKRVQDIHPTVPNPYNLLSSLPPSHTWYSVLDLKDAFFCLKLHPNSQPLFAFEWRDPEKGNTGQLTWTRLPQGFKNSPTLFNEALHRDLAPFRALNPQVVLLQYVDDLLVAAPTYRDCKEGTQKLLQELSKLGYRVSAKKAQLCQKEVTYLGYLLKEGKRWLTPARKATVMKIPPPTTPRQVREFLGKAGFCRLFIPGFASLAAPLYPLTKPSIPFIWTEEHQKAFDRIKEALLSAPALALPDLTKPFTLYVDERAGVARGVLTQTLGPWRRPVAYLSKKLDPVASGWPTCLKAVAAVALLLKDADKLTLGQNVTVIASHSLESIVRQPPDRWMTNARMTHYQSLLLNERVSFAPPAVLNPATLLPVESEATPVHRCSEILAEETGTRRDLKDQPLPGVPAWYTDGSSFIAEGKRRAGAAIVDGKRTVWASSLPEGTSAQKAELVALTQALRLAEGKDINIYTDSRYAFATAHIHGAIYKQRGWLTSAGKDIKNKEEILALLEAIHLPKRVAIIHCPGHQKGNDPVATGNRRADEAAKQAALSTRVLAETTKPAGKRTADGSEFEKRTADGSEFESPKKKAKVE

SEQ ID NO: 903 - protein, 2092 aa, synthetic construct
MPAAKRVKLDGGDKKYSIGLDIGTNSVGWAVITDEYKVPSKKFKVLGNTDRHSIKKNLIGALLFDSGETAEATRLKRTARRRYTRRKNRICYLQEIFSNEMAKVDDSFFHRLEESFLVEEDKKHERHPIFGNIVDEVAYHEKYPTIYHLRKKLVDSTDKADLRLIYLALAHMIKFRGHFLIEGDLNPDNSDVDKLFIQLVQTYNQLFEENPINASGVDAKAILSARLSKSRRLENLIAQLPGEKKNGLFGNLIALSLGLTPNFKSNFDLAEDAKLQLSKDTYDDDLDNLLAQIGDQYADLFLAAKNLSDAILLSDILRVNTEITKAPLSASMIKRYDEHHQDLTLLKALVRQQLPEKYKEIFFDQSKNGYAGYIDGGASQEEFYKFIKPILEKMDGTEELLVKLNREDLLRKQRTFDNGSIPHQIHLGELHAILRRQEDFYPFLKDNREKIEKILTFRIPYYVGPLARGNSRFAWMTRKSEETITPWNFEEVVDKGASAQSFIERMTNFDKNLPNEKVLPKHSLLYEYFTVYNELTKVKYVTEGMRKPAFLSGEQKKAIVDLLFKTNRKVTVKQLKEDYFKKIECFDSVEISGVEDRFNASLGTYHDLLKIIKDKDFLDNEENEDILEDIVLTLTLFEDREMIEERLKTYAHLFDDKVMKQLKRRRYTGWGRLSRKLINGIRDKQSGKTILDFLKSDGFANRNFMQLIHDDSLTFKEDIQKAQVSGQGDSLHEHIANLAGSPAIKKGILQTVKVVDELVKVMGRHKPENIVIEMARENQTTQKGQKNSRERMKRIEEGIKELGSQILKEHPVENTQLQNEKLYLYYLQNGRDMYVDQELDINRLSDYDVDHIVPQSFLKDDSIDNKVLTRSDKARGKSDNVPSEEVVKKMKNYWRQLLNAKLITQRKFDNLTKAERGGLSELDKAGFIKRQLVETRQITKHVAQILDSRMNTKYDENDKLIREVKVITLKSKLVSDFRKDFQFYKVREINNYHHAHDAYLNAVVGTALIKKYPKLESEFVYGDYKVYDVRKMIAKSEQEIGKATAKYFFYSNIMNFFKTEITLANGEIRKRPLIETNGETGEIVWDKGRDFATVRKVLSMPQVNIVKKTEVQTGGFSKESILPKRNSDKLIARKKDWDPKKYGGFDSPTVAYSVLVVAKVEKGKSKKLKSVKELLGITIMERSSFEKNPIDFLEAKGYKEVKKDLIIKLPKYSLFELENGRKRMLASAGELQKGNELALPSKYVNFLYLASHYEKLKGSPEDNEQKQLFVEQHKHYLDEIIEQISEFSKRVILADANLDKVLSAYNKHRDKPIREQAENIIHLFTLTNLGAPAAFKYFDTTIDRKRYTSTKEVLDATLIHQSITGLYETRIDLSQLGGDGGGGSGGGGSSGGVLNLEEEYRLHEKPVPSSIDPSWLQLFPTVWAERAGMGLANQVPPVVVELRSGASPVAVRQYPMSKEAREGIRPHIQRFLDLGVLVPCQSPWNTPLLPVKKPGTNDYRPVQDLREINKRVQDIHPTVPNPYNLLSSLPPSHTWYSVLDLKDAFFCLKLHPNSQPLFAFEWRDPEKGNTGQLTWTRLPQGFKNSPTLFNEALHRDLAPFRALNPQVVLLQYVDDLLVAAPTYRDCKEGTQKLLQELSKLGYRVSAKKAQLCQKEVTYLGYLLKEGKRWLTPARKATVMKIPPPTTPRQVREFLGKAGFCRLFIPGFASLAAPLYPLTKPSIPFIWTEEHQKAFDRIKEALLSAPALALPDLTKPFTLYVDERAGVARGVLTQTLGPWRRPVAYLSKKLDPVASGWPTCLKAVAAVALLLKDADKLTLGQNVTVIASHSLESIVRQPPDRWMTNARMTHYQSLLLNERVSFAPPAVLNPATLLPVESEATPVHRCSEILAEETGTRRDLKDQPLPGVPAWYTDGSSFIAEGKRRAGAAIVDGKRTVWASSLPEGTSAQKAELVALTQALRLAEGKDINIYTDSRYAFATAHIHGAIYKQRGWLTSAGKDIKNKEEILALLEAIHLPKRVAIIHCPGHQKGNDPVATGNRRADEAAKQAALSTRVLAETTKPAGKRTADGSEFEKRTADGSEFESPKKKAKVE

SEQ ID NO: 904 - protein, 2088 aa, synthetic construct
MPAAKRVKLDGGDKKYSIGLDIGTNSVGWAVITDEYKVPSKKFKVLGNTDRHSIKKNLIGALLFDSGETAEATRLKRTARRRYTRRKNRICYLQEIFSNEMAKVDDSFFHRLEESFLVEEDKKHERHPIFGNIVDEVAYHEKYPTIYHLRKKLVDSTDKADLRLIYLALAHMIKFRGHFLIEGDLNPDNSDVDKLFIQLVQTYNQLFEENPINASGVDAKAILSARLSKSRRLENLIAQLPGEKKNGLFGNLIALSLGLTPNFKSNFDLAEDAKLQLSKDTYDDDLDNLLAQIGDQYADLFLAAKNLSDAILLSDILRVNTEITKAPLSASMIKRYDEHHQDLTLLKALVRQQLPEKYKEIFFDQSKNGYAGYIDGGASQEEFYKFIKPILEKMDGTEELLVKLNREDLLRKQRTFDNGSIPHQIHLGELHAILRRQEDFYPFLKDNREKIEKILTFRIPYYVGPLARGNSRFAWMTRKSEETITPWNFEEVVDKGASAQSFIERMTNFDKNLPNEKVLPKHSLLYEYFTVYNELTKVKYVTEGMRKPAFLSGEQKKAIVDLLFKTNRKVTVKQLKEDYFKKIECFDSVEISGVEDRFNASLGTYHDLLKIIKDKDFLDNEENEDILEDIVLTLTLFEDREMIEERLKTYAHLFDDKVMKQLKRRRYTGWGRLSRKLINGIRDKQSGKTILDFLKSDGFANRNFMQLIHDDSLTFKEDIQKAQVSGQGDSLHEHIANLAGSPAIKKGILQTVKVVDELVKVMGRHKPENIVIEMARENQTTQKGQKNSRERMKRIEEGIKELGSQILKEHPVENTQLQNEKLYLYYLQNGRDMYVDQELDINRLSDYDVDHIVPQSFLKDDSIDNKVLTRSDKARGKSDNVPSEEVVKKMKNYWRQLLNAKLITQRKFDNLTKAERGGLSELDKAGFIKRQLVETRQITKHVAQILDSRMNTKYDENDKLIREVKVITLKSKLVSDFRKDFQFYKVREINNYHHAHDAYLNAVVGTALIKKYPKLESEFVYGDYKVYDVRKMIAKSEQEIGKATAKYFFYSNIMNFFKTEITLANGEIRKRPLIETNGETGEIVWDKGRDFATVRKVLSMPQVNIVKKTEVQTGGFSKESILPKRNSDKLIARKKDWDPKKYGGFDSPTVAYSVLVVAKVEKGKSKKLKSVKELLGITIMERSSFEKNPIDFLEAKGYKEVKKDLIIKLPKYSLFELENGRKRMLASAGELQKGNELALPSKYVNFLYLASHYEKLKGSPEDNEQKQLFVEQHKHYLDEIIEQISEFSKRVILADANLDKVLSAYNKHRDKPIREQAENIIHLFTLTNLGAPAAFKYFDTTIDRKRYTSTKEVLDATLIHQSITGLYETRIDLSQLGGDGGPAPAPGGVLNLEEEYRLHEKPVPSSIDPSWLQLFPTVWAERAGMGLANQVPPVVVELRSGASPVAVRQYPMSKEAREGIRPHIQRFLDLGVLVPCQSPWNTPLLPVKKPGTNDYRPVQDLREINKRVQDIHPTVPNPYNLLSSLPPSHTWYSVLDLKDAFFCLKLHPNSQPLFAFEWRDPEKGNTGQLTWTRLPQGFKNSPTLFNEALHRDLAPFRALNPQVVLLQYVDDLLVAAPTYRDCKEGTQKLLQELSKLGYRVSAKKAQLCQKEVTYLGYLLKEGKRWLTPARKATVMKIPPPTTPRQVREFLGKAGFCRLFIPGFASLAAPLYPLTKPSIPFIWTEEHQKAFDRIKEALLSAPALALPDLTKPFTLYVDERAGVARGVLTQTLGPWRRPVAYLSKKLDPVASGWPTCLKAVAAVALLLKDADKLTLGQNVTVIASHSLESIVRQPPDRWMTNARMTHYQSLLLNERVSFAPPAVLNPATLLPVESEATPVHRCSEILAEETGTRRDLKDQPLPGVPAWYTDGSSFIAEGKRRAGAAIVDGKRTVWASSLPEGTSAQKAELVALTQALRLAEGKDINIYTDSRYAFATAHIHGAIYKQRGWLTSAGKDIKNKEEILALLEAIHLPKRVAIIHCPGHQKGNDPVATGNRRADEAAKQAALSTRVLAETTKPAGKRTADGSEFEKRTADGSEFESPKKKAKVE

SEQ ID NO: 905 - protein, 2094 aa, synthetic construct
MPAAKRVKLDGGDKKYSIGLDIGTNSVGWAVITDEYKVPSKKFKVLGNTDRHSIKKNLIGALLFDSGETAEATRLKRTARRRYTRRKNRICYLQEIFSNEMAKVDDSFFHRLEESFLVEEDKKHERHPIFGNIVDEVAYHEKYPTIYHLRKKLVDSTDKADLRLIYLALAHMIKFRGHFLIEGDLNPDNSDVDKLFIQLVQTYNQLFEENPINASGVDAKAILSARLSKSRRLENLIAQLPGEKKNGLFGNLIALSLGLTPNFKSNFDLAEDAKLQLSKDTYDDDLDNLLAQIGDQYADLFLAAKNLSDAILLSDILRVNTEITKAPLSASMIKRYDEHHQDLTLLKALVRQQLPEKYKEIFFDQSKNGYAGYIDGGASQEEFYKFIKPILEKMDGTEELLVKLNREDLLRKQRTFDNGSIPHQIHLGELHAILRRQEDFYPFLKDNREKIEKILTFRIPYYVGPLARGNSRFAWMTRKSEETITPWNFEEVVDKGASAQSFIERMTNFDKNLPNEKVLPKHSLLYEYFTVYNELTKVKYVTEGMRKPAFLSGEQKKAIVDLLFKTNRKVTVKQLKEDYFKKIECFDSVEISGVEDRFNASLGTYHDLLKIIKDKDFLDNEENEDILEDIVLTLTLFEDREMIEERLKTYAHLFDDKVMKQLKRRRYTGWGRLSRKLINGIRDKQSGKTILDFLKSDGFANRNFMQLIHDDSLTFKEDIQKAQVSGQGDSLHEHIANLAGSPAIKKGILQTVKVVDELVKVMGRHKPENIVIEMARENQTTQKGQKNSRERMKRIEEGIKELGSQILKEHPVENTQLQNEKLYLYYLQNGRDMYVDQELDINRLSDYDVDHIVPQSFLKDDSIDNKVLTRSDKARGKSDNVPSEEVVKKMKNYWRQLLNAKLITQRKFDNLTKAERGGLSELDKAGFIKRQLVETRQITKHVAQILDSRMNTKYDENDKLIREVKVITLKSKLVSDFRKDFQFYKVREINNYHHAHDAYLNAVVGTALIKKYPKLESEFVYGDYKVYDVRKMIAKSEQEIGKATAKYFFYSNIMNFFKTEITLANGEIRKRPLIETNGETGEIVWDKGRDFATVRKVLSMPQVNIVKKTEVQTGGFSKESILPKRNSDKLIARKKDWDPKKYGGFDSPTVAYSVLVVAKVEKGKSKKLKSVKELLGITIMERSSFEKNPIDFLEAKGYKEVKKDLIIKLPKYSLFELENGRKRMLASAGELQKGNELALPSKYVNFLYLASHYEKLKGSPEDNEQKQLFVEQHKHYLDEIIEQISEFSKRVILADANLDKVLSAYNKHRDKPIREQAENIIHLFTLTNLGAPAAFKYFDTTIDRKRYTSTKEVLDATLIHQSITGLYETRIDLSQLGGDGGEAAAKGGSGSSGGVLNLEEEYRLHEKPVPSSIDPSWLQLFPTVWAERAGMGLANQVPPVVVELRSGASPVAVRQYPMSKEAREGIRPHIQRFLDLGVLVPCQSPWNTPLLPVKKPGTNDYRPVQDLREINKRVQDIHPTVPNPYNLLSSLPPSHTWYSVLDLKDAFFCLKLHPNSQPLFAFEWRDPEKGNTGQLTWTRLPQGFKNSPTLFNEALHRDLAPFRALNPQVVLLQYVDDLLVAAPTYRDCKEGTQKLLQELSKLGYRVSAKKAQLCQKEVTYLGYLLKEGKRWLTPARKATVMKIPPPTTPRQVREFLGKAGFCRLFIPGFASLAAPLYPLTKPSIPFIWTEEHQKAFDRIKEALLSAPALALPDLTKPFTLYVDERAGVARGVLTQTLGPWRRPVAYLSKKLDPVASGWPTCLKAVAAVALLLKDADKLTLGQNVTVIASHSLESIVRQPPDRWMTNARMTHYQSLLLNERVSFAPPAVLNPATLLPVESEATPVHRCSEILAEETGTRRDLKDQPLPGVPAWYTDGSSFIAEGKRRAGAAIVDGKRTVWASSLPEGTSAQKAELVALTQALRLAEGKDINIYTDSRYAFATAHIHGAIYKQRGWLTSAGKDIKNKEEILALLEAIHLPKRVAIIHCPGHQKGNDPVATGNRRADEAAKQAALSTRVLAETTKPAGKRTADGSEFEKRTADGSEFESPKKKAKVE

SEQ ID NO: 906 - protein, 2089 aa, synthetic construct
MPAAKRVKLDGGDKKYSIGLDIGTNSVGWAVITDEYKVPSKKFKVLGNTDRHSIKKNLIGALLFDSGETAEATRLKRTARRRYTRRKNRICYLQEIFSNEMAKVDDSFFHRLEESFLVEEDKKHERHPIFGNIVDEVAYHEKYPTIYHLRKKLVDSTDKADLRLIYLALAHMIKFRGHFLIEGDLNPDNSDVDKLFIQLVQTYNQLFEENPINASGVDAKAILSARLSKSRRLENLIAQLPGEKKNGLFGNLIALSLGLTPNFKSNFDLAEDAKLQLSKDTYDDDLDNLLAQIGDQYADLFLAAKNLSDAILLSDILRVNTEITKAPLSASMIKRYDEHHQDLTLLKALVRQQLPEKYKEIFFDQSKNGYAGYIDGGASQEEFYKFIKPILEKMDGTEELLVKLNREDLLRKQRTFDNGSIPHQIHLGELHAILRRQEDFYPFLKDNREKIEKILTFRIPYYVGPLARGNSRFAWMTRKSEETITPWNFEEVVDKGASAQSFIERMTNFDKNLPNEKVLPKHSLLYEYFTVYNELTKVKYVTEGMRKPAFLSGEQKKAIVDLLFKTNRKVTVKQLKEDYFKKIECFDSVEISGVEDRFNASLGTYHDLLKIIKDKDFLDNEENEDILEDIVLTLTLFEDREMIEERLKTYAHLFDDKVMKQLKRRRYTGWGRLSRKLINGIRDKQSGKTILDFLKSDGFANRNFMQLIHDDSLTFKEDIQKAQVSGQGDSLHEHIANLAGSPAIKKGILQTVKVVDELVKVMGRHKPENIVIEMARENQTTQKGQKNSRERMKRIEEGIKELGSQILKEHPVENTQLQNEKLYLYYLQNGRDMYVDQELDINRLSDYDVDHIVPQSFLKDDSIDNKVLTRSDKARGKSDNVPSEEVVKKMKNYWRQLLNAKLITQRKFDNLTKAERGGLSELDKAGFIKRQLVETRQITKHVAQILDSRMNTKYDENDKLIREVKVITLKSKLVSDFRKDFQFYKVREINNYHHAHDAYLNAVVGTALIKKYPKLESEFVYGDYKVYDVRKMIAKSEQEIGKATAKYFFYSNIMNFFKTEITLANGEIRKRPLIETNGETGEIVWDKGRDFATVRKVLSMPQVNIVKKTEVQTGGFSKESILPKRNSDKLIARKKDWDPKKYGGFDSPTVAYSVLVVAKVEKGKSKKLKSVKELLGITIMERSSFEKNPIDFLEAKGYKEVKKDLIIKLPKYSLFELENGRKRMLASAGELQKGNELALPSKYVNFLYLASHYEKLKGSPEDNEQKQLFVEQHKHYLDEIIEQISEFSKRVILADANLDKVLSAYNKHRDKPIREQAENIIHLFTLTNLGAPAAFKYFDTTIDRKRYTSTKEVLDATLIHQSITGLYETRIDLSQLGGDGGGGSGGSGGVLNLEEEYRLHEKPVPSSIDPSWLQLFPTVWAERAGMGLANQVPPVVVELRSGASPVAVRQYPMSKEAREGIRPHIQRFLDLGVLVPCQSPWNTPLLPVKKPGTNDYRPVQDLREINKRVQDIHPTVPNPYNLLSSLPPSHTWYSVLDLKDAFFCLKLHPNSQPLFAFEWRDPEKGNTGQLTWTRLPQGFKNSPTLFNEALHRDLAPFRALNPQVVLLQYVDDLLVAAPTYRDCKEGTQKLLQELSKLGYRVSAKKAQLCQKEVTYLGYLLKEGKRWLTPARKATVMKIPPPTTPRQVREFLGKAGFCRLFIPGFASLAAPLYPLTKPSIPFIWTEEHQKAFDRIKEALLSAPALALPDLTKPFTLYVDERAGVARGVLTQTLGPWRRPVAYLSKKLDPVASGWPTCLKAVAAVALLLKDADKLTLGQNVTVIASHSLESIVRQPPDRWMTNARMTHYQSLLLNERVSFAPPAVLNPATLLPVESEATPVHRCSEILAEETGTRRDLKDQPLPGVPAWYTDGSSFIAEGKRRAGAAIVDGKRTVWASSLPEGTSAQKAELVALTQALRLAEGKDINIYTDSRYAFATAHIHGAIYKQRGWLTSAGKDIKNKEEILALLEAIHLPKRVAIIHCPGHQKGNDPVATGNRRADEAAKQAALSTRVLAETTKPAGKRTADGSEFEKRTADGSEFESPKKKAKVE

SEQ ID NO: 907 - protein, 2095 aa, synthetic construct
MPAAKRVKLDGGDKKYSIGLDIGTNSVGWAVITDEYKVPSKKFKVLGNTDRHSIKKNLIGALLFDSGETAEATRLKRTARRRYTRRKNRICYLQEIFSNEMAKVDDSFFHRLEESFLVEEDKKHERHPIFGNIVDEVAYHEKYPTIYHLRKKLVDSTDKADLRLIYLALAHMIKFRGHFLIEGDLNPDNSDVDKLFIQLVQTYNQLFEENPINASGVDAKAILSARLSKSRRLENLIAQLPGEKKNGLFGNLIALSLGLTPNFKSNFDLAEDAKLQLSKDTYDDDLDNLLAQIGDQYADLFLAAKNLSDAILLSDILRVNTEITKAPLSASMIKRYDEHHQDLTLLKALVRQQLPEKYKEIFFDQSKNGYAGYIDGGASQEEFYKFIKPILEKMDGTEELLVKLNREDLLRKQRTFDNGSIPHQIHLGELHAILRRQEDFYPFLKDNREKIEKILTFRIPYYVGPLARGNSRFAWMTRKSEETITPWNFEEVVDKGASAQSFIERMTNFDKNLPNEKVLPKHSLLYEYFTVYNELTKVKYVTEGMRKPAFLSGEQKKAIVDLLFKTNRKVTVKQLKEDYFKKIECFDSVEISGVEDRFNASLGTYHDLLKIIKDKDFLDNEENEDILEDIVLTLTLFEDREMIEERLKTYAHLFDDKVMKQLKRRRYTGWGRLSRKLINGIRDKQSGKTILDFLKSDGFANRNFMQLIHDDSLTFKEDIQKAQVSGQGDSLHEHIANLAGSPAIKKGILQTVKVVDELVKVMGRHKPENIVIEMARENQTTQKGQKNSRERMKRIEEGIKELGSQILKEHPVENTQLQNEKLYLYYLQNGRDMYVDQELDINRLSDYDVDHIVPQSFLKDDSIDNKVLTRSDKARGKSDNVPSEEVVKKMKNYWRQLLNAKLITQRKFDNLTKAERGGLSELDKAGFIKRQLVETRQITKHVAQILDSRMNTKYDENDKLIREVKVITLKSKLVSDFRKDFQFYKVREINNYHHAHDAYLNAVVGTALIKKYPKLESEFVYGDYKVYDVRKMIAKSEQEIGKATAKYFFYSNIMNFFKTEITLANGEIRKRPLIETNGETGEIVWDKGRDFATVRKVLSMPQVNIVKKTEVQTGGFSKESILPKRNSDKLIARKKDWDPKKYGGFDSPTVAYSVLVVAKVEKGKSKKLKSVKELLGITIMERSSFEKNPIDFLEAKGYKEVKKDLIIKLPKYSLFELENGRKRMLASAGELQKGNELALPSKYVNFLYLASHYEKLKGSPEDNEQKQLFVEQHKHYLDEIIEQISEFSKRVILADANLDKVLSAYNKHRDKPIREQAENIIHLFTLTNLGAPAAFKYFDTTIDRKRYTSTKEVLDATLIHQSITGLYETRIDLSQLGGDGGGSAGSAAGSGEFGGVLNLEEEYRLHEKPVPSSIDPSWLQLFPTVWAERAGMGLANQVPPVVVELRSGASPVAVRQYPMSKEAREGIRPHIQRFLDLGVLVPCQSPWNTPLLPVKKPGTNDYRPVQDLREINKRVQDIHPTVPNPYNLLSSLPPSHTWYSVLDLKDAFFCLKLHPNSQPLFAFEWRDPEKGNTGQLTWTRLPQGFKNSPTLFNEALHRDLAPFRALNPQVVLLQYVDDLLVAAPTYRDCKEGTQKLLQELSKLGYRVSAKKAQLCQKEVTYLGYLLKEGKRWLTPARKATVMKIPPPTTPRQVREFLGKAGFCRLFIPGFASLAAPLYPLTKPSIPFIWTEEHQKAFDRIKEALLSAPALALPDLTKPFTLYVDERAGVARGVLTQTLGPWRRPVAYLSKKLDPVASGWPTCLKAVAAVALLLKDADKLTLGQNVTVIASHSLESIVRQPPDRWMTNARMTHYQSLLLNERVSFAPPAVLNPATLLPVESEATPVHRCSEILAEETGTRRDLKDQPLPGVPAWYTDGSSFIAEGKRRAGAAIVDGKRTVWASSLPEGTSAQKAELVALTQALRLAEGKDINIYTDSRYAFATAHIHGAIYKQRGWLTSAGKDIKNKEEILALLEAIHLPKRVAIIHCPGHQKGNDPVATGNRRADEAAKQAALSTRVLAETTKPAGKRTADGSEFEKRTADGSEFESPKKKAKVE

SEQ ID NO: 908 - protein, 2092 aa, synthetic construct
MPAAKRVKLDGGDKKYSIGLDIGTNSVGWAVITDEYKVPSKKFKVLGNTDRHSIKKNLIGALLFDSGETAEATRLKRTARRRYTRRKNRICYLQEIFSNEMAKVDDSFFHRLEESFLVEEDKKHERHPIFGNIVDEVAYHEKYPTIYHLRKKLVDSTDKADLRLIYLALAHMIKFRGHFLIEGDLNPDNSDVDKLFIQLVQTYNQLFEENPINASGVDAKAILSARLSKSRRLENLIAQLPGEKKNGLFGNLIALSLGLTPNFKSNFDLAEDAKLQLSKDTYDDDLDNLLAQIGDQYADLFLAAKNLSDAILLSDILRVNTEITKAPLSASMIKRYDEHHQDLTLLKALVRQQLPEKYKEIFFDQSKNGYAGYIDGGASQEEFYKFIKPILEKMDGTEELLVKLNREDLLRKQRTFDNGSIPHQIHLGELHAILRRQEDFYPFLKDNREKIEKILTFRIPYYVGPLARGNSRFAWMTRKSEETITPWNFEEVVDKGASAQSFIERMTNFDKNLPNEKVLPKHSLLYEYFTVYNELTKVKYVTEGMRKPAFLSGEQKKAIVDLLFKTNRKVTVKQLKEDYFKKIECFDSVEISGVEDRFNASLGTYHDLLKIIKDKDFLDNEENEDILEDIVLTLTLFEDREMIEERLKTYAHLFDDKVMKQLKRRRYTGWGRLSRKLINGIRDKQSGKTILDFLKSDGFANRNFMQLIHDDSLTFKEDIQKAQVSGQGDSLHEHIANLAGSPAIKKGILQTVKVVDELVKVMGRHKPENIVIEMARENQTTQKGQKNSRERMKRIEEGIKELGSQILKEHPVENTQLQNEKLYLYYLQNGRDMYVDQELDINRLSDYDVDHIVPQSFLKDDSIDNKVLTRSDKARGKSDNVPSEEVVKKMKNYWRQLLNAKLITQRKFDNLTKAERGGLSELDKAGFIKRQLVETRQITKHVAQILDSRMNTKYDENDKLIREVKVITLKSKLVSDFRKDFQFYKVREINNYHHAHDAYLNAVVGTALIKKYPKLESEFVYGDYKVYDVRKMIAKSEQEIGKATAKYFFYSNIMNFFKTEITLANGEIRKRPLIETNGETGEIVWDKGRDFATVRKVLSMPQVNIVKKTEVQTGGFSKESILPKRNSDKLIARKKDWDPKKYGGFDSPTVAYSVLVVAKVEKGKSKKLKSVKELLGITIMERSSFEKNPIDFLEAKGYKEVKKDLIIKLPKYSLFELENGRKRMLASAGELQKGNELALPSKYVNFLYLASHYEKLKGSPEDNEQKQLFVEQHKHYLDEIIEQISEFSKRVILADANLDKVLSAYNKHRDKPIREQAENIIHLFTLTNLGAPAAFKYFDTTIDRKRYTSTKEVLDATLIHQSITGLYETRIDLSQLGGDGGGGSGGGPAPGGVLNLEEEYRLHEKPVPSSIDPSWLQLFPTVWAERAGMGLANQVPPVVVELRSGASPVAVRQYPMSKEAREGIRPHIQRFLDLGVLVPCQSPWNTPLLPVKKPGTNDYRPVQDLREINKRVQDIHPTVPNPYNLLSSLPPSHTWYSVLDLKDAFFCLKLHPNSQPLFAFEWRDPEKGNTGQLTWTRLPQGFKNSPTLFNEALHRDLAPFRALNPQVVLLQYVDDLLVAAPTYRDCKEGTQKLLQELSKLGYRVSAKKAQLCQKEVTYLGYLLKEGKRWLTPARKATVMKIPPPTTPRQVREFLGKAGFCRLFIPGFASLAAPLYPLTKPSIPFIWTEEHQKAFDRIKEALLSAPALALPDLTKPFTLYVDERAGVARGVLTQTLGPWRRPVAYLSKKLDPVASGWPTCLKAVAAVALLLKDADKLTLGQNVTVIASHSLESIVRQPPDRWMTNARMTHYQSLLLNERVSFAPPAVLNPATLLPVESEATPVHRCSEILAEETGTRRDLKDQPLPGVPAWYTDGSSFIAEGKRRAGAAIVDGKRTVWASSLPEGTSAQKAELVALTQALRLAEGKDINIYTDSRYAFATAHIHGAIYKQRGWLTSAGKDIKNKEEILALLEAIHLPKRVAIIHCPGHQKGNDPVATGNRRADEAAKQAALSTRVLAETTKPAGKRTADGSEFEKRTADGSEFESPKKKAKVE

SEQ ID NO: 909 - protein, 2092 aa, synthetic construct
MPAAKRVKLDGGDKKYSIGLDIGTNSVGWAVITDEYKVPSKKFKVLGNTDRHSIKKNLIGALLFDSGETAEATRLKRTARRRYTRRKNRICYLQEIFSNEMAKVDDSFFHRLEESFLVEEDKKHERHPIFGNIVDEVAYHEKYPTIYHLRKKLVDSTDKADLRLIYLALAHMIKFRGHFLIEGDLNPDNSDVDKLFIQLVQTYNQLFEENPINASGVDAKAILSARLSKSRRLENLIAQLPGEKKNGLFGNLIALSLGLTPNFKSNFDLAEDAKLQLSKDTYDDDLDNLLAQIGDQYADLFLAAKNLSDAILLSDILRVNTEITKAPLSASMIKRYDEHHQDLTLLKALVRQQLPEKYKEIFFDQSKNGYAGYIDGGASQEEFYKFIKPILEKMDGTEELLVKLNREDLLRKQRTFDNGSIPHQIHLGELHAILRRQEDFYPFLKDNREKIEKILTFRIPYYVGPLARGNSRFAWMTRKSEETITPWNFEEVVDKGASAQSFIERMTNFDKNLPNEKVLPKHSLLYEYFTVYNELTKVKYVTEGMRKPAFLSGEQKKAIVDLLFKTNRKVTVKQLKEDYFKKIECFDSVEISGVEDRFNASLGTYHDLLKIIKDKDFLDNEENEDILEDIVLTLTLFEDREMIEERLKTYAHLFDDKVMKQLKRRRYTGWGRLSRKLINGIRDKQSGKTILDFLKSDGFANRNFMQLIHDDSLTFKEDIQKAQVSGQGDSLHEHIANLAGSPAIKKGILQTVKVVDELVKVMGRHKPENIVIEMARENQTTQKGQKNSRERMKRIEEGIKELGSQILKEHPVENTQLQNEKLYLYYLQNGRDMYVDQELDINRLSDYDVDHIVPQSFLKDDSIDNKVLTRSDKARGKSDNVPSEEVVKKMKNYWRQLLNAKLITQRKFDNLTKAERGGLSELDKAGFIKRQLVETRQITKHVAQILDSRMNTKYDENDKLIREVKVITLKSKLVSDFRKDFQFYKVREINNYHHAHDAYLNAVVGTALIKKYPKLESEFVYGDYKVYDVRKMIAKSEQEIGKATAKYFFYSNIMNFFKTEITLANGEIRKRPLIETNGETGEIVWDKGRDFATVRKVLSMPQVNIVKKTEVQTGGFSKESILPKRNSDKLIARKKDWDPKKYGGFDSPTVAYSVLVVAKVEKGKSKKLKSVKELLGITIMERSSFEKNPIDFLEAKGYKEVKKDLIIKLPKYSLFELENGRKRMLASAGELQKGNELALPSKYVNFLYLASHYEKLKGSPEDNEQKQLFVEQHKHYLDEIIEQISEFSKRVILADANLDKVLSAYNKHRDKPIREQAENIIHLFTLTNLGAPAAFKYFDTTIDRKRYTSTKEVLDATLIHQSITGLYETRIDLSQLGGDGGGGSGSSGGGGGVLNLEEEYRLHEKPVPSSIDPSWLQLFPTVWAERAGMGLANQVPPVVVELRSGASPVAVRQYPMSKEAREGIRPHIQRFLDLGVLVPCQSPWNTPLLPVKKPGTNDYRPVQDLREINKRVQDIHPTVPNPYNLLSSLPPSHTWYSVLDLKDAFFCLKLHPNSQPLFAFEWRDPEKGNTGQLTWTRLPQGFKNSPTLFNEALHRDLAPFRALNPQVVLLQYVDDLLVAAPTYRDCKEGTQKLLQELSKLGYRVSAKKAQLCQKEVTYLGYLLKEGKRWLTPARKATVMKIPPPTTPRQVREFLGKAGFCRLFIPGFASLAAPLYPLTKPSIPFIWTEEHQKAFDRIKEALLSAPALALPDLTKPFTLYVDERAGVARGVLTQTLGPWRRPVAYLSKKLDPVASGWPTCLKAVAAVALLLKDADKLTLGQNVTVIASHSLESIVRQPPDRWMTNARMTHYQSLLLNERVSFAPPAVLNPATLLPVESEATPVHRCSEILAEETGTRRDLKDQPLPGVPAWYTDGSSFIAEGKRRAGAAIVDGKRTVWASSLPEGTSAQKAELVALTQALRLAEGKDINIYTDSRYAFATAHIHGAIYKQRGWLTSAGKDIKNKEEILALLEAIHLPKRVAIIHCPGHQKGNDPVATGNRRADEAAKQAALSTRVLAETTKPAGKRTADGSEFEKRTADGSEFESPKKKAKVE

SEQ ID NO: 910 - protein, 2094 aa, synthetic construct
MPAAKRVKLDGGDKKYSIGLDIGTNSVGWAVITDEYKVPSKKFKVLGNTDRHSIKKNLIGALLFDSGETAEATRLKRTARRRYTRRKNRICYLQEIFSNEMAKVDDSFFHRLEESFLVEEDKKHERHPIFGNIVDEVAYHEKYPTIYHLRKKLVDSTDKADLRLIYLALAHMIKFRGHFLIEGDLNPDNSDVDKLFIQLVQTYNQLFEENPINASGVDAKAILSARLSKSRRLENLIAQLPGEKKNGLFGNLIALSLGLTPNFKSNFDLAEDAKLQLSKDTYDDDLDNLLAQIGDQYADLFLAAKNLSDAILLSDILRVNTEITKAPLSASMIKRYDEHHQDLTLLKALVRQQLPEKYKEIFFDQSKNGYAGYIDGGASQEEFYKFIKPILEKMDGTEELLVKLNREDLLRKQRTFDNGSIPHQIHLGELHAILRRQEDFYPFLKDNREKIEKILTFRIPYYVGPLARGNSRFAWMTRKSEETITPWNFEEVVDKGASAQSFIERMTNFDKNLPNEKVLPKHSLLYEYFTVYNELTKVKYVTEGMRKPAFLSGEQKKAIVDLLFKTNRKVTVKQLKEDYFKKIECFDSVEISGVEDRFNASLGTYHDLLKIIKDKDFLDNEENEDILEDIVLTLTLFEDREMIEERLKTYAHLFDDKVMKQLKRRRYTGWGRLSRKLINGIRDKQSGKTILDFLKSDGFANRNFMQLIHDDSLTFKEDIQKAQVSGQGDSLHEHIANLAGSPAIKKGILQTVKVVDELVKVMGRHKPENIVIEMARENQTTQKGQKNSRERMKRIEEGIKELGSQILKEHPVENTQLQNEKLYLYYLQNGRDMYVDQELDINRLSDYDVDHIVPQSFLKDDSIDNKVLTRSDKARGKSDNVPSEEVVKKMKNYWRQLLNAKLITQRKFDNLTKAERGGLSELDKAGFIKRQLVETRQITKHVAQILDSRMNTKYDENDKLIREVKVITLKSKLVSDFRKDFQFYKVREINNYHHAHDAYLNAVVGTALIKKYPKLESEFVYGDYKVYDVRKMIAKSEQEIGKATAKYFFYSNIMNFFKTEITLANGEIRKRPLIETNGETGEIVWDKGRDFATVRKVLSMPQVNIVKKTEVQTGGFSKESILPKRNSDKLIARKKDWDPKKYGGFDSPTVAYSVLVVAKVEKGKSKKLKSVKELLGITIMERSSFEKNPIDFLEAKGYKEVKKDLIIKLPKYSLFELENGRKRMLASAGELQKGNELALPSKYVNFLYLASHYEKLKGSPEDNEQKQLFVEQHKHYLDEIIEQISEFSKRVILADANLDKVLSAYNKHRDKPIREQAENIIHLFTLTNLGAPAAFKYFDTTIDRKRYTSTKEVLDATLIHQSITGLYETRIDLSQLGGDGGGSSEAAAKGGGGGVLNLEEEYRLHEKPVPSSIDPSWLQLFPTVWAERAGMGLANQVPPVVVELRSGASPVAVRQYPMSKEAREGIRPHIQRFLDLGVLVPCQSPWNTPLLPVKKPGTNDYRPVQDLREINKRVQDIHPTVPNPYNLLSSLPPSHTWYSVLDLKDAFFCLKLHPNSQPLFAFEWRDPEKGNTGQLTWTRLPQGFKNSPTLFNEALHRDLAPFRALNPQVVLLQYVDDLLVAAPTYRDCKEGTQKLLQELSKLGYRVSAKKAQLCQKEVTYLGYLLKEGKRWLTPARKATVMKIPPPTTPRQVREFLGKAGFCRLFIPGFASLAAPLYPLTKPSIPFIWTEEHQKAFDRIKEALLSAPALALPDLTKPFTLYVDERAGVARGVLTQTLGPWRRPVAYLSKKLDPVASGWPTCLKAVAAVALLLKDADKLTLGQNVTVIASHSLESIVRQPPDRWMTNARMTHYQSLLLNERVSFAPPAVLNPATLLPVESEATPVHRCSEILAEETGTRRDLKDQPLPGVPAWYTDGSSFIAEGKRRAGAAIVDGKRTVWASSLPEGTSAQKAELVALTQALRLAEGKDINIYTDSRYAFATAHIHGAIYKQRGWLTSAGKDIKNKEEILALLEAIHLPKRVAIIHCPGHQKGNDPVATGNRRADEAAKQAALSTRVLAETTKPAGKRTADGSEFEKRTADGSEFESPKKKAKVE

SEQ ID NO: 911 - protein, 2098 aa, synthetic construct
MPAAKRVKLDGGDKKYSIGLDIGTNSVGWAVITDEYKVPSKKFKVLGNTDRHSIKKNLIGALLFDSGETAEATRLKRTARRRYTRRKNRICYLQEIFSNEMAKVDDSFFHRLEESFLVEEDKKHERHPIFGNIVDEVAYHEKYPTIYHLRKKLVDSTDKADLRLIYLALAHMIKFRGHFLIEGDLNPDNSDVDKLFIQLVQTYNQLFEENPINASGVDAKAILSARLSKSRRLENLIAQLPGEKKNGLFGNLIALSLGLTPNFKSNFDLAEDAKLQLSKDTYDDDLDNLLAQIGDQYADLFLAAKNLSDAILLSDILRVNTEITKAPLSASMIKRYDEHHQDLTLLKALVRQQLPEKYKEIFFDQSKNGYAGYIDGGASQEEFYKFIKPILEKMDGTEELLVKLNREDLLRKQRTFDNGSIPHQIHLGELHAILRRQEDFYPFLKDNREKIEKILTFRIPYYVGPLARGNSRFAWMTRKSEETITPWNFEEVVDKGASAQSFIERMTNFDKNLPNEKVLPKHSLLYEYFTVYNELTKVKYVTEGMRKPAFLSGEQKKAIVDLLFKTNRKVTVKQLKEDYFKKIECFDSVEISGVEDRFNASLGTYHDLLKIIKDKDFLDNEENEDILEDIVLTLTLFEDREMIEERLKTYAHLFDDKVMKQLKRRRYTGWGRLSRKLINGIRDKQSGKTILDFLKSDGFANRNFMQLIHDDSLTFKEDIQKAQVSGQGDSLHEHIANLAGSPAIKKGILQTVKVVDELVKVMGRHKPENIVIEMARENQTTQKGQKNSRERMKRIEEGIKELGSQILKEHPVENTQLQNEKLYLYYLQNGRDMYVDQELDINRLSDYDVDHIVPQSFLKDDSIDNKVLTRSDKARGKSDNVPSEEVVKKMKNYWRQLLNAKLITQRKFDNLTKAERGGLSELDKAGFIKRQLVETRQITKHVAQILDSRMNTKYDENDKLIREVKVITLKSKLVSDFRKDFQFYKVREINNYHHAHDAYLNAVVGTALIKKYPKLESEFVYGDYKVYDVRKMIAKSEQEIGKATAKYFFYSNIMNFFKTEITLANGEIRKRPLIETNGETGEIVWDKGRDFATVRKVLSMPQVNIVKKTEVQTGGFSKESILPKRNSDKLIARKKDWDPKKYGGFDSPTVAYSVLVVAKVEKGKSKKLKSVKELLGITIMERSSFEKNPIDFLEAKGYKEVKKDLIIKLPKYSLFELENGRKRMLASAGELQKGNELALPSKYVNFLYLASHYEKLKGSPEDNEQKQLFVEQHKHYLDEIIEQISEFSKRVILADANLDKVLSAYNKHRDKPIREQAENIIHLFTLTNLGAPAAFKYFDTTIDRKRYTSTKEVLDATLIHQSITGLYETRIDLSQLGGDGGGGGGSEAAAKGGGGSGGVLNLEEEYRLHEKPVPSSIDPSWLQLFPTVWAERAGMGLANQVPPVVVELRSGASPVAVRQYPMSKEAREGIRPHIQRFLDLGVLVPCQSPWNTPLLPVKKPGTNDYRPVQDLREINKRVQDIHPTVPNPYNLLSSLPPSHTWYSVLDLKDAFFCLKLHPNSQPLFAFEWRDPEKGNTGQLTWTRLPQGFKNSPTLFNEALHRDLAPFRALNPQVVLLQYVDDLLVAAPTYRDCKEGTQKLLQELSKLGYRVSAKKAQLCQKEVTYLGYLLKEGKRWLTPARKATVMKIPPPTTPRQVREFLGKAGFCRLFIPGFASLAAPLYPLTKPSIPFIWTEEHQKAFDRIKEALLSAPALALPDLTKPFTLYVDERAGVARGVLTQTLGPWRRPVAYLSKKLDPVASGWPTCLKAVAAVALLLKDADKLTLGQNVTVIASHSLESIVRQPPDRWMTNARMTHYQSLLLNERVSFAPPAVLNPATLLPVESEATPVHRCSEILAEETGTRRDLKDQPLPGVPAWYTDGSSFIAEGKRRAGAAIVDGKRTVWASSLPEGTSAQKAELVALTQALRLAEGKDINIYTDSRYAFATAHIHGAIYKQRGWLTSAGKDIKNKEEILALLEAIHLPKRVAIIHCPGHQKGNDPVATGNRRADEAAKQAALSTRVLAETTKPAGKRTADGSEFEKRTADGSEFESPKKKAKVE

SEQ ID NO: 912 - protein, 2094 aa, synthetic construct
MPAAKRVKLDGGDKKYSIGLDIGTNSVGWAVITDEYKVPSKKFKVLGNTDRHSIKKNLIGALLFDSGETAEATRLKRTARRRYTRRKNRICYLQEIFSNEMAKVDDSFFHRLEESFLVEEDKKHERHPIFGNIVDEVAYHEKYPTIYHLRKKLVDSTDKADLRLIYLALAHMIKFRGHFLIEGDLNPDNSDVDKLFIQLVQTYNQLFEENPINASGVDAKAILSARLSKSRRLENLIAQLPGEKKNGLFGNLIALSLGLTPNFKSNFDLAEDAKLQLSKDTYDDDLDNLLAQIGDQYADLFLAAKNLSDAILLSDILRVNTEITKAPLSASMIKRYDEHHQDLTLLKALVRQQLPEKYKEIFFDQSKNGYAGYIDGGASQEEFYKFIKPILEKMDGTEELLVKLNREDLLRKQRTFDNGSIPHQIHLGELHAILRRQEDFYPFLKDNREKIEKILTFRIPYYVGPLARGNSRFAWMTRKSEETITPWNFEEVVDKGASAQSFIERMTNFDKNLPNEKVLPKHSLLYEYFTVYNELTKVKYVTEGMRKPAFLSGEQKKAIVDLLFKTNRKVTVKQLKEDYFKKIECFDSVEISGVEDRFNASLGTYHDLLKIIKDKDFLDNEENEDILEDIVLTLTLFEDREMIEERLKTYAHLFDDKVMKQLKRRRYTGWGRLSRKLINGIRDKQSGKTILDFLKSDGFANRNFMQLIHDDSLTFKEDIQKAQVSGQGDSLHEHIANLAGSPAIKKGILQTVKVVDELVKVMGRHKPENIVIEMARENQTTQKGQKNSRERMKRIEEGIKELGSQILKEHPVENTQLQNEKLYLYYLQNGRDMYVDQELDINRLSDYDVDHIVPQSFLKDDSIDNKVLTRSDKARGKSDNVPSEEVVKKMKNYWRQLLNAKLITQRKFDNLTKAERGGLSELDKAGFIKRQLVETRQITKHVAQILDSRMNTKYDENDKLIREVKVITLKSKLVSDFRKDFQFYKVREINNYHHAHDAYLNAVVGTALIKKYPKLESEFVYGDYKVYDVRKMIAKSEQEIGKATAKYFFYSNIMNFFKTEITLANGEIRKRPLIETNGETGEIVWDKGRDFATVRKVLSMPQVNIVKKTEVQTGGFSKESILPKRNSDKLIARKKDWDPKKYGGFDSPTVAYSVLVVAKVEKGKSKKLKSVKELLGITIMERSSFEKNPIDFLEAKGYKEVKKDLIIKLPKYSLFELENGRKRMLASAGELQKGNELALPSKYVNFLYLASHYEKLKGSPEDNEQKQLFVEQHKHYLDEIIEQISEFSKRVILADANLDKVLSAYNKHRDKPIREQAENIIHLFTLTNLGAPAAFKYFDTTIDRKRYTSTKEVLDATLIHQSITGLYETRIDLSQLGGDGGGGSEAAAKPAPGGVLNLEEEYRLHEKPVPSSIDPSWLQLFPTVWAERAGMGLANQVPPVVVELRSGASPVAVRQYPMSKEAREGIRPHIQRFLDLGVLVPCQSPWNTPLLPVKKPGTNDYRPVQDLREINKRVQDIHPTVPNPYNLLSSLPPSHTWYSVLDLKDAFFCLKLHPNSQPLFAFEWRDPEKGNTGQLTWTRLPQGFKNSPTLFNEALHRDLAPFRALNPQVVLLQYVDDLLVAAPTYRDCKEGTQKLLQELSKLGYRVSAKKAQLCQKEVTYLGYLLKEGKRWLTPARKATVMKIPPPTTPRQVREFLGKAGFCRLFIPGFASLAAPLYPLTKPSIPFIWTEEHQKAFDRIKEALLSAPALALPDLTKPFTLYVDERAGVARGVLTQTLGPWRRPVAYLSKKLDPVASGWPTCLKAVAAVALLLKDADKLTLGQNVTVIASHSLESIVRQPPDRWMTNARMTHYQSLLLNERVSFAPPAVLNPATLLPVESEATPVHRCSEILAEETGTRRDLKDQPLPGVPAWYTDGSSFIAEGKRRAGAAIVDGKRTVWASSLPEGTSAQKAELVALTQALRLAEGKDINIYTDSRYAFATAHIHGAIYKQRGWLTSAGKDIKNKEEILALLEAIHLPKRVAIIHCPGHQKGNDPVATGNRRADEAAKQAALSTRVLAETTKPAGKRTADGSEFEKRTADGSEFESPKKKAKVE

SEQ ID NO: 913 - protein, 2092 aa, synthetic construct
MPAAKRVKLDGGDKKYSIGLDIGTNSVGWAVITDEYKVPSKKFKVLGNTDRHSIKKNLIGALLFDSGETAEATRLKRTARRRYTRRKNRICYLQEIFSNEMAKVDDSFFHRLEESFLVEEDKKHERHPIFGNIVDEVAYHEKYPTIYHLRKKLVDSTDKADLRLIYLALAHMIKFRGHFLIEGDLNPDNSDVDKLFIQLVQTYNQLFEENPINASGVDAKAILSARLSKSRRLENLIAQLPGEKKNGLFGNLIALSLGLTPNFKSNFDLAEDAKLQLSKDTYDDDLDNLLAQIGDQYADLFLAAKNLSDAILLSDILRVNTEITKAPLSASMIKRYDEHHQDLTLLKALVRQQLPEKYKEIFFDQSKNGYAGYIDGGASQEEFYKFIKPILEKMDGTEELLVKLNREDLLRKQRTFDNGSIPHQIHLGELHAILRRQEDFYPFLKDNREKIEKILTFRIPYYVGPLARGNSRFAWMTRKSEETITPWNFEEVVDKGASAQSFIERMTNFDKNLPNEKVLPKHSLLYEYFTVYNELTKVKYVTEGMRKPAFLSGEQKKAIVDLLFKTNRKVTVKQLKEDYFKKIECFDSVEISGVEDRFNASLGTYHDLLKIIKDKDFLDNEENEDILEDIVLTLTLFEDREMIEERLKTYAHLFDDKVMKQLKRRRYTGWGRLSRKLINGIRDKQSGKTILDFLKSDGFANRNFMQLIHDDSLTFKEDIQKAQVSGQGDSLHEHIANLAGSPAIKKGILQTVKVVDELVKVMGRHKPENIVIEMARENQTTQKGQKNSRERMKRIEEGIKELGSQILKEHPVENTQLQNEKLYLYYLQNGRDMYVDQELDINRLSDYDVDHIVPQSFLKDDSIDNKVLTRSDKARGKSDNVPSEEVVKKMKNYWRQLLNAKLITQRKFDNLTKAERGGLSELDKAGFIKRQLVETRQITKHVAQILDSRMNTKYDENDKLIREVKVITLKSKLVSDFRKDFQFYKVREINNYHHAHDAYLNAVVGTALIKKYPKLESEFVYGDYKVYDVRKMIAKSEQEIGKATAKYFFYSNIMNFFKTEITLANGEIRKRPLIETNGETGEIVWDKGRDFATVRKVLSMPQVNIVKKTEVQTGGFSKESILPKRNSDKLIARKKDWDPKKYGGFDSPTVAYSVLVVAKVEKGKSKKLKSVKELLGITIMERSSFEKNPIDFLEAKGYKEVKKDLIIKLPKYSLFELENGRKRMLASAGELQKGNELALPSKYVNFLYLASHYEKLKGSPEDNEQKQLFVEQHKHYLDEIIEQISEFSKRVILADANLDKVLSAYNKHRDKPIREQAENIIHLFTLTNLGAPAAFKYFDTTIDRKRYTSTKEVLDATLIHQSITGLYETRIDLSQLGGDGGGGGPAPGSSGGVLNLEEEYRLHEKPVPSSIDPSWLQLFPTVWAERAGMGLANQVPPVVVELRSGASPVAVRQYPMSKEAREGIRPHIQRFLDLGVLVPCQSPWNTPLLPVKKPGTNDYRPVQDLREINKRVQDIHPTVPNPYNLLSSLPPSHTWYSVLDLKDAFFCLKLHPNSQPLFAFEWRDPEKGNTGQLTWTRLPQGFKNSPTLFNEALHRDLAPFRALNPQVVLLQYVDDLLVAAPTYRDCKEGTQKLLQELSKLGYRVSAKKAQLCQKEVTYLGYLLKEGKRWLTPARKATVMKIPPPTTPRQVREFLGKAGFCRLFIPGFASLAAPLYPLTKPSIPFIWTEEHQKAFDRIKEALLSAPALALPDLTKPFTLYVDERAGVARGVLTQTLGPWRRPVAYLSKKLDPVASGWPTCLKAVAAVALLLKDADKLTLGQNVTVIASHSLESIVRQPPDRWMTNARMTHYQSLLLNERVSFAPPAVLNPATLLPVESEATPVHRCSEILAEETGTRRDLKDQPLPGVPAWYTDGSSFIAEGKRRAGAAIVDGKRTVWASSLPEGTSAQKAELVALTQALRLAEGKDINIYTDSRYAFATAHIHGAIYKQRGWLTSAGKDIKNKEEILALLEAIHLPKRVAIIHCPGHQKGNDPVATGNRRADEAAKQAALSTRVLAETTKPAGKRTADGSEFEKRTADGSEFESPKKKAKVE

SEQ ID NO: 914 - protein, 2089 aa, synthetic construct
MPAAKRVKLDGGDKKYSIGLDIGTNSVGWAVITDEYKVPSKKFKVLGNTDRHSIKKNLIGALLFDSGETAEATRLKRTARRRYTRRKNRICYLQEIFSNEMAKVDDSFFHRLEESFLVEEDKKHERHPIFGNIVDEVAYHEKYPTIYHLRKKLVDSTDKADLRLIYLALAHMIKFRGHFLIEGDLNPDNSDVDKLFIQLVQTYNQLFEENPINASGVDAKAILSARLSKSRRLENLIAQLPGEKKNGLFGNLIALSLGLTPNFKSNFDLAEDAKLQLSKDTYDDDLDNLLAQIGDQYADLFLAAKNLSDAILLSDILRVNTEITKAPLSASMIKRYDEHHQDLTLLKALVRQQLPEKYKEIFFDQSKNGYAGYIDGGASQEEFYKFIKPILEKMDGTEELLVKLNREDLLRKQRTFDNGSIPHQIHLGELHAILRRQEDFYPFLKDNREKIEKILTFRIPYYVGPLARGNSRFAWMTRKSEETITPWNFEEVVDKGASAQSFIERMTNFDKNLPNEKVLPKHSLLYEYFTVYNELTKVKYVTEGMRKPAFLSGEQKKAIVDLLFKTNRKVTVKQLKEDYFKKIECFDSVEISGVEDRFNASLGTYHDLLKIIKDKDFLDNEENEDILEDIVLTLTLFEDREMIEERLKTYAHLFDDKVMKQLKRRRYTGWGRLSRKLINGIRDKQSGKTILDFLKSDGFANRNFMQLIHDDSLTFKEDIQKAQVSGQGDSLHEHIANLAGSPAIKKGILQTVKVVDELVKVMGRHKPENIVIEMARENQTTQKGQKNSRERMKRIEEGIKELGSQILKEHPVENTQLQNEKLYLYYLQNGRDMYVDQELDINRLSDYDVDHIVPQSFLKDDSIDNKVLTRSDKARGKSDNVPSEEVVKKMKNYWRQLLNAKLITQRKFDNLTKAERGGLSELDKAGFIKRQLVETRQITKHVAQILDSRMNTKYDENDKLIREVKVITLKSKLVSDFRKDFQFYKVREINNYHHAHDAYLNAVVGTALIKKYPKLESEFVYGDYKVYDVRKMIAKSEQEIGKATAKYFFYSNIMNFFKTEITLANGEIRKRPLIETNGETGEIVWDKGRDFATVRKVLSMPQVNIVKKTEVQTGGFSKESILPKRNSDKLIARKKDWDPKKYGGFDSPTVAYSVLVVAKVEKGKSKKLKSVKELLGITIMERSSFEKNPIDFLEAKGYKEVKKDLIIKLPKYSLFELENGRKRMLASAGELQKGNELALPSKYVNFLYLASHYEKLKGSPEDNEQKQLFVEQHKHYLDEIIEQISEFSKRVILADANLDKVLSAYNKHRDKPIREQAENIIHLFTLTNLGAPAAFKYFDTTIDRKRYTSTKEVLDATLIHQSITGLYETRIDLSQLGGDGGPAPGGGGGVLNLEEEYRLHEKPVPSSIDPSWLQLFPTVWAERAGMGLANQVPPVVVELRSGASPVAVRQYPMSKEAREGIRPHIQRFLDLGVLVPCQSPWNTPLLPVKKPGTNDYRPVQDLREINKRVQDIHPTVPNPYNLLSSLPPSHTWYSVLDLKDAFFCLKLHPNSQPLFAFEWRDPEKGNTGQLTWTRLPQGFKNSPTLFNEALHRDLAPFRALNPQVVLLQYVDDLLVAAPTYRDCKEGTQKLLQELSKLGYRVSAKKAQLCQKEVTYLGYLLKEGKRWLTPARKATVMKIPPPTTPRQVREFLGKAGFCRLFIPGFASLAAPLYPLTKPSIPFIWTEEHQKAFDRIKEALLSAPALALPDLTKPFTLYVDERAGVARGVLTQTLGPWRRPVAYLSKKLDPVASGWPTCLKAVAAVALLLKDADKLTLGQNVTVIASHSLESIVRQPPDRWMTNARMTHYQSLLLNERVSFAPPAVLNPATLLPVESEATPVHRCSEILAEETGTRRDLKDQPLPGVPAWYTDGSSFIAEGKRRAGAAIVDGKRTVWASSLPEGTSAQKAELVALTQALRLAEGKDINIYTDSRYAFATAHIHGAIYKQRGWLTSAGKDIKNKEEILALLEAIHLPKRVAIIHCPGHQKGNDPVATGNRRADEAAKQAALSTRVLAETTKPAGKRTADGSEFEKRTADGSEFESPKKKAKVE

SEQ ID NO: 915 - protein, 2094 aa, synthetic construct
MPAAKRVKLDGGDKKYSIGLDIGTNSVGWAVITDEYKVPSKKFKVLGNTDRHSIKKNLIGALLFDSGETAEATRLKRTARRRYTRRKNRICYLQEIFSNEMAKVDDSFFHRLEESFLVEEDKKHERHPIFGNIVDEVAYHEKYPTIYHLRKKLVDSTDKADLRLIYLALAHMIKFRGHFLIEGDLNPDNSDVDKLFIQLVQTYNQLFEENPINASGVDAKAILSARLSKSRRLENLIAQLPGEKKNGLFGNLIALSLGLTPNFKSNFDLAEDAKLQLSKDTYDDDLDNLLAQIGDQYADLFLAAKNLSDAILLSDILRVNTEITKAPLSASMIKRYDEHHQDLTLLKALVRQQLPEKYKEIFFDQSKNGYAGYIDGGASQEEFYKFIKPILEKMDGTEELLVKLNREDLLRKQRTFDNGSIPHQIHLGELHAILRRQEDFYPFLKDNREKIEKILTFRIPYYVGPLARGNSRFAWMTRKSEETITPWNFEEVVDKGASAQSFIERMTNFDKNLPNEKVLPKHSLLYEYFTVYNELTKVKYVTEGMRKPAFLSGEQKKAIVDLLFKTNRKVTVKQLKEDYFKKIECFDSVEISGVEDRFNASLGTYHDLLKIIKDKDFLDNEENEDILEDIVLTLTLFEDREMIEERLKTYAHLFDDKVMKQLKRRRYTGWGRLSRKLINGIRDKQSGKTILDFLKSDGFANRNFMQLIHDDSLTFKEDIQKAQVSGQGDSLHEHIANLAGSPAIKKGILQTVKVVDELVKVMGRHKPENIVIEMARENQTTQKGQKNSRERMKRIEEGIKELGSQILKEHPVENTQLQNEKLYLYYLQNGRDMYVDQELDINRLSDYDVDHIVPQSFLKDDSIDNKVLTRSDKARGKSDNVPSEEVVKKMKNYWRQLLNAKLITQRKFDNLTKAERGGLSELDKAGFIKRQLVETRQITKHVAQILDSRMNTKYDENDKLIREVKVITLKSKLVSDFRKDFQFYKVREINNYHHAHDAYLNAVVGTALIKKYPKLESEFVYGDYKVYDVRKMIAKSEQEIGKATAKYFFYSNIMNFFKTEITLANGEIRKRPLIETNGETGEIVWDKGRDFATVRKVLSMPQVNIVKKTEVQTGGFSKESILPKRNSDKLIARKKDWDPKKYGGFDSPTVAYSVLVVAKVEKGKSKKLKSVKELLGITIMERSSFEKNPIDFLEAKGYKEVKKDLIIKLPKYSLFELENGRKRMLASAGELQKGNELALPSKYVNFLYLASHYEKLKGSPEDNEQKQLFVEQHKHYLDEIIEQISEFSKRVILADANLDKVLSAYNKHRDKPIREQAENIIHLFTLTNLGAPAAFKYFDTTIDRKRYTSTKEVLDATLIHQSITGLYETRIDLSQLGGDGGGSSGGSEAAAKGGVLNLEEEYRLHEKPVPSSIDPSWLQLFPTVWAERAGMGLANQVPPVVVELRSGASPVAVRQYPMSKEAREGIRPHIQRFLDLGVLVPCQSPWNTPLLPVKKPGTNDYRPVQDLREINKRVQDIHPTVPNPYNLLSSLPPSHTWYSVLDLKDAFFCLKLHPNSQPLFAFEWRDPEKGNTGQLTWTRLPQGFKNSPTLFNEALHRDLAPFRALNPQVVLLQYVDDLLVAAPTYRDCKEGTQKLLQELSKLGYRVSAKKAQLCQKEVTYLGYLLKEGKRWLTPARKATVMKIPPPTTPRQVREFLGKAGFCRLFIPGFASLAAPLYPLTKPSIPFIWTEEHQKAFDRIKEALLSAPALALPDLTKPFTLYVDERAGVARGVLTQTLGPWRRPVAYLSKKLDPVASGWPTCLKAVAAVALLLKDADKLTLGQNVTVIASHSLESIVRQPPDRWMTNARMTHYQSLLLNERVSFAPPAVLNPATLLPVESEATPVHRCSEILAEETGTRRDLKDQPLPGVPAWYTDGSSFIAEGKRRAGAAIVDGKRTVWASSLPEGTSAQKAELVALTQALRLAEGKDINIYTDSRYAFATAHIHGAIYKQRGWLTSAGKDIKNKEEILALLEAIHLPKRVAIIHCPGHQKGNDPVATGNRRADEAAKQAALSTRVLAETTKPAGKRTADGSEFEKRTADGSEFESPKKKAKVE

SEQ ID NO: 916 - protein, 2092 aa, synthetic construct
MPAAKRVKLDGGDKKYSIGLDIGTNSVGWAVITDEYKVPSKKFKVLGNTDRHSIKKNLIGALLFDSGETAEATRLKRTARRRYTRRKNRICYLQEIFSNEMAKVDDSFFHRLEESFLVEEDKKHERHPIFGNIVDEVAYHEKYPTIYHLRKKLVDSTDKADLRLIYLALAHMIKFRGHFLIEGDLNPDNSDVDKLFIQLVQTYNQLFEENPINASGVDAKAILSARLSKSRRLENLIAQLPGEKKNGLFGNLIALSLGLTPNFKSNFDLAEDAKLQLSKDTYDDDLDNLLAQIGDQYADLFLAAKNLSDAILLSDILRVNTEITKAPLSASMIKRYDEHHQDLTLLKALVRQQLPEKYKEIFFDQSKNGYAGYIDGGASQEEFYKFIKPILEKMDGTEELLVKLNREDLLRKQRTFDNGSIPHQIHLGELHAILRRQEDFYPFLKDNREKIEKILTFRIPYYVGPLARGNSRFAWMTRKSEETITPWNFEEVVDKGASAQSFIERMTNFDKNLPNEKVLPKHSLLYEYFTVYNELTKVKYVTEGMRKPAFLSGEQKKAIVDLLFKTNRKVTVKQLKEDYFKKIECFDSVEISGVEDRFNASLGTYHDLLKIIKDKDFLDNEENEDILEDIVLTLTLFEDREMIEERLKTYAHLFDDKVMKQLKRRRYTGWGRLSRKLINGIRDKQSGKTILDFLKSDGFANRNFMQLIHDDSLTFKEDIQKAQVSGQGDSLHEHIANLAGSPAIKKGILQTVKVVDELVKVMGRHKPENIVIEMARENQTTQKGQKNSRERMKRIEEGIKELGSQILKEHPVENTQLQNEKLYLYYLQNGRDMYVDQELDINRLSDYDVDHIVPQSFLKDDSIDNKVLTRSDKARGKSDNVPSEEVVKKMKNYWRQLLNAKLITQRKFDNLTKAERGGLSELDKAGFIKRQLVETRQITKHVAQILDSRMNTKYDENDKLIREVKVITLKSKLVSDFRKDFQFYKVREINNYHHAHDAYLNAVVGTALIKKYPKLESEFVYGDYKVYDVRKMIAKSEQEIGKATAKYFFYSNIMNFFKTEITLANGEIRKRPLIETNGETGEIVWDKGRDFATVRKVLSMPQVNIVKKTEVQTGGFSKESILPKRNSDKLIARKKDWDPKKYGGFDSPTVAYSVLVVAKVEKGKSKKLKSVKELLGITIMERSSFEKNPIDFLEAKGYKEVKKDLIIKLPKYSLFELENGRKRMLASAGELQKGNELALPSKYVNFLYLASHYEKLKGSPEDNEQKQLFVEQHKHYLDEIIEQISEFSKRVILADANLDKVLSAYNKHRDKPIREQAENIIHLFTLTNLGAPAAFKYFDTTIDRKRYTSTKEVLDATLIHQSITGLYETRIDLSQLGGDGGPAPAPAPAPGGVLNLEEEYRLHEKPVPSSIDPSWLQLFPTVWAERAGMGLANQVPPVVVELRSGASPVAVRQYPMSKEAREGIRPHIQRFLDLGVLVPCQSPWNTPLLPVKKPGTNDYRPVQDLREINKRVQDIHPTVPNPYNLLSSLPPSHTWYSVLDLKDAFFCLKLHPNSQPLFAFEWRDPEKGNTGQLTWTRLPQGFKNSPTLFNEALHRDLAPFRALNPQVVLLQYVDDLLVAAPTYRDCKEGTQKLLQELSKLGYRVSAKKAQLCQKEVTYLGYLLKEGKRWLTPARKATVMKIPPPTTPRQVREFLGKAGFCRLFIPGFASLAAPLYPLTKPSIPFIWTEEHQKAFDRIKEALLSAPALALPDLTKPFTLYVDERAGVARGVLTQTLGPWRRPVAYLSKKLDPVASGWPTCLKAVAAVALLLKDADKLTLGQNVTVIASHSLESIVRQPPDRWMTNARMTHYQSLLLNERVSFAPPAVLNPATLLPVESEATPVHRCSEILAEETGTRRDLKDQPLPGVPAWYTDGSSFIAEGKRRAGAAIVDGKRTVWASSLPEGTSAQKAELVALTQALRLAEGKDINIYTDSRYAFATAHIHGAIYKQRGWLTSAGKDIKNKEEILALLEAIHLPKRVAIIHCPGHQKGNDPVATGNRRADEAAKQAALSTRVLAETTKPAGKRTADGSEFEKRTADGSEFESPKKKAKVE

SEQ ID NO: 917 - protein, 2093 aa, synthetic construct
MPAAKRVKLDGGDKKYSIGLDIGTNSVGWAVITDEYKVPSKKFKVLGNTDRHSIKKNLIGALLFDSGETAEATRLKRTARRRYTRRKNRICYLQEIFSNEMAKVDDSFFHRLEESFLVEEDKKHERHPIFGNIVDEVAYHEKYPTIYHLRKKLVDSTDKADLRLIYLALAHMIKFRGHFLIEGDLNPDNSDVDKLFIQLVQTYNQLFEENPINASGVDAKAILSARLSKSRRLENLIAQLPGEKKNGLFGNLIALSLGLTPNFKSNFDLAEDAKLQLSKDTYDDDLDNLLAQIGDQYADLFLAAKNLSDAILLSDILRVNTEITKAPLSASMIKRYDEHHQDLTLLKALVRQQLPEKYKEIFFDQSKNGYAGYIDGGASQEEFYKFIKPILEKMDGTEELLVKLNREDLLRKQRTFDNGSIPHQIHLGELHAILRRQEDFYPFLKDNREKIEKILTFRIPYYVGPLARGNSRFAWMTRKSEETITPWNFEEVVDKGASAQSFIERMTNFDKNLPNEKVLPKHSLLYEYFTVYNELTKVKYVTEGMRKPAFLSGEQKKAIVDLLFKTNRKVTVKQLKEDYFKKIECFDSVEISGVEDRFNASLGTYHDLLKIIKDKDFLDNEENEDILEDIVLTLTLFEDREMIEERLKTYAHLFDDKVMKQLKRRRYTGWGRLSRKLINGIRDKQSGKTILDFLKSDGFANRNFMQLIHDDSLTFKEDIQKAQVSGQGDSLHEHIANLAGSPAIKKGILQTVKVVDELVKVMGRHKPENIVIEMARENQTTQKGQKNSRERMKRIEEGIKELGSQILKEHPVENTQLQNEKLYLYYLQNGRDMYVDQELDINRLSDYDVDHIVPQSFLKDDSIDNKVLTRSDKARGKSDNVPSEEVVKKMKNYWRQLLNAKLITQRKFDNLTKAERGGLSELDKAGFIKRQLVETRQITKHVAQILDSRMNTKYDENDKLIREVKVITLKSKLVSDFRKDFQFYKVREINNYHHAHDAYLNAVVGTALIKKYPKLESEFVYGDYKVYDVRKMIAKSEQEIGKATAKYFFYSNIMNFFKTEITLANGEIRKRPLIETNGETGEIVWDKGRDFATVRKVLSMPQVNIVKKTEVQTGGFSKESILPKRNSDKLIARKKDWDPKKYGGFDSPTVAYSVLVVAKVEKGKSKKLKSVKELLGITIMERSSFEKNPIDFLEAKGYKEVKKDLIIKLPKYSLFELENGRKRMLASAGELQKGNELALPSKYVNFLYLASHYEKLKGSPEDNEQKQLFVEQHKHYLDEIIEQISEFSKRVILADANLDKVLSAYNKHRDKPIREQAENIIHLFTLTNLGAPAAFKYFDTTIDRKRYTSTKEVLDATLIHQSITGLYETRIDLSQLGGDGGEAAAKEAAAKGGVLNLEEEYRLHEKPVPSSIDPSWLQLFPTVWAERAGMGLANQVPPVVVELRSGASPVAVRQYPMSKEAREGIRPHIQRFLDLGVLVPCQSPWNTPLLPVKKPGTNDYRPVQDLREINKRVQDIHPTVPNPYNLLSSLPPSHTWYSVLDLKDAFFCLKLHPNSQPLFAFEWRDPEKGNTGQLTWTRLPQGFKNSPTLFNEALHRDLAPFRALNPQVVLLQYVDDLLVAAPTYRDCKEGTQKLLQELSKLGYRVSAKKAQLCQKEVTYLGYLLKEGKRWLTPARKATVMKIPPPTTPRQVREFLGKAGFCRLFIPGFASLAAPLYPLTKPSIPFIWTEEHQKAFDRIKEALLSAPALALPDLTKPFTLYVDERAGVARGVLTQTLGPWRRPVAYLSKKLDPVASGWPTCLKAVAAVALLLKDADKLTLGQNVTVIASHSLESIVRQPPDRWMTNARMTHYQSLLLNERVSFAPPAVLNPATLLPVESEATPVHRCSEILAEETGTRRDLKDQPLPGVPAWYTDGSSFIAEGKRRAGAAIVDGKRTVWASSLPEGTSAQKAELVALTQALRLAEGKDINIYTDSRYAFATAHIHGAIYKQRGWLTSAGKDIKNKEEILALLEAIHLPKRVAIIHCPGHQKGNDPVATGNRRADEAAKQAALSTRVLAETTKPAGKRTADGSEFEKRTADGSEFESPKKKAKVE

SEQ ID NO: 918 - protein, 2092 aa, synthetic construct
MPAAKRVKLDGGDKKYSIGLDIGTNSVGWAVITDEYKVPSKKFKVLGNTDRHSIKKNLIGALLFDSGETAEATRLKRTARRRYTRRKNRICYLQEIFSNEMAKVDDSFFHRLEESFLVEEDKKHERHPIFGNIVDEVAYHEKYPTIYHLRKKLVDSTDKADLRLIYLALAHMIKFRGHFLIEGDLNPDNSDVDKLFIQLVQTYNQLFEENPINASGVDAKAILSARLSKSRRLENLIAQLPGEKKNGLFGNLIALSLGLTPNFKSNFDLAEDAKLQLSKDTYDDDLDNLLAQIGDQYADLFLAAKNLSDAILLSDILRVNTEITKAPLSASMIKRYDEHHQDLTLLKALVRQQLPEKYKEIFFDQSKNGYAGYIDGGASQEEFYKFIKPILEKMDGTEELLVKLNREDLLRKQRTFDNGSIPHQIHLGELHAILRRQEDFYPFLKDNREKIEKILTFRIPYYVGPLARGNSRFAWMTRKSEETITPWNFEEVVDKGASAQSFIERMTNFDKNLPNEKVLPKHSLLYEYFTVYNELTKVKYVTEGMRKPAFLSGEQKKAIVDLLFKTNRKVTVKQLKEDYFKKIECFDSVEISGVEDRFNASLGTYHDLLKIIKDKDFLDNEENEDILEDIVLTLTLFEDREMIEERLKTYAHLFDDKVMKQLKRRRYTGWGRLSRKLINGIRDKQSGKTILDFLKSDGFANRNFMQLIHDDSLTFKEDIQKAQVSGQGDSLHEHIANLAGSPAIKKGILQTVKVVDELVKVMGRHKPENIVIEMARENQTTQKGQKNSRERMKRIEEGIKELGSQILKEHPVENTQLQNEKLYLYYLQNGRDMYVDQELDINRLSDYDVDHIVPQSFLKDDSIDNKVLTRSDKARGKSDNVPSEEVVKKMKNYWRQLLNAKLITQRKFDNLTKAERGGLSELDKAGFIKRQLVETRQITKHVAQILDSRMNTKYDENDKLIREVKVITLKSKLVSDFRKDFQFYKVREINNYHHAHDAYLNAVVGTALIKKYPKLESEFVYGDYKVYDVRKMIAKSEQEIGKATAKYFFYSNIMNFFKTEITLANGEIRKRPLIETNGETGEIVWDKGRDFATVRKVLSMPQVNIVKKTEVQTGGFSKESILPKRNSDKLIARKKDWDPKKYGGFDSPTVAYSVLVVAKVEKGKSKKLKSVKELLGITIMERSSFEKNPIDFLEAKGYKEVKKDLIIKLPKYSLFELENGRKRMLASAGELQKGNELALPSKYVNFLYLASHYEKLKGSPEDNEQKQLFVEQHKHYLDEIIEQISEFSKRVILADANLDKVLSAYNKHRDKPIREQAENIIHLFTLTNLGAPAAFKYFDTTIDRKRYTSTKEVLDATLIHQSITGLYETRIDLSQLGGDGGGSSGGGGGSGGVLNLEEEYRLHEKPVPSSIDPSWLQLFPTVWAERAGMGLANQVPPVVVELRSGASPVAVRQYPMSKEAREGIRPHIQRFLDLGVLVPCQSPWNTPLLPVKKPGTNDYRPVQDLREINKRVQDIHPTVPNPYNLLSSLPPSHTWYSVLDLKDAFFCLKLHPNSQPLFAFEWRDPEKGNTGQLTWTRLPQGFKNSPTLFNEALHRDLAPFRALNPQVVLLQYVDDLLVAAPTYRDCKEGTQKLLQELSKLGYRVSAKKAQLCQKEVTYLGYLLKEGKRWLTPARKATVMKIPPPTTPRQVREFLGKAGFCRLFIPGFASLAAPLYPLTKPSIPFIWTEEHQKAFDRIKEALLSAPALALPDLTKPFTLYVDERAGVARGVLTQTLGPWRRPVAYLSKKLDPVASGWPTCLKAVAAVALLLKDADKLTLGQNVTVIASHSLESIVRQPPDRWMTNARMTHYQSLLLNERVSFAPPAVLNPATLLPVESEATPVHRCSEILAEETGTRRDLKDQPLPGVPAWYTDGSSFIAEGKRRAGAAIVDGKRTVWASSLPEGTSAQKAELVALTQALRLAEGKDINIYTDSRYAFATAHIHGAIYKQRGWLTSAGKDIKNKEEILALLEAIHLPKRVAIIHCPGHQKGNDPVATGNRRADEAAKQAALSTRVLAETTKPAGKRTADGSEFEKRTADGSEFESPKKKAKVE

SEQ ID NO: 919 - protein, 2094 aa, synthetic construct
MPAAKRVKLDGGDKKYSIGLDIGTNSVGWAVITDEYKVPSKKFKVLGNTDRHSIKKNLIGALLFDSGETAEATRLKRTARRRYTRRKNRICYLQEIFSNEMAKVDDSFFHRLEESFLVEEDKKHERHPIFGNIVDEVAYHEKYPTIYHLRKKLVDSTDKADLRLIYLALAHMIKFRGHFLIEGDLNPDNSDVDKLFIQLVQTYNQLFEENPINASGVDAKAILSARLSKSRRLENLIAQLPGEKKNGLFGNLIALSLGLTPNFKSNFDLAEDAKLQLSKDTYDDDLDNLLAQIGDQYADLFLAAKNLSDAILLSDILRVNTEITKAPLSASMIKRYDEHHQDLTLLKALVRQQLPEKYKEIFFDQSKNGYAGYIDGGASQEEFYKFIKPILEKMDGTEELLVKLNREDLLRKQRTFDNGSIPHQIHLGELHAILRRQEDFYPFLKDNREKIEKILTFRIPYYVGPLARGNSRFAWMTRKSEETITPWNFEEVVDKGASAQSFIERMTNFDKNLPNEKVLPKHSLLYEYFTVYNELTKVKYVTEGMRKPAFLSGEQKKAIVDLLFKTNRKVTVKQLKEDYFKKIECFDSVEISGVEDRFNASLGTYHDLLKIIKDKDFLDNEENEDILEDIVLTLTLFEDREMIEERLKTYAHLFDDKVMKQLKRRRYTGWGRLSRKLINGIRDKQSGKTILDFLKSDGFANRNFMQLIHDDSLTFKEDIQKAQVSGQGDSLHEHIANLAGSPAIKKGILQTVKVVDELVKVMGRHKPENIVIEMARENQTTQKGQKNSRERMKRIEEGIKELGSQILKEHPVENTQLQNEKLYLYYLQNGRDMYVDQELDINRLSDYDVDHIVPQSFLKDDSIDNKVLTRSDKARGKSDNVPSEEVVKKMKNYWRQLLNAKLITQRKFDNLTKAERGGLSELDKAGFIKRQLVETRQITKHVAQILDSRMNTKYDENDKLIREVKVITLKSKLVSDFRKDFQFYKVREINNYHHAHDAYLNAVVGTALIKKYPKLESEFVYGDYKVYDVRKMIAKSEQEIGKATAKYFFYSNIMNFFKTEITLANGEIRKRPLIETNGETGEIVWDKGRDFATVRKVLSMPQVNIVKKTEVQTGGFSKESILPKRNSDKLIARKKDWDPKKYGGFDSPTVAYSVLVVAKVEKGKSKKLKSVKELLGITIMERSSFEKNPIDFLEAKGYKEVKKDLIIKLPKYSLFELENGRKRMLASAGELQKGNELALPSKYVNFLYLASHYEKLKGSPEDNEQKQLFVEQHKHYLDEIIEQISEFSKRVILADANLDKVLSAYNKHRDKPIREQAENIIHLFTLTNLGAPAAFKYFDTTIDRKRYTSTKEVLDATLIHQSITGLYETRIDLSQLGGDGGEAAAKGSSPAPGGVLNLEEEYRLHEKPVPSSIDPSWLQLFPTVWAERAGMGLANQVPPVVVELRSGASPVAVRQYPMSKEAREGIRPHIQRFLDLGVLVPCQSPWNTPLLPVKKPGTNDYRPVQDLREINKRVQDIHPTVPNPYNLLSSLPPSHTWYSVLDLKDAFFCLKLHPNSQPLFAFEWRDPEKGNTGQLTWTRLPQGFKNSPTLFNEALHRDLAPFRALNPQVVLLQYVDDLLVAAPTYRDCKEGTQKLLQELSKLGYRVSAKKAQLCQKEVTYLGYLLKEGKRWLTPARKATVMKIPPPTTPRQVREFLGKAGFCRLFIPGFASLAAPLYPLTKPSIPFIWTEEHQKAFDRIKEALLSAPALALPDLTKPFTLYVDERAGVARGVLTQTLGPWRRPVAYLSKKLDPVASGWPTCLKAVAAVALLLKDADKLTLGQNVTVIASHSLESIVRQPPDRWMTNARMTHYQSLLLNERVSFAPPAVLNPATLLPVESEATPVHRCSEILAEETGTRRDLKDQPLPGVPAWYTDGSSFIAEGKRRAGAAIVDGKRTVWASSLPEGTSAQKAELVALTQALRLAEGKDINIYTDSRYAFATAHIHGAIYKQRGWLTSAGKDIKNKEEILALLEAIHLPKRVAIIHCPGHQKGNDPVATGNRRADEAAKQAALSTRVLAETTKPAGKRTADGSEFEKRTADGSEFESPKKKAKVE

SEQ ID NO: 920 - protein, 2094 aa, synthetic construct
MPAAKRVKLDGGDKKYSIGLDIGTNSVGWAVITDEYKVPSKKFKVLGNTDRHSIKKNLIGALLFDSGETAEATRLKRTARRRYTRRKNRICYLQEIFSNEMAKVDDSFFHRLEESFLVEEDKKHERHPIFGNIVDEVAYHEKYPTIYHLRKKLVDSTDKADLRLIYLALAHMIKFRGHFLIEGDLNPDNSDVDKLFIQLVQTYNQLFEENPINASGVDAKAILSARLSKSRRLENLIAQLPGEKKNGLFGNLIALSLGLTPNFKSNFDLAEDAKLQLSKDTYDDDLDNLLAQIGDQYADLFLAAKNLSDAILLSDILRVNTEITKAPLSASMIKRYDEHHQDLTLLKALVRQQLPEKYKEIFFDQSKNGYAGYIDGGASQEEFYKFIKPILEKMDGTEELLVKLNREDLLRKQRTFDNGSIPHQIHLGELHAILRRQEDFYPFLKDNREKIEKILTFRIPYYVGPLARGNSRFAWMTRKSEETITPWNFEEVVDKGASAQSFIERMTNFDKNLPNEKVLPKHSLLYEYFTVYNELTKVKYVTEGMRKPAFLSGEQKKAIVDLLFKTNRKVTVKQLKEDYFKKIECFDSVEISGVEDRFNASLGTYHDLLKIIKDKDFLDNEENEDILEDIVLTLTLFEDREMIEERLKTYAHLFDDKVMKQLKRRRYTGWGRLSRKLINGIRDKQSGKTILDFLKSDGFANRNFMQLIHDDSLTFKEDIQKAQVSGQGDSLHEHIANLAGSPAIKKGILQTVKVVDELVKVMGRHKPENIVIEMARENQTTQKGQKNSRERMKRIEEGIKELGSQILKEHPVENTQLQNEKLYLYYLQNGRDMYVDQELDINRLSDYDVDHIVPQSFLKDDSIDNKVLTRSDKARGKSDNVPSEEVVKKMKNYWRQLLNAKLITQRKFDNLTKAERGGLSELDKAGFIKRQLVETRQITKHVAQILDSRMNTKYDENDKLIREVKVITLKSKLVSDFRKDFQFYKVREINNYHHAHDAYLNAVVGTALIKKYPKLESEFVYGDYKVYDVRKMIAKSEQEIGKATAKYFFYSNIMNFFKTEITLANGEIRKRPLIETNGETGEIVWDKGRDFATVRKVLSMPQVNIVKKTEVQTGGFSKESILPKRNSDKLIARKKDWDPKKYGGFDSPTVAYSVLVVAKVEKGKSKKLKSVKELLGITIMERSSFEKNPIDFLEAKGYKEVKKDLIIKLPKYSLFELENGRKRMLASAGELQKGNELALPSKYVNFLYLASHYEKLKGSPEDNEQKQLFVEQHKHYLDEIIEQISEFSKRVILADANLDKVLSAYNKHRDKPIREQAENIIHLFTLTNLGAPAAFKYFDTTIDRKRYTSTKEVLDATLIHQSITGLYETRIDLSQLGGDGGGSSGGGEAAAKGGVLNLEEEYRLHEKPVPSSIDPSWLQLFPTVWAERAGMGLANQVPPVVVELRSGASPVAVRQYPMSKEAREGIRPHIQRFLDLGVLVPCQSPWNTPLLPVKKPGTNDYRPVQDLREINKRVQDIHPTVPNPYNLLSSLPPSHTWYSVLDLKDAFFCLKLHPNSQPLFAFEWRDPEKGNTGQLTWTRLPQGFKNSPTLFNEALHRDLAPFRALNPQVVLLQYVDDLLVAAPTYRDCKEGTQKLLQELSKLGYRVSAKKAQLCQKEVTYLGYLLKEGKRWLTPARKATVMKIPPPTTPRQVREFLGKAGFCRLFIPGFASLAAPLYPLTKPSIPFIWTEEHQKAFDRIKEALLSAPALALPDLTKPFTLYVDERAGVARGVLTQTLGPWRRPVAYLSKKLDPVASGWPTCLKAVAAVALLLKDADKLTLGQNVTVIASHSLESIVRQPPDRWMTNARMTHYQSLLLNERVSFAPPAVLNPATLLPVESEATPVHRCSEILAEETGTRRDLKDQPLPGVPAWYTDGSSFIAEGKRRAGAAIVDGKRTVWASSLPEGTSAQKAELVALTQALRLAEGKDINIYTDSRYAFATAHIHGAIYKQRGWLTSAGKDIKNKEEILALLEAIHLPKRVAIIHCPGHQKGNDPVATGNRRADEAAKQAALSTRVLAETTKPAGKRTADGSEFEKRTADGSEFESPKKKAKVE

SEQ ID NO: 921 - protein, 2094 aa, synthetic construct
MPAAKRVKLDGGDKKYSIGLDIGTNSVGWAVITDEYKVPSKKFKVLGNTDRHSIKKNLIGALLFDSGETAEATRLKRTARRRYTRRKNRICYLQEIFSNEMAKVDDSFFHRLEESFLVEEDKKHERHPIFGNIVDEVAYHEKYPTIYHLRKKLVDSTDKADLRLIYLALAHMIKFRGHFLIEGDLNPDNSDVDKLFIQLVQTYNQLFEENPINASGVDAKAILSARLSKSRRLENLIAQLPGEKKNGLFGNLIALSLGLTPNFKSNFDLAEDAKLQLSKDTYDDDLDNLLAQIGDQYADLFLAAKNLSDAILLSDILRVNTEITKAPLSASMIKRYDEHHQDLTLLKALVRQQLPEKYKEIFFDQSKNGYAGYIDGGASQEEFYKFIKPILEKMDGTEELLVKLNREDLLRKQRTFDNGSIPHQIHLGELHAILRRQEDFYPFLKDNREKIEKILTFRIPYYVGPLARGNSRFAWMTRKSEETITPWNFEEVVDKGASAQSFIERMTNFDKNLPNEKVLPKHSLLYEYFTVYNELTKVKYVTEGMRKPAFLSGEQKKAIVDLLFKTNRKVTVKQLKEDYFKKIECFDSVEISGVEDRFNASLGTYHDLLKIIKDKDFLDNEENEDILEDIVLTLTLFEDREMIEERLKTYAHLFDDKVMKQLKRRRYTGWGRLSRKLINGIRDKQSGKTILDFLKSDGFANRNFMQLIHDDSLTFKEDIQKAQVSGQGDSLHEHIANLAGSPAIKKGILQTVKVVDELVKVMGRHKPENIVIEMARENQTTQKGQKNSRERMKRIEEGIKELGSQILKEHPVENTQLQNEKLYLYYLQNGRDMYVDQELDINRLSDYDVDHIVPQSFLKDDSIDNKVLTRSDKARGKSDNVPSEEVVKKMKNYWRQLLNAKLITQRKFDNLTKAERGGLSELDKAGFIKRQLVETRQITKHVAQILDSRMNTKYDENDKLIREVKVITLKSKLVSDFRKDFQFYKVREINNYHHAHDAYLNAVVGTALIKKYPKLESEFVYGDYKVYDVRKMIAKSEQEIGKATAKYFFYSNIMNFFKTEITLANGEIRKRPLIETNGETGEIVWDKGRDFATVRKVLSMPQVNIVKKTEVQTGGFSKESILPKRNSDKLIARKKDWDPKKYGGFDSPTVAYSVLVVAKVEKGKSKKLKSVKELLGITIMERSSFEKNPIDFLEAKGYKEVKKDLIIKLPKYSLFELENGRKRMLASAGELQKGNELALPSKYVNFLYLASHYEKLKGSPEDNEQKQLFVEQHKHYLDEIIEQISEFSKRVILADANLDKVLSAYNKHRDKPIREQAENIIHLFTLTNLGAPAAFKYFDTTIDRKRYTSTKEVLDATLIHQSITGLYETRIDLSQLGGDGGEAAAKPAPGGSGGVLNLEEEYRLHEKPVPSSIDPSWLQLFPTVWAERAGMGLANQVPPVVVELRSGASPVAVRQYPMSKEAREGIRPHIQRFLDLGVLVPCQSPWNTPLLPVKKPGTNDYRPVQDLREINKRVQDIHPTVPNPYNLLSSLPPSHTWYSVLDLKDAFFCLKLHPNSQPLFAFEWRDPEKGNTGQLTWTRLPQGFKNSPTLFNEALHRDLAPFRALNPQVVLLQYVDDLLVAAPTYRDCKEGTQKLLQELSKLGYRVSAKKAQLCQKEVTYLGYLLKEGKRWLTPARKATVMKIPPPTTPRQVREFLGKAGFCRLFIPGFASLAAPLYPLTKPSIPFIWTEEHQKAFDRIKEALLSAPALALPDLTKPFTLYVDERAGVARGVLTQTLGPWRRPVAYLSKKLDPVASGWPTCLKAVAAVALLLKDADKLTLGQNVTVIASHSLESIVRQPPDRWMTNARMTHYQSLLLNERVSFAPPAVLNPATLLPVESEATPVHRCSEILAEETGTRRDLKDQPLPGVPAWYTDGSSFIAEGKRRAGAAIVDGKRTVWASSLPEGTSAQKAELVALTQALRLAEGKDINIYTDSRYAFATAHIHGAIYKQRGWLTSAGKDIKNKEEILALLEAIHLPKRVAIIHCPGHQKGNDPVATGNRRADEAAKQAALSTRVLAETTKPAGKRTADGSEFEKRTADGSEFESPKKKAKVE

SEQ ID NO: 922 - protein, 2092 aa, synthetic construct
MPAAKRVKLDGGDKKYSIGLDIGTNSVGWAVITDEYKVPSKKFKVLGNTDRHSIKKNLIGALLFDSGETAEATRLKRTARRRYTRRKNRICYLQEIFSNEMAKVDDSFFHRLEESFLVEEDKKHERHPIFGNIVDEVAYHEKYPTIYHLRKKLVDSTDKADLRLIYLALAHMIKFRGHFLIEGDLNPDNSDVDKLFIQLVQTYNQLFEENPINASGVDAKAILSARLSKSRRLENLIAQLPGEKKNGLFGNLIALSLGLTPNFKSNFDLAEDAKLQLSKDTYDDDLDNLLAQIGDQYADLFLAAKNLSDAILLSDILRVNTEITKAPLSASMIKRYDEHHQDLTLLKALVRQQLPEKYKEIFFDQSKNGYAGYIDGGASQEEFYKFIKPILEKMDGTEELLVKLNREDLLRKQRTFDNGSIPHQIHLGELHAILRRQEDFYPFLKDNREKIEKILTFRIPYYVGPLARGNSRFAWMTRKSEETITPWNFEEVVDKGASAQSFIERMTNFDKNLPNEKVLPKHSLLYEYFTVYNELTKVKYVTEGMRKPAFLSGEQKKAIVDLLFKTNRKVTVKQLKEDYFKKIECFDSVEISGVEDRFNASLGTYHDLLKIIKDKDFLDNEENEDILEDIVLTLTLFEDREMIEERLKTYAHLFDDKVMKQLKRRRYTGWGRLSRKLINGIRDKQSGKTILDFLKSDGFANRNFMQLIHDDSLTFKEDIQKAQVSGQGDSLHEHIANLAGSPAIKKGILQTVKVVDELVKVMGRHKPENIVIEMARENQTTQKGQKNSRERMKRIEEGIKELGSQILKEHPVENTQLQNEKLYLYYLQNGRDMYVDQELDINRLSDYDVDHIVPQSFLKDDSIDNKVLTRSDKARGKSDNVPSEEVVKKMKNYWRQLLNAKLITQRKFDNLTKAERGGLSELDKAGFIKRQLVETRQITKHVAQILDSRMNTKYDENDKLIREVKVITLKSKLVSDFRKDFQFYKVREINNYHHAHDAYLNAVVGTALIKKYPKLESEFVYGDYKVYDVRKMIAKSEQEIGKATAKYFFYSNIMNFFKTEITLANGEIRKRPLIETNGETGEIVWDKGRDFATVRKVLSMPQVNIVKKTEVQTGGFSKESILPKRNSDKLIARKKDWDPKKYGGFDSPTVAYSVLVVAKVEKGKSKKLKSVKELLGITIMERSSFEKNPIDFLEAKGYKEVKKDLIIKLPKYSLFELENGRKRMLASAGELQKGNELALPSKYVNFLYLASHYEKLKGSPEDNEQKQLFVEQHKHYLDEIIEQISEFSKRVILADANLDKVLSAYNKHRDKPIREQAENIIHLFTLTNLGAPAAFKYFDTTIDRKRYTSTKEVLDATLIHQSITGLYETRIDLSQLGGDGGGSSPAPGGGGGVLNLEEEYRLHEKPVPSSIDPSWLQLFPTVWAERAGMGLANQVPPVVVELRSGASPVAVRQYPMSKEAREGIRPHIQRFLDLGVLVPCQSPWNTPLLPVKKPGTNDYRPVQDLREINKRVQDIHPTVPNPYNLLSSLPPSHTWYSVLDLKDAFFCLKLHPNSQPLFAFEWRDPEKGNTGQLTWTRLPQGFKNSPTLFNEALHRDLAPFRALNPQVVLLQYVDDLLVAAPTYRDCKEGTQKLLQELSKLGYRVSAKKAQLCQKEVTYLGYLLKEGKRWLTPARKATVMKIPPPTTPRQVREFLGKAGFCRLFIPGFASLAAPLYPLTKPSIPFIWTEEHQKAFDRIKEALLSAPALALPDLTKPFTLYVDERAGVARGVLTQTLGPWRRPVAYLSKKLDPVASGWPTCLKAVAAVALLLKDADKLTLGQNVTVIASHSLESIVRQPPDRWMTNARMTHYQSLLLNERVSFAPPAVLNPATLLPVESEATPVHRCSEILAEETGTRRDLKDQPLPGVPAWYTDGSSFIAEGKRRAGAAIVDGKRTVWASSLPEGTSAQKAELVALTQALRLAEGKDINIYTDSRYAFATAHIHGAIYKQRGWLTSAGKDIKNKEEILALLEAIHLPKRVAIIHCPGHQKGNDPVATGNRRADEAAKQAALSTRVLAETTKPAGKRTADGSEFEKRTADGSEFESPKKKAKVE

SEQ ID NO: 923 - protein, 2101 aa, synthetic construct
MPAAKRVKLDGGDKKYSIGLDIGTNSVGWAVITDEYKVPSKKFKVLGNTDRHSIKKNLIGALLFDSGETAEATRLKRTARRRYTRRKNRICYLQEIFSNEMAKVDDSFFHRLEESFLVEEDKKHERHPIFGNIVDEVAYHEKYPTIYHLRKKLVDSTDKADLRLIYLALAHMIKFRGHFLIEGDLNPDNSDVDKLFIQLVQTYNQLFEENPINASGVDAKAILSARLSKSRRLENLIAQLPGEKKNGLFGNLIALSLGLTPNFKSNFDLAEDAKLQLSKDTYDDDLDNLLAQIGDQYADLFLAAKNLSDAILLSDILRVNTEITKAPLSASMIKRYDEHHQDLTLLKALVRQQLPEKYKEIFFDQSKNGYAGYIDGGASQEEFYKFIKPILEKMDGTEELLVKLNREDLLRKQRTFDNGSIPHQIHLGELHAILRRQEDFYPFLKDNREKIEKILTFRIPYYVGPLARGNSRFAWMTRKSEETITPWNFEEVVDKGASAQSFIERMTNFDKNLPNEKVLPKHSLLYEYFTVYNELTKVKYVTEGMRKPAFLSGEQKKAIVDLLFKTNRKVTVKQLKEDYFKKIECFDSVEISGVEDRFNASLGTYHDLLKIIKDKDFLDNEENEDILEDIVLTLTLFEDREMIEERLKTYAHLFDDKVMKQLKRRRYTGWGRLSRKLINGIRDKQSGKTILDFLKSDGFANRNFMQLIHDDSLTFKEDIQKAQVSGQGDSLHEHIANLAGSPAIKKGILQTVKVVDELVKVMGRHKPENIVIEMARENQTTQKGQKNSRERMKRIEEGIKELGSQILKEHPVENTQLQNEKLYLYYLQNGRDMYVDQELDINRLSDYDVDHIVPQSFLKDDSIDNKVLTRSDKARGKSDNVPSEEVVKKMKNYWRQLLNAKLITQRKFDNLTKAERGGLSELDKAGFIKRQLVETRQITKHVAQILDSRMNTKYDENDKLIREVKVITLKSKLVSDFRKDFQFYKVREINNYHHAHDAYLNAVVGTALIKKYPKLESEFVYGDYKVYDVRKMIAKSEQEIGKATAKYFFYSNIMNFFKTEITLANGEIRKRPLIETNGETGEIVWDKGRDFATVRKVLSMPQVNIVKKTEVQTGGFSKESILPKRNSDKLIARKKDWDPKKYGGFDSPTVAYSVLVVAKVEKGKSKKLKSVKELLGITIMERSSFEKNPIDFLEAKGYKEVKKDLIIKLPKYSLFELENGRKRMLASAGELQKGNELALPSKYVNFLYLASHYEKLKGSPEDNEQKQLFVEQHKHYLDEIIEQISEFSKRVILADANLDKVLSAYNKHRDKPIREQAENIIHLFTLTNLGAPAAFKYFDTTIDRKRYTSTKEVLDATLIHQSITGLYETRIDLSQLGGDGGGSSGSSGSSGSSGSSGSSGGVLNLEEEYRLHEKPVPSSIDPSWLQLFPTVWAERAGMGLANQVPPVVVELRSGASPVAVRQYPMSKEAREGIRPHIQRFLDLGVLVPCQSPWNTPLLPVKKPGTNDYRPVQDLREINKRVQDIHPTVPNPYNLLSSLPPSHTWYSVLDLKDAFFCLKLHPNSQPLFAFEWRDPEKGNTGQLTWTRLPQGFKNSPTLFNEALHRDLAPFRALNPQVVLLQYVDDLLVAAPTYRDCKEGTQKLLQELSKLGYRVSAKKAQLCQKEVTYLGYLLKEGKRWLTPARKATVMKIPPPTTPRQVREFLGKAGFCRLFIPGFASLAAPLYPLTKPSIPFIWTEEHQKAFDRIKEALLSAPALALPDLTKPFTLYVDERAGVARGVLTQTLGPWRRPVAYLSKKLDPVASGWPTCLKAVAAVALLLKDADKLTLGQNVTVIASHSLESIVRQPPDRWMTNARMTHYQSLLLNERVSFAPPAVLNPATLLPVESEATPVHRCSEILAEETGTRRDLKDQPLPGVPAWYTDGSSFIAEGKRRAGAAIVDGKRTVWASSLPEGTSAQKAELVALTQALRLAEGKDINIYTDSRYAFATAHIHGAIYKQRGWLTSAGKDIKNKEEILALLEAIHLPKRVAIIHCPGHQKGNDPVATGNRRADEAAKQAALSTRVLAETTKPAGKRTADGSEFEKRTADGSEFESPKKKAKVE

SEQ ID NO: 924 - protein, 2092 aa, synthetic construct
MPAAKRVKLDGGDKKYSIGLDIGTNSVGWAVITDEYKVPSKKFKVLGNTDRHSIKKNLIGALLFDSGETAEATRLKRTARRRYTRRKNRICYLQEIFSNEMAKVDDSFFHRLEESFLVEEDKKHERHPIFGNIVDEVAYHEKYPTIYHLRKKLVDSTDKADLRLIYLALAHMIKFRGHFLIEGDLNPDNSDVDKLFIQLVQTYNQLFEENPINASGVDAKAILSARLSKSRRLENLIAQLPGEKKNGLFGNLIALSLGLTPNFKSNFDLAEDAKLQLSKDTYDDDLDNLLAQIGDQYADLFLAAKNLSDAILLSDILRVNTEITKAPLSASMIKRYDEHHQDLTLLKALVRQQLPEKYKEIFFDQSKNGYAGYIDGGASQEEFYKFIKPILEKMDGTEELLVKLNREDLLRKQRTFDNGSIPHQIHLGELHAILRRQEDFYPFLKDNREKIEKILTFRIPYYVGPLARGNSRFAWMTRKSEETITPWNFEEVVDKGASAQSFIERMTNFDKNLPNEKVLPKHSLLYEYFTVYNELTKVKYVTEGMRKPAFLSGEQKKAIVDLLFKTNRKVTVKQLKEDYFKKIECFDSVEISGVEDRFNASLGTYHDLLKIIKDKDFLDNEENEDILEDIVLTLTLFEDREMIEERLKTYAHLFDDKVMKQLKRRRYTGWGRLSRKLINGIRDKQSGKTILDFLKSDGFANRNFMQLIHDDSLTFKEDIQKAQVSGQGDSLHEHIANLAGSPAIKKGILQTVKVVDELVKVMGRHKPENIVIEMARENQTTQKGQKNSRERMKRIEEGIKELGSQILKEHPVENTQLQNEKLYLYYLQNGRDMYVDQELDINRLSDYDVDHIVPQSFLKDDSIDNKVLTRSDKARGKSDNVPSEEVVKKMKNYWRQLLNAKLITQRKFDNLTKAERGGLSELDKAGFIKRQLVETRQITKHVAQILDSRMNTKYDENDKLIREVKVITLKSKLVSDFRKDFQFYKVREINNYHHAHDAYLNAVVGTALIKKYPKLESEFVYGDYKVYDVRKMIAKSEQEIGKATAKYFFYSNIMNFFKTEITLANGEIRKRPLIETNGETGEIVWDKGRDFATVRKVLSMPQVNIVKKTEVQTGGFSKESILPKRNSDKLIARKKDWDPKKYGGFDSPTVAYSVLVVAKVEKGKSKKLKSVKELLGITIMERSSFEKNPIDFLEAKGYKEVKKDLIIKLPKYSLFELENGRKRMLASAGELQKGNELALPSKYVNFLYLASHYEKLKGSPEDNEQKQLFVEQHKHYLDEIIEQISEFSKRVILADANLDKVLSAYNKHRDKPIREQAENIIHLFTLTNLGAPAAFKYFDTTIDRKRYTSTKEVLDATLIHQSITGLYETRIDLSQLGGDGGGGSGSSPAPGGVLNLEEEYRLHEKPVPSSIDPSWLQLFPTVWAERAGMGLANQVPPVVVELRSGASPVAVRQYPMSKEAREGIRPHIQRFLDLGVLVPCQSPWNTPLLPVKKPGTNDYRPVQDLREINKRVQDIHPTVPNPYNLLSSLPPSHTWYSVLDLKDAFFCLKLHPNSQPLFAFEWRDPEKGNTGQLTWTRLPQGFKNSPTLFNEALHRDLAPFRALNPQVVLLQYVDDLLVAAPTYRDCKEGTQKLLQELSKLGYRVSAKKAQLCQKEVTYLGYLLKEGKRWLTPARKATVMKIPPPTTPRQVREFLGKAGFCRLFIPGFASLAAPLYPLTKPSIPFIWTEEHQKAFDRIKEALLSAPALALPDLTKPFTLYVDERAGVARGVLTQTLGPWRRPVAYLSKKLDPVASGWPTCLKAVAAVALLLKDADKLTLGQNVTVIASHSLESIVRQPPDRWMTNARMTHYQSLLLNERVSFAPPAVLNPATLLPVESEATPVHRCSEILAEETGTRRDLKDQPLPGVPAWYTDGSSFIAEGKRRAGAAIVDGKRTVWASSLPEGTSAQKAELVALTQALRLAEGKDINIYTDSRYAFATAHIHGAIYKQRGWLTSAGKDIKNKEEILALLEAIHLPKRVAIIHCPGHQKGNDPVATGNRRADEAAKQAALSTRVLAETTKPAGKRTADGSEFEKRTADGSEFESPKKKAKVE

SEQ ID NO: 925 - protein, 2094 aa, synthetic construct
MPAAKRVKLDGGDKKYSIGLDIGTNSVGWAVITDEYKVPSKKFKVLGNTDRHSIKKNLIGALLFDSGETAEATRLKRTARRRYTRRKNRICYLQEIFSNEMAKVDDSFFHRLEESFLVEEDKKHERHPIFGNIVDEVAYHEKYPTIYHLRKKLVDSTDKADLRLIYLALAHMIKFRGHFLIEGDLNPDNSDVDKLFIQLVQTYNQLFEENPINASGVDAKAILSARLSKSRRLENLIAQLPGEKKNGLFGNLIALSLGLTPNFKSNFDLAEDAKLQLSKDTYDDDLDNLLAQIGDQYADLFLAAKNLSDAILLSDILRVNTEITKAPLSASMIKRYDEHHQDLTLLKALVRQQLPEKYKEIFFDQSKNGYAGYIDGGASQEEFYKFIKPILEKMDGTEELLVKLNREDLLRKQRTFDNGSIPHQIHLGELHAILRRQEDFYPFLKDNREKIEKILTFRIPYYVGPLARGNSRFAWMTRKSEETITPWNFEEVVDKGASAQSFIERMTNFDKNLPNEKVLPKHSLLYEYFTVYNELTKVKYVTEGMRKPAFLSGEQKKAIVDLLFKTNRKVTVKQLKEDYFKKIECFDSVEISGVEDRFNASLGTYHDLLKIIKDKDFLDNEENEDILEDIVLTLTLFEDREMIEERLKTYAHLFDDKVMKQLKRRRYTGWGRLSRKLINGIRDKQSGKTILDFLKSDGFANRNFMQLIHDDSLTFKEDIQKAQVSGQGDSLHEHIANLAGSPAIKKGILQTVKVVDELVKVMGRHKPENIVIEMARENQTTQKGQKNSRERMKRIEEGIKELGSQILKEHPVENTQLQNEKLYLYYLQNGRDMYVDQELDINRLSDYDVDHIVPQSFLKDDSIDNKVLTRSDKARGKSDNVPSEEVVKKMKNYWRQLLNAKLITQRKFDNLTKAERGGLSELDKAGFIKRQLVETRQITKHVAQILDSRMNTKYDENDKLIREVKVITLKSKLVSDFRKDFQFYKVREINNYHHAHDAYLNAVVGTALIKKYPKLESEFVYGDYKVYDVRKMIAKSEQEIGKATAKYFFYSNIMNFFKTEITLANGEIRKRPLIETNGETGEIVWDKGRDFATVRKVLSMPQVNIVKKTEVQTGGFSKESILPKRNSDKLIARKKDWDPKKYGGFDSPTVAYSVLVVAKVEKGKSKKLKSVKELLGITIMERSSFEKNPIDFLEAKGYKEVKKDLIIKLPKYSLFELENGRKRMLASAGELQKGNELALPSKYVNFLYLASHYEKLKGSPEDNEQKQLFVEQHKHYLDEIIEQISEFSKRVILADANLDKVLSAYNKHRDKPIREQAENIIHLFTLTNLGAPAAFKYFDTTIDRKRYTSTKEVLDATLIHQSITGLYETRIDLSQLGGDGGGGGEAAAKGSSGGVLNLEEEYRLHEKPVPSSIDPSWLQLFPTVWAERAGMGLANQVPPVVVELRSGASPVAVRQYPMSKEAREGIRPHIQRFLDLGVLVPCQSPWNTPLLPVKKPGTNDYRPVQDLREINKRVQDIHPTVPNPYNLLSSLPPSHTWYSVLDLKDAFFCLKLHPNSQPLFAFEWRDPEKGNTGQLTWTRLPQGFKNSPTLFNEALHRDLAPFRALNPQVVLLQYVDDLLVAAPTYRDCKEGTQKLLQELSKLGYRVSAKKAQLCQKEVTYLGYLLKEGKRWLTPARKATVMKIPPPTTPRQVREFLGKAGFCRLFIPGFASLAAPLYPLTKPSIPFIWTEEHQKAFDRIKEALLSAPALALPDLTKPFTLYVDERAGVARGVLTQTLGPWRRPVAYLSKKLDPVASGWPTCLKAVAAVALLLKDADKLTLGQNVTVIASHSLESIVRQPPDRWMTNARMTHYQSLLLNERVSFAPPAVLNPATLLPVESEATPVHRCSEILAEETGTRRDLKDQPLPGVPAWYTDGSSFIAEGKRRAGAAIVDGKRTVWASSLPEGTSAQKAELVALTQALRLAEGKDINIYTDSRYAFATAHIHGAIYKQRGWLTSAGKDIKNKEEILALLEAIHLPKRVAIIHCPGHQKGNDPVATGNRRADEAAKQAALSTRVLAETTKPAGKRTADGSEFEKRTADGSEFESPKKKAKVE

SEQ ID NO: 926 - protein, 2087 aa, synthetic construct
MPAAKRVKLDGGDKKYSIGLDIGTNSVGWAVITDEYKVPSKKFKVLGNTDRHSIKKNLIGALLFDSGETAEATRLKRTARRRYTRRKNRICYLQEIFSNEMAKVDDSFFHRLEESFLVEEDKKHERHPIFGNIVDEVAYHEKYPTIYHLRKKLVDSTDKADLRLIYLALAHMIKFRGHFLIEGDLNPDNSDVDKLFIQLVQTYNQLFEENPINASGVDAKAILSARLSKSRRLENLIAQLPGEKKNGLFGNLIALSLGLTPNFKSNFDLAEDAKLQLSKDTYDDDLDNLLAQIGDQYADLFLAAKNLSDAILLSDILRVNTEITKAPLSASMIKRYDEHHQDLTLLKALVRQQLPEKYKEIFFDQSKNGYAGYIDGGASQEEFYKFIKPILEKMDGTEELLVKLNREDLLRKQRTFDNGSIPHQIHLGELHAILRRQEDFYPFLKDNREKIEKILTFRIPYYVGPLARGNSRFAWMTRKSEETITPWNFEEVVDKGASAQSFIERMTNFDKNLPNEKVLPKHSLLYEYFTVYNELTKVKYVTEGMRKPAFLSGEQKKAIVDLLFKTNRKVTVKQLKEDYFKKIECFDSVEISGVEDRFNASLGTYHDLLKIIKDKDFLDNEENEDILEDIVLTLTLFEDREMIEERLKTYAHLFDDKVMKQLKRRRYTGWGRLSRKLINGIRDKQSGKTILDFLKSDGFANRNFMQLIHDDSLTFKEDIQKAQVSGQGDSLHEHIANLAGSPAIKKGILQTVKVVDELVKVMGRHKPENIVIEMARENQTTQKGQKNSRERMKRIEEGIKELGSQILKEHPVENTQLQNEKLYLYYLQNGRDMYVDQELDINRLSDYDVDHIVPQSFLKDDSIDNKVLTRSDKARGKSDNVPSEEVVKKMKNYWRQLLNAKLITQRKFDNLTKAERGGLSELDKAGFIKRQLVETRQITKHVAQILDSRMNTKYDENDKLIREVKVITLKSKLVSDFRKDFQFYKVREINNYHHAHDAYLNAVVGTALIKKYPKLESEFVYGDYKVYDVRKMIAKSEQEIGKATAKYFFYSNIMNFFKTEITLANGEIRKRPLIETNGETGEIVWDKGRDFATVRKVLSMPQVNIVKKTEVQTGGFSKESILPKRNSDKLIARKKDWDPKKYGGFDSPTVAYSVLVVAKVEKGKSKKLKSVKELLGITIMERSSFEKNPIDFLEAKGYKEVKKDLIIKLPKYSLFELENGRKRMLASAGELQKGNELALPSKYVNFLYLASHYEKLKGSPEDNEQKQLFVEQHKHYLDEIIEQISEFSKRVILADANLDKVLSAYNKHRDKPIREQAENIIHLFTLTNLGAPAAFKYFDTTIDRKRYTSTKEVLDATLIHQSITGLYETRIDLSQLGGDGGGGGGGGVLNLEEEYRLHEKPVPSSIDPSWLQLFPTVWAERAGMGLANQVPPVVVELRSGASPVAVRQYPMSKEAREGIRPHIQRFLDLGVLVPCQSPWNTPLLPVKKPGTNDYRPVQDLREINKRVQDIHPTVPNPYNLLSSLPPSHTWYSVLDLKDAFFCLKLHPNSQPLFAFEWRDPEKGNTGQLTWTRLPQGFKNSPTLFNEALHRDLAPFRALNPQVVLLQYVDDLLVAAPTYRDCKEGTQKLLQELSKLGYRVSAKKAQLCQKEVTYLGYLLKEGKRWLTPARKATVMKIPPPTTPRQVREFLGKAGFCRLFIPGFASLAAPLYPLTKPSIPFIWTEEHQKAFDRIKEALLSAPALALPDLTKPFTLYVDERAGVARGVLTQTLGPWRRPVAYLSKKLDPVASGWPTCLKAVAAVALLLKDADKLTLGQNVTVIASHSLESIVRQPPDRWMTNARMTHYQSLLLNERVSFAPPAVLNPATLLPVESEATPVHRCSEILAEETGTRRDLKDQPLPGVPAWYTDGSSFIAEGKRRAGAAIVDGKRTVWASSLPEGTSAQKAELVALTQALRLAEGKDINIYTDSRYAFATAHIHGAIYKQRGWLTSAGKDIKNKEEILALLEAIHLPKRVAIIHCPGHQKGNDPVATGNRRADEAAKQAALSTRVLAETTKPAGKRTADGSEFEKRTADGSEFESPKKKAKVE

SEQ ID NO: 927 - protein, 2092 aa, synthetic construct
MPAAKRVKLDGGDKKYSIGLDIGTNSVGWAVITDEYKVPSKKFKVLGNTDRHSIKKNLIGALLFDSGETAEATRLKRTARRRYTRRKNRICYLQEIFSNEMAKVDDSFFHRLEESFLVEEDKKHERHPIFGNIVDEVAYHEKYPTIYHLRKKLVDSTDKADLRLIYLALAHMIKFRGHFLIEGDLNPDNSDVDKLFIQLVQTYNQLFEENPINASGVDAKAILSARLSKSRRLENLIAQLPGEKKNGLFGNLIALSLGLTPNFKSNFDLAEDAKLQLSKDTYDDDLDNLLAQIGDQYADLFLAAKNLSDAILLSDILRVNTEITKAPLSASMIKRYDEHHQDLTLLKALVRQQLPEKYKEIFFDQSKNGYAGYIDGGASQEEFYKFIKPILEKMDGTEELLVKLNREDLLRKQRTFDNGSIPHQIHLGELHAILRRQEDFYPFLKDNREKIEKILTFRIPYYVGPLARGNSRFAWMTRKSEETITPWNFEEVVDKGASAQSFIERMTNFDKNLPNEKVLPKHSLLYEYFTVYNELTKVKYVTEGMRKPAFLSGEQKKAIVDLLFKTNRKVTVKQLKEDYFKKIECFDSVEISGVEDRFNASLGTYHDLLKIIKDKDFLDNEENEDILEDIVLTLTLFEDREMIEERLKTYAHLFDDKVMKQLKRRRYTGWGRLSRKLINGIRDKQSGKTILDFLKSDGFANRNFMQLIHDDSLTFKEDIQKAQVSGQGDSLHEHIANLAGSPAIKKGILQTVKVVDELVKVMGRHKPENIVIEMARENQTTQKGQKNSRERMKRIEEGIKELGSQILKEHPVENTQLQNEKLYLYYLQNGRDMYVDQELDINRLSDYDVDHIVPQSFLKDDSIDNKVLTRSDKARGKSDNVPSEEVVKKMKNYWRQLLNAKLITQRKFDNLTKAERGGLSELDKAGFIKRQLVETRQITKHVAQILDSRMNTKYDENDKLIREVKVITLKSKLVSDFRKDFQFYKVREINNYHHAHDAYLNAVVGTALIKKYPKLESEFVYGDYKVYDVRKMIAKSEQEIGKATAKYFFYSNIMNFFKTEITLANGEIRKRPLIETNGETGEIVWDKGRDFATVRKVLSMPQVNIVKKTEVQTGGFSKESILPKRNSDKLIARKKDWDPKKYGGFDSPTVAYSVLVVAKVEKGKSKKLKSVKELLGITIMERSSFEKNPIDFLEAKGYKEVKKDLIIKLPKYSLFELENGRKRMLASAGELQKGNELALPSKYVNFLYLASHYEKLKGSPEDNEQKQLFVEQHKHYLDEIIEQISEFSKRVILADANLDKVLSAYNKHRDKPIREQAENIIHLFTLTNLGAPAAFKYFDTTIDRKRYTSTKEVLDATLIHQSITGLYETRIDLSQLGGDGGPAPGSSGGGGGVLNLEEEYRLHEKPVPSSIDPSWLQLFPTVWAERAGMGLANQVPPVVVELRSGASPVAVRQYPMSKEAREGIRPHIQRFLDLGVLVPCQSPWNTPLLPVKKPGTNDYRPVQDLREINKRVQDIHPTVPNPYNLLSSLPPSHTWYSVLDLKDAFFCLKLHPNSQPLFAFEWRDPEKGNTGQLTWTRLPQGFKNSPTLFNEALHRDLAPFRALNPQVVLLQYVDDLLVAAPTYRDCKEGTQKLLQELSKLGYRVSAKKAQLCQKEVTYLGYLLKEGKRWLTPARKATVMKIPPPTTPRQVREFLGKAGFCRLFIPGFASLAAPLYPLTKPSIPFIWTEEHQKAFDRIKEALLSAPALALPDLTKPFTLYVDERAGVARGVLTQTLGPWRRPVAYLSKKLDPVASGWPTCLKAVAAVALLLKDADKLTLGQNVTVIASHSLESIVRQPPDRWMTNARMTHYQSLLLNERVSFAPPAVLNPATLLPVESEATPVHRCSEILAEETGTRRDLKDQPLPGVPAWYTDGSSFIAEGKRRAGAAIVDGKRTVWASSLPEGTSAQKAELVALTQALRLAEGKDINIYTDSRYAFATAHIHGAIYKQRGWLTSAGKDIKNKEEILALLEAIHLPKRVAIIHCPGHQKGNDPVATGNRRADEAAKQAALSTRVLAETTKPAGKRTADGSEFEKRTADGSEFESPKKKAKVE

SEQ ID NO: 928 - protein, 2094 aa, synthetic construct
MPAAKRVKLDGGDKKYSIGLDIGTNSVGWAVITDEYKVPSKKFKVLGNTDRHSIKKNLIGALLFDSGETAEATRLKRTARRRYTRRKNRICYLQEIFSNEMAKVDDSFFHRLEESFLVEEDKKHERHPIFGNIVDEVAYHEKYPTIYHLRKKLVDSTDKADLRLIYLALAHMIKFRGHFLIEGDLNPDNSDVDKLFIQLVQTYNQLFEENPINASGVDAKAILSARLSKSRRLENLIAQLPGEKKNGLFGNLIALSLGLTPNFKSNFDLAEDAKLQLSKDTYDDDLDNLLAQIGDQYADLFLAAKNLSDAILLSDILRVNTEITKAPLSASMIKRYDEHHQDLTLLKALVRQQLPEKYKEIFFDQSKNGYAGYIDGGASQEEFYKFIKPILEKMDGTEELLVKLNREDLLRKQRTFDNGSIPHQIHLGELHAILRRQEDFYPFLKDNREKIEKILTFRIPYYVGPLARGNSRFAWMTRKSEETITPWNFEEVVDKGASAQSFIERMTNFDKNLPNEKVLPKHSLLYEYFTVYNELTKVKYVTEGMRKPAFLSGEQKKAIVDLLFKTNRKVTVKQLKEDYFKKIECFDSVEISGVEDRFNASLGTYHDLLKIIKDKDFLDNEENEDILEDIVLTLTLFEDREMIEERLKTYAHLFDDKVMKQLKRRRYTGWGRLSRKLINGIRDKQSGKTILDFLKSDGFANRNFMQLIHDDSLTFKEDIQKAQVSGQGDSLHEHIANLAGSPAIKKGILQTVKVVDELVKVMGRHKPENIVIEMARENQTTQKGQKNSRERMKRIEEGIKELGSQILKEHPVENTQLQNEKLYLYYLQNGRDMYVDQELDINRLSDYDVDHIVPQSFLKDDSIDNKVLTRSDKARGKSDNVPSEEVVKKMKNYWRQLLNAKLITQRKFDNLTKAERGGLSELDKAGFIKRQLVETRQITKHVAQILDSRMNTKYDENDKLIREVKVITLKSKLVSDFRKDFQFYKVREINNYHHAHDAYLNAVVGTALIKKYPKLESEFVYGDYKVYDVRKMIAKSEQEIGKATAKYFFYSNIMNFFKTEITLANGEIRKRPLIETNGETGEIVWDKGRDFATVRKVLSMPQVNIVKKTEVQTGGFSKESILPKRNSDKLIARKKDWDPKKYGGFDSPTVAYSVLVVAKVEKGKSKKLKSVKELLGITIMERSSFEKNPIDFLEAKGYKEVKKDLIIKLPKYSLFELENGRKRMLASAGELQKGNELALPSKYVNFLYLASHYEKLKGSPEDNEQKQLFVEQHKHYLDEIIEQISEFSKRVILADANLDKVLSAYNKHRDKPIREQAENIIHLFTLTNLGAPAAFKYFDTTIDRKRYTSTKEVLDATLIHQSITGLYETRIDLSQLGGDGGGGGEAAAKPAPGGVLNLEEEYRLHEKPVPSSIDPSWLQLFPTVWAERAGMGLANQVPPVVVELRSGASPVAVRQYPMSKEAREGIRPHIQRFLDLGVLVPCQSPWNTPLLPVKKPGTNDYRPVQDLREINKRVQDIHPTVPNPYNLLSSLPPSHTWYSVLDLKDAFFCLKLHPNSQPLFAFEWRDPEKGNTGQLTWTRLPQGFKNSPTLFNEALHRDLAPFRALNPQVVLLQYVDDLLVAAPTYRDCKEGTQKLLQELSKLGYRVSAKKAQLCQKEVTYLGYLLKEGKRWLTPARKATVMKIPPPTTPRQVREFLGKAGFCRLFIPGFASLAAPLYPLTKPSIPFIWTEEHQKAFDRIKEALLSAPALALPDLTKPFTLYVDERAGVARGVLTQTLGPWRRPVAYLSKKLDPVASGWPTCLKAVAAVALLLKDADKLTLGQNVTVIASHSLESIVRQPPDRWMTNARMTHYQSLLLNERVSFAPPAVLNPATLLPVESEATPVHRCSEILAEETGTRRDLKDQPLPGVPAWYTDGSSFIAEGKRRAGAAIVDGKRTVWASSLPEGTSAQKAELVALTQALRLAEGKDINIYTDSRYAFATAHIHGAIYKQRGWLTSAGKDIKNKEEILALLEAIHLPKRVAIIHCPGHQKGNDPVATGNRRADEAAKQAALSTRVLAETTKPAGKRTADGSEFEKRTADGSEFESPKKKAKVE

SEQ ID NO: 929 - protein, 2092 aa, synthetic construct
MPAAKRVKLDGGDKKYSIGLDIGTNSVGWAVITDEYKVPSKKFKVLGNTDRHSIKKNLIGALLFDSGETAEATRLKRTARRRYTRRKNRICYLQEIFSNEMAKVDDSFFHRLEESFLVEEDKKHERHPIFGNIVDEVAYHEKYPTIYHLRKKLVDSTDKADLRLIYLALAHMIKFRGHFLIEGDLNPDNSDVDKLFIQLVQTYNQLFEENPINASGVDAKAILSARLSKSRRLENLIAQLPGEKKNGLFGNLIALSLGLTPNFKSNFDLAEDAKLQLSKDTYDDDLDNLLAQIGDQYADLFLAAKNLSDAILLSDILRVNTEITKAPLSASMIKRYDEHHQDLTLLKALVRQQLPEKYKEIFFDQSKNGYAGYIDGGASQEEFYKFIKPILEKMDGTEELLVKLNREDLLRKQRTFDNGSIPHQIHLGELHAILRRQEDFYPFLKDNREKIEKILTFRIPYYVGPLARGNSRFAWMTRKSEETITPWNFEEVVDKGASAQSFIERMTNFDKNLPNEKVLPKHSLLYEYFTVYNELTKVKYVTEGMRKPAFLSGEQKKAIVDLLFKTNRKVTVKQLKEDYFKKIECFDSVEISGVEDRFNASLGTYHDLLKIIKDKDFLDNEENEDILEDIVLTLTLFEDREMIEERLKTYAHLFDDKVMKQLKRRRYTGWGRLSRKLINGIRDKQSGKTILDFLKSDGFANRNFMQLIHDDSLTFKEDIQKAQVSGQGDSLHEHIANLAGSPAIKKGILQTVKVVDELVKVMGRHKPENIVIEMARENQTTQKGQKNSRERMKRIEEGIKELGSQILKEHPVENTQLQNEKLYLYYLQNGRDMYVDQELDINRLSDYDVDHIVPQSFLKDDSIDNKVLTRSDKARGKSDNVPSEEVVKKMKNYWRQLLNAKLITQRKFDNLTKAERGGLSELDKAGFIKRQLVETRQITKHVAQILDSRMNTKYDENDKLIREVKVITLKSKLVSDFRKDFQFYKVREINNYHHAHDAYLNAVVGTALIKKYPKLESEFVYGDYKVYDVRKMIAKSEQEIGKATAKYFFYSNIMNFFKTEITLANGEIRKRPLIETNGETGEIVWDKGRDFATVRKVLSMPQVNIVKKTEVQTGGFSKESILPKRNSDKLIARKKDWDPKKYGGFDSPTVAYSVLVVAKVEKGKSKKLKSVKELLGITIMERSSFEKNPIDFLEAKGYKEVKKDLIIKLPKYSLFELENGRKRMLASAGELQKGNELALPSKYVNFLYLASHYEKLKGSPEDNEQKQLFVEQHKHYLDEIIEQISEFSKRVILADANLDKVLSAYNKHRDKPIREQAENIIHLFTLTNLGAPAAFKYFDTTIDRKRYTSTKEVLDATLIHQSITGLYETRIDLSQLGGDGGGSSGSSGSSGGVLNLEEEYRLHEKPVPSSIDPSWLQLFPTVWAERAGMGLANQVPPVVVELRSGASPVAVRQYPMSKEAREGIRPHIQRFLDLGVLVPCQSPWNTPLLPVKKPGTNDYRPVQDLREINKRVQDIHPTVPNPYNLLSSLPPSHTWYSVLDLKDAFFCLKLHPNSQPLFAFEWRDPEKGNTGQLTWTRLPQGFKNSPTLFNEALHRDLAPFRALNPQVVLLQYVDDLLVAAPTYRDCKEGTQKLLQELSKLGYRVSAKKAQLCQKEVTYLGYLLKEGKRWLTPARKATVMKIPPPTTPRQVREFLGKAGFCRLFIPGFASLAAPLYPLTKPSIPFIWTEEHQKAFDRIKEALLSAPALALPDLTKPFTLYVDERAGVARGVLTQTLGPWRRPVAYLSKKLDPVASGWPTCLKAVAAVALLLKDADKLTLGQNVTVIASHSLESIVRQPPDRWMTNARMTHYQSLLLNERVSFAPPAVLNPATLLPVESEATPVHRCSEILAEETGTRRDLKDQPLPGVPAWYTDGSSFIAEGKRRAGAAIVDGKRTVWASSLPEGTSAQKAELVALTQALRLAEGKDINIYTDSRYAFATAHIHGAIYKQRGWLTSAGKDIKNKEEILALLEAIHLPKRVAIIHCPGHQKGNDPVATGNRRADEAAKQAALSTRVLAETTKPAGKRTADGSEFEKRTADGSEFESPKKKAKVE

SEQ ID NO: 930 - protein, 2092 aa, synthetic construct
MPAAKRVKLDGGDKKYSIGLDIGTNSVGWAVITDEYKVPSKKFKVLGNTDRHSIKKNLIGALLFDSGETAEATRLKRTARRRYTRRKNRICYLQEIFSNEMAKVDDSFFHRLEESFLVEEDKKHERHPIFGNIVDEVAYHEKYPTIYHLRKKLVDSTDKADLRLIYLALAHMIKFRGHFLIEGDLNPDNSDVDKLFIQLVQTYNQLFEENPINASGVDAKAILSARLSKSRRLENLIAQLPGEKKNGLFGNLIALSLGLTPNFKSNFDLAEDAKLQLSKDTYDDDLDNLLAQIGDQYADLFLAAKNLSDAILLSDILRVNTEITKAPLSASMIKRYDEHHQDLTLLKALVRQQLPEKYKEIFFDQSKNGYAGYIDGGASQEEFYKFIKPILEKMDGTEELLVKLNREDLLRKQRTFDNGSIPHQIHLGELHAILRRQEDFYPFLKDNREKIEKILTFRIPYYVGPLARGNSRFAWMTRKSEETITPWNFEEVVDKGASAQSFIERMTNFDKNLPNEKVLPKHSLLYEYFTVYNELTKVKYVTEGMRKPAFLSGEQKKAIVDLLFKTNRKVTVKQLKEDYFKKIECFDSVEISGVEDRFNASLGTYHDLLKIIKDKDFLDNEENEDILEDIVLTLTLFEDREMIEERLKTYAHLFDDKVMKQLKRRRYTGWGRLSRKLINGIRDKQSGKTILDFLKSDGFANRNFMQLIHDDSLTFKEDIQKAQVSGQGDSLHEHIANLAGSPAIKKGILQTVKVVDELVKVMGRHKPENIVIEMARENQTTQKGQKNSRERMKRIEEGIKELGSQILKEHPVENTQLQNEKLYLYYLQNGRDMYVDQELDINRLSDYDVDHIVPQSFLKDDSIDNKVLTRSDKARGKSDNVPSEEVVKKMKNYWRQLLNAKLITQRKFDNLTKAERGGLSELDKAGFIKRQLVETRQITKHVAQILDSRMNTKYDENDKLIREVKVITLKSKLVSDFRKDFQFYKVREINNYHHAHDAYLNAVVGTALIKKYPKLESEFVYGDYKVYDVRKMIAKSEQEIGKATAKYFFYSNIMNFFKTEITLANGEIRKRPLIETNGETGEIVWDKGRDFATVRKVLSMPQVNIVKKTEVQTGGFSKESILPKRNSDKLIARKKDWDPKKYGGFDSPTVAYSVLVVAKVEKGKSKKLKSVKELLGITIMERSSFEKNPIDFLEAKGYKEVKKDLIIKLPKYSLFELENGRKRMLASAGELQKGNELALPSKYVNFLYLASHYEKLKGSPEDNEQKQLFVEQHKHYLDEIIEQISEFSKRVILADANLDKVLSAYNKHRDKPIREQAENIIHLFTLTNLGAPAAFKYFDTTIDRKRYTSTKEVLDATLIHQSITGLYETRIDLSQLGGDGGGGSPAPGGGGGVLNLEEEYRLHEKPVPSSIDPSWLQLFPTVWAERAGMGLANQVPPVVVELRSGASPVAVRQYPMSKEAREGIRPHIQRFLDLGVLVPCQSPWNTPLLPVKKPGTNDYRPVQDLREINKRVQDIHPTVPNPYNLLSSLPPSHTWYSVLDLKDAFFCLKLHPNSQPLFAFEWRDPEKGNTGQLTWTRLPQGFKNSPTLFNEALHRDLAPFRALNPQVVLLQYVDDLLVAAPTYRDCKEGTQKLLQELSKLGYRVSAKKAQLCQKEVTYLGYLLKEGKRWLTPARKATVMKIPPPTTPRQVREFLGKAGFCRLFIPGFASLAAPLYPLTKPSIPFIWTEEHQKAFDRIKEALLSAPALALPDLTKPFTLYVDERAGVARGVLTQTLGPWRRPVAYLSKKLDPVASGWPTCLKAVAAVALLLKDADKLTLGQNVTVIASHSLESIVRQPPDRWMTNARMTHYQSLLLNERVSFAPPAVLNPATLLPVESEATPVHRCSEILAEETGTRRDLKDQPLPGVPAWYTDGSSFIAEGKRRAGAAIVDGKRTVWASSLPEGTSAQKAELVALTQALRLAEGKDINIYTDSRYAFATAHIHGAIYKQRGWLTSAGKDIKNKEEILALLEAIHLPKRVAIIHCPGHQKGNDPVATGNRRADEAAKQAALSTRVLAETTKPAGKRTADGSEFEKRTADGSEFESPKKKAKVE

SEQ ID NO: 931 - protein, 2091 aa, synthetic construct
MPAAKRVKLDGGDKKYSIGLDIGTNSVGWAVITDEYKVPSKKFKVLGNTDRHSIKKNLIGALLFDSGETAEATRLKRTARRRYTRRKNRICYLQEIFSNEMAKVDDSFFHRLEESFLVEEDKKHERHPIFGNIVDEVAYHEKYPTIYHLRKKLVDSTDKADLRLIYLALAHMIKFRGHFLIEGDLNPDNSDVDKLFIQLVQTYNQLFEENPINASGVDAKAILSARLSKSRRLENLIAQLPGEKKNGLFGNLIALSLGLTPNFKSNFDLAEDAKLQLSKDTYDDDLDNLLAQIGDQYADLFLAAKNLSDAILLSDILRVNTEITKAPLSASMIKRYDEHHQDLTLLKALVRQQLPEKYKEIFFDQSKNGYAGYIDGGASQEEFYKFIKPILEKMDGTEELLVKLNREDLLRKQRTFDNGSIPHQIHLGELHAILRRQEDFYPFLKDNREKIEKILTFRIPYYVGPLARGNSRFAWMTRKSEETITPWNFEEVVDKGASAQSFIERMTNFDKNLPNEKVLPKHSLLYEYFTVYNELTKVKYVTEGMRKPAFLSGEQKKAIVDLLFKTNRKVTVKQLKEDYFKKIECFDSVEISGVEDRFNASLGTYHDLLKIIKDKDFLDNEENEDILEDIVLTLTLFEDREMIEERLKTYAHLFDDKVMKQLKRRRYTGWGRLSRKLINGIRDKQSGKTILDFLKSDGFANRNFMQLIHDDSLTFKEDIQKAQVSGQGDSLHEHIANLAGSPAIKKGILQTVKVVDELVKVMGRHKPENIVIEMARENQTTQKGQKNSRERMKRIEEGIKELGSQILKEHPVENTQLQNEKLYLYYLQNGRDMYVDQELDINRLSDYDVDHIVPQSFLKDDSIDNKVLTRSDKARGKSDNVPSEEVVKKMKNYWRQLLNAKLITQRKFDNLTKAERGGLSELDKAGFIKRQLVETRQITKHVAQILDSRMNTKYDENDKLIREVKVITLKSKLVSDFRKDFQFYKVREINNYHHAHDAYLNAVVGTALIKKYPKLESEFVYGDYKVYDVRKMIAKSEQEIGKATAKYFFYSNIMNFFKTEITLANGEIRKRPLIETNGETGEIVWDKGRDFATVRKVLSMPQVNIVKKTEVQTGGFSKESILPKRNSDKLIARKKDWDPKKYGGFDSPTVAYSVLVVAKVEKGKSKKLKSVKELLGITIMERSSFEKNPIDFLEAKGYKEVKKDLIIKLPKYSLFELENGRKRMLASAGELQKGNELALPSKYVNFLYLASHYEKLKGSPEDNEQKQLFVEQHKHYLDEIIEQISEFSKRVILADANLDKVLSAYNKHRDKPIREQAENIIHLFTLTNLGAPAAFKYFDTTIDRKRYTSTKEVLDATLIHQSITGLYETRIDLSQLGGDGGEAAAKGGGGGVLNLEEEYRLHEKPVPSSIDPSWLQLFPTVWAERAGMGLANQVPPVVVELRSGASPVAVRQYPMSKEAREGIRPHIQRFLDLGVLVPCQSPWNTPLLPVKKPGTNDYRPVQDLREINKRVQDIHPTVPNPYNLLSSLPPSHTWYSVLDLKDAFFCLKLHPNSQPLFAFEWRDPEKGNTGQLTWTRLPQGFKNSPTLFNEALHRDLAPFRALNPQVVLLQYVDDLLVAAPTYRDCKEGTQKLLQELSKLGYRVSAKKAQLCQKEVTYLGYLLKEGKRWLTPARKATVMKIPPPTTPRQVREFLGKAGFCRLFIPGFASLAAPLYPLTKPSIPFIWTEEHQKAFDRIKEALLSAPALALPDLTKPFTLYVDERAGVARGVLTQTLGPWRRPVAYLSKKLDPVASGWPTCLKAVAAVALLLKDADKLTLGQNVTVIASHSLESIVRQPPDRWMTNARMTHYQSLLLNERVSFAPPAVLNPATLLPVESEATPVHRCSEILAEETGTRRDLKDQPLPGVPAWYTDGSSFIAEGKRRAGAAIVDGKRTVWASSLPEGTSAQKAELVALTQALRLAEGKDINIYTDSRYAFATAHIHGAIYKQRGWLTSAGKDIKNKEEILALLEAIHLPKRVAIIHCPGHQKGNDPVATGNRRADEAAKQAALSTRVLAETTKPAGKRTADGSEFEKRTADGSEFESPKKKAKVE

SEQ ID NO: 932 - protein, 2089 aa, synthetic construct
MPAAKRVKLDGGDKKYSIGLDIGTNSVGWAVITDEYKVPSKKFKVLGNTDRHSIKKNLIGALLFDSGETAEATRLKRTARRRYTRRKNRICYLQEIFSNEMAKVDDSFFHRLEESFLVEEDKKHERHPIFGNIVDEVAYHEKYPTIYHLRKKLVDSTDKADLRLIYLALAHMIKFRGHFLIEGDLNPDNSDVDKLFIQLVQTYNQLFEENPINASGVDAKAILSARLSKSRRLENLIAQLPGEKKNGLFGNLIALSLGLTPNFKSNFDLAEDAKLQLSKDTYDDDLDNLLAQIGDQYADLFLAAKNLSDAILLSDILRVNTEITKAPLSASMIKRYDEHHQDLTLLKALVRQQLPEKYKEIFFDQSKNGYAGYIDGGASQEEFYKFIKPILEKMDGTEELLVKLNREDLLRKQRTFDNGSIPHQIHLGELHAILRRQEDFYPFLKDNREKIEKILTFRIPYYVGPLARGNSRFAWMTRKSEETITPWNFEEVVDKGASAQSFIERMTNFDKNLPNEKVLPKHSLLYEYFTVYNELTKVKYVTEGMRKPAFLSGEQKKAIVDLLFKTNRKVTVKQLKEDYFKKIECFDSVEISGVEDRFNASLGTYHDLLKIIKDKDFLDNEENEDILEDIVLTLTLFEDREMIEERLKTYAHLFDDKVMKQLKRRRYTGWGRLSRKLINGIRDKQSGKTILDFLKSDGFANRNFMQLIHDDSLTFKEDIQKAQVSGQGDSLHEHIANLAGSPAIKKGILQTVKVVDELVKVMGRHKPENIVIEMARENQTTQKGQKNSRERMKRIEEGIKELGSQILKEHPVENTQLQNEKLYLYYLQNGRDMYVDQELDINRLSDYDVDHIVPQSFLKDDSIDNKVLTRSDKARGKSDNVPSEEVVKKMKNYWRQLLNAKLITQRKFDNLTKAERGGLSELDKAGFIKRQLVETRQITKHVAQILDSRMNTKYDENDKLIREVKVITLKSKLVSDFRKDFQFYKVREINNYHHAHDAYLNAVVGTALIKKYPKLESEFVYGDYKVYDVRKMIAKSEQEIGKATAKYFFYSNIMNFFKTEITLANGEIRKRPLIETNGETGEIVWDKGRDFATVRKVLSMPQVNIVKKTEVQTGGFSKESILPKRNSDKLIARKKDWDPKKYGGFDSPTVAYSVLVVAKVEKGKSKKLKSVKELLGITIMERSSFEKNPIDFLEAKGYKEVKKDLIIKLPKYSLFELENGRKRMLASAGELQKGNELALPSKYVNFLYLASHYEKLKGSPEDNEQKQLFVEQHKHYLDEIIEQISEFSKRVILADANLDKVLSAYNKHRDKPIREQAENIIHLFTLTNLGAPAAFKYFDTTIDRKRYTSTKEVLDATLIHQSITGLYETRIDLSQLGGDGGGSSGSSGGVLNLEEEYRLHEKPVPSSIDPSWLQLFPTVWAERAGMGLANQVPPVVVELRSGASPVAVRQYPMSKEAREGIRPHIQRFLDLGVLVPCQSPWNTPLLPVKKPGTNDYRPVQDLREINKRVQDIHPTVPNPYNLLSSLPPSHTWYSVLDLKDAFFCLKLHPNSQPLFAFEWRDPEKGNTGQLTWTRLPQGFKNSPTLFNEALHRDLAPFRALNPQVVLLQYVDDLLVAAPTYRDCKEGTQKLLQELSKLGYRVSAKKAQLCQKEVTYLGYLLKEGKRWLTPARKATVMKIPPPTTPRQVREFLGKAGFCRLFIPGFASLAAPLYPLTKPSIPFIWTEEHQKAFDRIKEALLSAPALALPDLTKPFTLYVDERAGVARGVLTQTLGPWRRPVAYLSKKLDPVASGWPTCLKAVAAVALLLKDADKLTLGQNVTVIASHSLESIVRQPPDRWMTNARMTHYQSLLLNERVSFAPPAVLNPATLLPVESEATPVHRCSEILAEETGTRRDLKDQPLPGVPAWYTDGSSFIAEGKRRAGAAIVDGKRTVWASSLPEGTSAQKAELVALTQALRLAEGKDINIYTDSRYAFATAHIHGAIYKQRGWLTSAGKDIKNKEEILALLEAIHLPKRVAIIHCPGHQKGNDPVATGNRRADEAAKQAALSTRVLAETTKPAGKRTADGSEFEKRTADGSEFESPKKKAKVE

SEQ ID NO: 933 - protein, 2098 aa, synthetic construct
MPAAKRVKLDGGDKKYSIGLDIGTNSVGWAVITDEYKVPSKKFKVLGNTDRHSIKKNLIGALLFDSGETAEATRLKRTARRRYTRRKNRICYLQEIFSNEMAKVDDSFFHRLEESFLVEEDKKHERHPIFGNIVDEVAYHEKYPTIYHLRKKLVDSTDKADLRLIYLALAHMIKFRGHFLIEGDLNPDNSDVDKLFIQLVQTYNQLFEENPINASGVDAKAILSARLSKSRRLENLIAQLPGEKKNGLFGNLIALSLGLTPNFKSNFDLAEDAKLQLSKDTYDDDLDNLLAQIGDQYADLFLAAKNLSDAILLSDILRVNTEITKAPLSASMIKRYDEHHQDLTLLKALVRQQLPEKYKEIFFDQSKNGYAGYIDGGASQEEFYKFIKPILEKMDGTEELLVKLNREDLLRKQRTFDNGSIPHQIHLGELHAILRRQEDFYPFLKDNREKIEKILTFRIPYYVGPLARGNSRFAWMTRKSEETITPWNFEEVVDKGASAQSFIERMTNFDKNLPNEKVLPKHSLLYEYFTVYNELTKVKYVTEGMRKPAFLSGEQKKAIVDLLFKTNRKVTVKQLKEDYFKKIECFDSVEISGVEDRFNASLGTYHDLLKIIKDKDFLDNEENEDILEDIVLTLTLFEDREMIEERLKTYAHLFDDKVMKQLKRRRYTGWGRLSRKLINGIRDKQSGKTILDFLKSDGFANRNFMQLIHDDSLTFKEDIQKAQVSGQGDSLHEHIANLAGSPAIKKGILQTVKVVDELVKVMGRHKPENIVIEMARENQTTQKGQKNSRERMKRIEEGIKELGSQILKEHPVENTQLQNEKLYLYYLQNGRDMYVDQELDINRLSDYDVDHIVPQSFLKDDSIDNKVLTRSDKARGKSDNVPSEEVVKKMKNYWRQLLNAKLITQRKFDNLTKAERGGLSELDKAGFIKRQLVETRQITKHVAQILDSRMNTKYDENDKLIREVKVITLKSKLVSDFRKDFQFYKVREINNYHHAHDAYLNAVVGTALIKKYPKLESEFVYGDYKVYDVRKMIAKSEQEIGKATAKYFFYSNIMNFFKTEITLANGEIRKRPLIETNGETGEIVWDKGRDFATVRKVLSMPQVNIVKKTEVQTGGFSKESILPKRNSDKLIARKKDWDPKKYGGFDSPTVAYSVLVVAKVEKGKSKKLKSVKELLGITIMERSSFEKNPIDFLEAKGYKEVKKDLIIKLPKYSLFELENGRKRMLASAGELQKGNELALPSKYVNFLYLASHYEKLKGSPEDNEQKQLFVEQHKHYLDEIIEQISEFSKRVILADANLDKVLSAYNKHRDKPIREQAENIIHLFTLTNLGAPAAFKYFDTTIDRKRYTSTKEVLDATLIHQSITGLYETRIDLSQLGGDGGEAAAKEAAAKEAAAKGGVLNLEEEYRLHEKPVPSSIDPSWLQLFPTVWAERAGMGLANQVPPVVVELRSGASPVAVRQYPMSKEAREGIRPHIQRFLDLGVLVPCQSPWNTPLLPVKKPGTNDYRPVQDLREINKRVQDIHPTVPNPYNLLSSLPPSHTWYSVLDLKDAFFCLKLHPNSQPLFAFEWRDPEKGNTGQLTWTRLPQGFKNSPTLFNEALHRDLAPFRALNPQVVLLQYVDDLLVAAPTYRDCKEGTQKLLQELSKLGYRVSAKKAQLCQKEVTYLGYLLKEGKRWLTPARKATVMKIPPPTTPRQVREFLGKAGFCRLFIPGFASLAAPLYPLTKPSIPFIWTEEHQKAFDRIKEALLSAPALALPDLTKPFTLYVDERAGVARGVLTQTLGPWRRPVAYLSKKLDPVASGWPTCLKAVAAVALLLKDADKLTLGQNVTVIASHSLESIVRQPPDRWMTNARMTHYQSLLLNERVSFAPPAVLNPATLLPVESEATPVHRCSEILAEETGTRRDLKDQPLPGVPAWYTDGSSFIAEGKRRAGAAIVDGKRTVWASSLPEGTSAQKAELVALTQALRLAEGKDINIYTDSRYAFATAHIHGAIYKQRGWLTSAGKDIKNKEEILALLEAIHLPKRVAIIHCPGHQKGNDPVATGNRRADEAAKQAALSTRVLAETTKPAGKRTADGSEFEKRTADGSEFESPKKKAKVE

SEQ ID NO: 934 - protein, 2091 aa, synthetic construct
MPAAKRVKLDGGDKKYSIGLDIGTNSVGWAVITDEYKVPSKKFKVLGNTDRHSIKKNLIGALLFDSGETAEATRLKRTARRRYTRRKNRICYLQEIFSNEMAKVDDSFFHRLEESFLVEEDKKHERHPIFGNIVDEVAYHEKYPTIYHLRKKLVDSTDKADLRLIYLALAHMIKFRGHFLIEGDLNPDNSDVDKLFIQLVQTYNQLFEENPINASGVDAKAILSARLSKSRRLENLIAQLPGEKKNGLFGNLIALSLGLTPNFKSNFDLAEDAKLQLSKDTYDDDLDNLLAQIGDQYADLFLAAKNLSDAILLSDILRVNTEITKAPLSASMIKRYDEHHQDLTLLKALVRQQLPEKYKEIFFDQSKNGYAGYIDGGASQEEFYKFIKPILEKMDGTEELLVKLNREDLLRKQRTFDNGSIPHQIHLGELHAILRRQEDFYPFLKDNREKIEKILTFRIPYYVGPLARGNSRFAWMTRKSEETITPWNFEEVVDKGASAQSFIERMTNFDKNLPNEKVLPKHSLLYEYFTVYNELTKVKYVTEGMRKPAFLSGEQKKAIVDLLFKTNRKVTVKQLKEDYFKKIECFDSVEISGVEDRFNASLGTYHDLLKIIKDKDFLDNEENEDILEDIVLTLTLFEDREMIEERLKTYAHLFDDKVMKQLKRRRYTGWGRLSRKLINGIRDKQSGKTILDFLKSDGFANRNFMQLIHDDSLTFKEDIQKAQVSGQGDSLHEHIANLAGSPAIKKGILQTVKVVDELVKVMGRHKPENIVIEMARENQTTQKGQKNSRERMKRIEEGIKELGSQILKEHPVENTQLQNEKLYLYYLQNGRDMYVDQELDINRLSDYDVDHIVPQSFLKDDSIDNKVLTRSDKARGKSDNVPSEEVVKKMKNYWRQLLNAKLITQRKFDNLTKAERGGLSELDKAGFIKRQLVETRQITKHVAQILDSRMNTKYDENDKLIREVKVITLKSKLVSDFRKDFQFYKVREINNYHHAHDAYLNAVVGTALIKKYPKLESEFVYGDYKVYDVRKMIAKSEQEIGKATAKYFFYSNIMNFFKTEITLANGEIRKRPLIETNGETGEIVWDKGRDFATVRKVLSMPQVNIVKKTEVQTGGFSKESILPKRNSDKLIARKKDWDPKKYGGFDSPTVAYSVLVVAKVEKGKSKKLKSVKELLGITIMERSSFEKNPIDFLEAKGYKEVKKDLIIKLPKYSLFELENGRKRMLASAGELQKGNELALPSKYVNFLYLASHYEKLKGSPEDNEQKQLFVEQHKHYLDEIIEQISEFSKRVILADANLDKVLSAYNKHRDKPIREQAENIIHLFTLTNLGAPAAFKYFDTTIDRKRYTSTKEVLDATLIHQSITGLYETRIDLSQLGGDGGGGGEAAAKGGVLNLEEEYRLHEKPVPSSIDPSWLQLFPTVWAERAGMGLANQVPPVVVELRSGASPVAVRQYPMSKEAREGIRPHIQRFLDLGVLVPCQSPWNTPLLPVKKPGTNDYRPVQDLREINKRVQDIHPTVPNPYNLLSSLPPSHTWYSVLDLKDAFFCLKLHPNSQPLFAFEWRDPEKGNTGQLTWTRLPQGFKNSPTLFNEALHRDLAPFRALNPQVVLLQYVDDLLVAAPTYRDCKEGTQKLLQELSKLGYRVSAKKAQLCQKEVTYLGYLLKEGKRWLTPARKATVMKIPPPTTPRQVREFLGKAGFCRLFIPGFASLAAPLYPLTKPSIPFIWTEEHQKAFDRIKEALLSAPALALPDLTKPFTLYVDERAGVARGVLTQTLGPWRRPVAYLSKKLDPVASGWPTCLKAVAAVALLLKDADKLTLGQNVTVIASHSLESIVRQPPDRWMTNARMTHYQSLLLNERVSFAPPAVLNPATLLPVESEATPVHRCSEILAEETGTRRDLKDQPLPGVPAWYTDGSSFIAEGKRRAGAAIVDGKRTVWASSLPEGTSAQKAELVALTQALRLAEGKDINIYTDSRYAFATAHIHGAIYKQRGWLTSAGKDIKNKEEILALLEAIHLPKRVAIIHCPGHQKGNDPVATGNRRADEAAKQAALSTRVLAETTKPAGKRTADGSEFEKRTADGSEFESPKKKAKVE

SEQ ID NO: 935 - protein, 2103 aa, synthetic construct
MPAAKRVKLDGGDKKYSIGLDIGTNSVGWAVITDEYKVPSKKFKVLGNTDRHSIKKNLIGALLFDSGETAEATRLKRTARRRYTRRKNRICYLQEIFSNEMAKVDDSFFHRLEESFLVEEDKKHERHPIFGNIVDEVAYHEKYPTIYHLRKKLVDSTDKADLRLIYLALAHMIKFRGHFLIEGDLNPDNSDVDKLFIQLVQTYNQLFEENPINASGVDAKAILSARLSKSRRLENLIAQLPGEKKNGLFGNLIALSLGLTPNFKSNFDLAEDAKLQLSKDTYDDDLDNLLAQIGDQYADLFLAAKNLSDAILLSDILRVNTEITKAPLSASMIKRYDEHHQDLTLLKALVRQQLPEKYKEIFFDQSKNGYAGYIDGGASQEEFYKFIKPILEKMDGTEELLVKLNREDLLRKQRTFDNGSIPHQIHLGELHAILRRQEDFYPFLKDNREKIEKILTFRIPYYVGPLARGNSRFAWMTRKSEETITPWNFEEVVDKGASAQSFIERMTNFDKNLPNEKVLPKHSLLYEYFTVYNELTKVKYVTEGMRKPAFLSGEQKKAIVDLLFKTNRKVTVKQLKEDYFKKIECFDSVEISGVEDRFNASLGTYHDLLKIIKDKDFLDNEENEDILEDIVLTLTLFEDREMIEERLKTYAHLFDDKVMKQLKRRRYTGWGRLSRKLINGIRDKQSGKTILDFLKSDGFANRNFMQLIHDDSLTFKEDIQKAQVSGQGDSLHEHIANLAGSPAIKKGILQTVKVVDELVKVMGRHKPENIVIEMARENQTTQKGQKNSRERMKRIEEGIKELGSQILKEHPVENTQLQNEKLYLYYLQNGRDMYVDQELDINRLSDYDVDHIVPQSFLKDDSIDNKVLTRSDKARGKSDNVPSEEVVKKMKNYWRQLLNAKLITQRKFDNLTKAERGGLSELDKAGFIKRQLVETRQITKHVAQILDSRMNTKYDENDKLIREVKVITLKSKLVSDFRKDFQFYKVREINNYHHAHDAYLNAVVGTALIKKYPKLESEFVYGDYKVYDVRKMIAKSEQEIGKATAKYFFYSNIMNFFKTEITLANGEIRKRPLIETNGETGEIVWDKGRDFATVRKVLSMPQVNIVKKTEVQTGGFSKESILPKRNSDKLIARKKDWDPKKYGGFDSPTVAYSVLVVAKVEKGKSKKLKSVKELLGITIMERSSFEKNPIDFLEAKGYKEVKKDLIIKLPKYSLFELENGRKRMLASAGELQKGNELALPSKYVNFLYLASHYEKLKGSPEDNEQKQLFVEQHKHYLDEIIEQISEFSKRVILADANLDKVLSAYNKHRDKPIREQAENIIHLFTLTNLGAPAAFKYFDTTIDRKRYTSTKEVLDATLIHQSITGLYETRIDLSQLGGDGGEAAAKEAAAKEAAAKEAAAKGGVLNLEEEYRLHEKPVPSSIDPSWLQLFPTVWAERAGMGLANQVPPVVVELRSGASPVAVRQYPMSKEAREGIRPHIQRFLDLGVLVPCQSPWNTPLLPVKKPGTNDYRPVQDLREINKRVQDIHPTVPNPYNLLSSLPPSHTWYSVLDLKDAFFCLKLHPNSQPLFAFEWRDPEKGNTGQLTWTRLPQGFKNSPTLFNEALHRDLAPFRALNPQVVLLQYVDDLLVAAPTYRDCKEGTQKLLQELSKLGYRVSAKKAQLCQKEVTYLGYLLKEGKRWLTPARKATVMKIPPPTTPRQVREFLGKAGFCRLFIPGFASLAAPLYPLTKPSIPFIWTEEHQKAFDRIKEALLSAPALALPDLTKPFTLYVDERAGVARGVLTQTLGPWRRPVAYLSKKLDPVASGWPTCLKAVAAVALLLKDADKLTLGQNVTVIASHSLESIVRQPPDRWMTNARMTHYQSLLLNERVSFAPPAVLNPATLLPVESEATPVHRCSEILAEETGTRRDLKDQPLPGVPAWYTDGSSFIAEGKRRAGAAIVDGKRTVWASSLPEGTSAQKAELVALTQALRLAEGKDINIYTDSRYAFATAHIHGAIYKQRGWLTSAGKDIKNKEEILALLEAIHLPKRVAIIHCPGHQKGNDPVATGNRRADEAAKQAALSTRVLAETTKPAGKRTADGSEFEKRTADGSEFESPKKKAKVE

SEQ ID NO: 936 - protein, 2094 aa, synthetic construct
MPAAKRVKLDGGDKKYSIGLDIGTNSVGWAVITDEYKVPSKKFKVLGNTDRHSIKKNLIGALLFDSGETAEATRLKRTARRRYTRRKNRICYLQEIFSNEMAKVDDSFFHRLEESFLVEEDKKHERHPIFGNIVDEVAYHEKYPTIYHLRKKLVDSTDKADLRLIYLALAHMIKFRGHFLIEGDLNPDNSDVDKLFIQLVQTYNQLFEENPINASGVDAKAILSARLSKSRRLENLIAQLPGEKKNGLFGNLIALSLGLTPNFKSNFDLAEDAKLQLSKDTYDDDLDNLLAQIGDQYADLFLAAKNLSDAILLSDILRVNTEITKAPLSASMIKRYDEHHQDLTLLKALVRQQLPEKYKEIFFDQSKNGYAGYIDGGASQEEFYKFIKPILEKMDGTEELLVKLNREDLLRKQRTFDNGSIPHQIHLGELHAILRRQEDFYPFLKDNREKIEKILTFRIPYYVGPLARGNSRFAWMTRKSEETITPWNFEEVVDKGASAQSFIERMTNFDKNLPNEKVLPKHSLLYEYFTVYNELTKVKYVTEGMRKPAFLSGEQKKAIVDLLFKTNRKVTVKQLKEDYFKKIECFDSVEISGVEDRFNASLGTYHDLLKIIKDKDFLDNEENEDILEDIVLTLTLFEDREMIEERLKTYAHLFDDKVMKQLKRRRYTGWGRLSRKLINGIRDKQSGKTILDFLKSDGFANRNFMQLIHDDSLTFKEDIQKAQVSGQGDSLHEHIANLAGSPAIKKGILQTVKVVDELVKVMGRHKPENIVIEMARENQTTQKGQKNSRERMKRIEEGIKELGSQILKEHPVENTQLQNEKLYLYYLQNGRDMYVDQELDINRLSDYDVDHIVPQSFLKDDSIDNKVLTRSDKARGKSDNVPSEEVVKKMKNYWRQLLNAKLITQRKFDNLTKAERGGLSELDKAGFIKRQLVETRQITKHVAQILDSRMNTKYDENDKLIREVKVITLKSKLVSDFRKDFQFYKVREINNYHHAHDAYLNAVVGTALIKKYPKLESEFVYGDYKVYDVRKMIAKSEQEIGKATAKYFFYSNIMNFFKTEITLANGEIRKRPLIETNGETGEIVWDKGRDFATVRKVLSMPQVNIVKKTEVQTGGFSKESILPKRNSDKLIARKKDWDPKKYGGFDSPTVAYSVLVVAKVEKGKSKKLKSVKELLGITIMERSSFEKNPIDFLEAKGYKEVKKDLIIKLPKYSLFELENGRKRMLASAGELQKGNELALPSKYVNFLYLASHYEKLKGSPEDNEQKQLFVEQHKHYLDEIIEQISEFSKRVILADANLDKVLSAYNKHRDKPIREQAENIIHLFTLTNLGAPAAFKYFDTTIDRKRYTSTKEVLDATLIHQSITGLYETRIDLSQLGGDGGGGSGSSEAAAKGGVLNLEEEYRLHEKPVPSSIDPSWLQLFPTVWAERAGMGLANQVPPVVVELRSGASPVAVRQYPMSKEAREGIRPHIQRFLDLGVLVPCQSPWNTPLLPVKKPGTNDYRPVQDLREINKRVQDIHPTVPNPYNLLSSLPPSHTWYSVLDLKDAFFCLKLHPNSQPLFAFEWRDPEKGNTGQLTWTRLPQGFKNSPTLFNEALHRDLAPFRALNPQVVLLQYVDDLLVAAPTYRDCKEGTQKLLQELSKLGYRVSAKKAQLCQKEVTYLGYLLKEGKRWLTPARKATVMKIPPPTTPRQVREFLGKAGFCRLFIPGFASLAAPLYPLTKPSIPFIWTEEHQKAFDRIKEALLSAPALALPDLTKPFTLYVDERAGVARGVLTQTLGPWRRPVAYLSKKLDPVASGWPTCLKAVAAVALLLKDADKLTLGQNVTVIASHSLESIVRQPPDRWMTNARMTHYQSLLLNERVSFAPPAVLNPATLLPVESEATPVHRCSEILAEETGTRRDLKDQPLPGVPAWYTDGSSFIAEGKRRAGAAIVDGKRTVWASSLPEGTSAQKAELVALTQALRLAEGKDINIYTDSRYAFATAHIHGAIYKQRGWLTSAGKDIKNKEEILALLEAIHLPKRVAIIHCPGHQKGNDPVATGNRRADEAAKQAALSTRVLAETTKPAGKRTADGSEFEKRTADGSEFESPKKKAKVE

SEQ ID NO: 937 - protein, 2092 aa, synthetic construct
MPAAKRVKLDGGDKKYSIGLDIGTNSVGWAVITDEYKVPSKKFKVLGNTDRHSIKKNLIGALLFDSGETAEATRLKRTARRRYTRRKNRICYLQEIFSNEMAKVDDSFFHRLEESFLVEEDKKHERHPIFGNIVDEVAYHEKYPTIYHLRKKLVDSTDKADLRLIYLALAHMIKFRGHFLIEGDLNPDNSDVDKLFIQLVQTYNQLFEENPINASGVDAKAILSARLSKSRRLENLIAQLPGEKKNGLFGNLIALSLGLTPNFKSNFDLAEDAKLQLSKDTYDDDLDNLLAQIGDQYADLFLAAKNLSDAILLSDILRVNTEITKAPLSASMIKRYDEHHQDLTLLKALVRQQLPEKYKEIFFDQSKNGYAGYIDGGASQEEFYKFIKPILEKMDGTEELLVKLNREDLLRKQRTFDNGSIPHQIHLGELHAILRRQEDFYPFLKDNREKIEKILTFRIPYYVGPLARGNSRFAWMTRKSEETITPWNFEEVVDKGASAQSFIERMTNFDKNLPNEKVLPKHSLLYEYFTVYNELTKVKYVTEGMRKPAFLSGEQKKAIVDLLFKTNRKVTVKQLKEDYFKKIECFDSVEISGVEDRFNASLGTYHDLLKIIKDKDFLDNEENEDILEDIVLTLTLFEDREMIEERLKTYAHLFDDKVMKQLKRRRYTGWGRLSRKLINGIRDKQSGKTILDFLKSDGFANRNFMQLIHDDSLTFKEDIQKAQVSGQGDSLHEHIANLAGSPAIKKGILQTVKVVDELVKVMGRHKPENIVIEMARENQTTQKGQKNSRERMKRIEEGIKELGSQILKEHPVENTQLQNEKLYLYYLQNGRDMYVDQELDINRLSDYDVDHIVPQSFLKDDSIDNKVLTRSDKARGKSDNVPSEEVVKKMKNYWRQLLNAKLITQRKFDNLTKAERGGLSELDKAGFIKRQLVETRQITKHVAQILDSRMNTKYDENDKLIREVKVITLKSKLVSDFRKDFQFYKVREINNYHHAHDAYLNAVVGTALIKKYPKLESEFVYGDYKVYDVRKMIAKSEQEIGKATAKYFFYSNIMNFFKTEITLANGEIRKRPLIETNGETGEIVWDKGRDFATVRKVLSMPQVNIVKKTEVQTGGFSKESILPKRNSDKLIARKKDWDPKKYGGFDSPTVAYSVLVVAKVEKGKSKKLKSVKELLGITIMERSSFEKNPIDFLEAKGYKEVKKDLIIKLPKYSLFELENGRKRMLASAGELQKGNELALPSKYVNFLYLASHYEKLKGSPEDNEQKQLFVEQHKHYLDEIIEQISEFSKRVILADANLDKVLSAYNKHRDKPIREQAENIIHLFTLTNLGAPAAFKYFDTTIDRKRYTSTKEVLDATLIHQSITGLYETRIDLSQLGGDGGGGGGGSGSSGGVLNLEEEYRLHEKPVPSSIDPSWLQLFPTVWAERAGMGLANQVPPVVVELRSGASPVAVRQYPMSKEAREGIRPHIQRFLDLGVLVPCQSPWNTPLLPVKKPGTNDYRPVQDLREINKRVQDIHPTVPNPYNLLSSLPPSHTWYSVLDLKDAFFCLKLHPNSQPLFAFEWRDPEKGNTGQLTWTRLPQGFKNSPTLFNEALHRDLAPFRALNPQVVLLQYVDDLLVAAPTYRDCKEGTQKLLQELSKLGYRVSAKKAQLCQKEVTYLGYLLKEGKRWLTPARKATVMKIPPPTTPRQVREFLGKAGFCRLFIPGFASLAAPLYPLTKPSIPFIWTEEHQKAFDRIKEALLSAPALALPDLTKPFTLYVDERAGVARGVLTQTLGPWRRPVAYLSKKLDPVASGWPTCLKAVAAVALLLKDADKLTLGQNVTVIASHSLESIVRQPPDRWMTNARMTHYQSLLLNERVSFAPPAVLNPATLLPVESEATPVHRCSEILAEETGTRRDLKDQPLPGVPAWYTDGSSFIAEGKRRAGAAIVDGKRTVWASSLPEGTSAQKAELVALTQALRLAEGKDINIYTDSRYAFATAHIHGAIYKQRGWLTSAGKDIKNKEEILALLEAIHLPKRVAIIHCPGHQKGNDPVATGNRRADEAAKQAALSTRVLAETTKPAGKRTADGSEFEKRTADGSEFESPKKKAKVE

SEQ ID NO: 938 - protein, 2098 aa, synthetic construct
MPAAKRVKLDGGDKKYSIGLDIGTNSVGWAVITDEYKVPSKKFKVLGNTDRHSIKKNLIGALLFDSGETAEATRLKRTARRRYTRRKNRICYLQEIFSNEMAKVDDSFFHRLEESFLVEEDKKHERHPIFGNIVDEVAYHEKYPTIYHLRKKLVDSTDKADLRLIYLALAHMIKFRGHFLIEGDLNPDNSDVDKLFIQLVQTYNQLFEENPINASGVDAKAILSARLSKSRRLENLIAQLPGEKKNGLFGNLIALSLGLTPNFKSNFDLAEDAKLQLSKDTYDDDLDNLLAQIGDQYADLFLAAKNLSDAILLSDILRVNTEITKAPLSASMIKRYDEHHQDLTLLKALVRQQLPEKYKEIFFDQSKNGYAGYIDGGASQEEFYKFIKPILEKMDGTEELLVKLNREDLLRKQRTFDNGSIPHQIHLGELHAILRRQEDFYPFLKDNREKIEKILTFRIPYYVGPLARGNSRFAWMTRKSEETITPWNFEEVVDKGASAQSFIERMTNFDKNLPNEKVLPKHSLLYEYFTVYNELTKVKYVTEGMRKPAFLSGEQKKAIVDLLFKTNRKVTVKQLKEDYFKKIECFDSVEISGVEDRFNASLGTYHDLLKIIKDKDFLDNEENEDILEDIVLTLTLFEDREMIEERLKTYAHLFDDKVMKQLKRRRYTGWGRLSRKLINGIRDKQSGKTILDFLKSDGFANRNFMQLIHDDSLTFKEDIQKAQVSGQGDSLHEHIANLAGSPAIKKGILQTVKVVDELVKVMGRHKPENIVIEMARENQTTQKGQKNSRERMKRIEEGIKELGSQILKEHPVENTQLQNEKLYLYYLQNGRDMYVDQELDINRLSDYDVDHIVPQSFLKDDSIDNKVLTRSDKARGKSDNVPSEEVVKKMKNYWRQLLNAKLITQRKFDNLTKAERGGLSELDKAGFIKRQLVETRQITKHVAQILDSRMNTKYDENDKLIREVKVITLKSKLVSDFRKDFQFYKVREINNYHHAHDAYLNAVVGTALIKKYPKLESEFVYGDYKVYDVRKMIAKSEQEIGKATAKYFFYSNIMNFFKTEITLANGEIRKRPLIETNGETGEIVWDKGRDFATVRKVLSMPQVNIVKKTEVQTGGFSKESILPKRNSDKLIARKKDWDPKKYGGFDSPTVAYSVLVVAKVEKGKSKKLKSVKELLGITIMERSSFEKNPIDFLEAKGYKEVKKDLIIKLPKYSLFELENGRKRMLASAGELQKGNELALPSKYVNFLYLASHYEKLKGSPEDNEQKQLFVEQHKHYLDEIIEQISEFSKRVILADANLDKVLSAYNKHRDKPIREQAENIIHLFTLTNLGAPAAFKYFDTTIDRKRYTSTKEVLDATLIHQSITGLYETRIDLSQLGGDGGGSSGSSGSSGSSGSSGGVLNLEEEYRLHEKPVPSSIDPSWLQLFPTVWAERAGMGLANQVPPVVVELRSGASPVAVRQYPMSKEAREGIRPHIQRFLDLGVLVPCQSPWNTPLLPVKKPGTNDYRPVQDLREINKRVQDIHPTVPNPYNLLSSLPPSHTWYSVLDLKDAFFCLKLHPNSQPLFAFEWRDPEKGNTGQLTWTRLPQGFKNSPTLFNEALHRDLAPFRALNPQVVLLQYVDDLLVAAPTYRDCKEGTQKLLQELSKLGYRVSAKKAQLCQKEVTYLGYLLKEGKRWLTPARKATVMKIPPPTTPRQVREFLGKAGFCRLFIPGFASLAAPLYPLTKPSIPFIWTEEHQKAFDRIKEALLSAPALALPDLTKPFTLYVDERAGVARGVLTQTLGPWRRPVAYLSKKLDPVASGWPTCLKAVAAVALLLKDADKLTLGQNVTVIASHSLESIVRQPPDRWMTNARMTHYQSLLLNERVSFAPPAVLNPATLLPVESEATPVHRCSEILAEETGTRRDLKDQPLPGVPAWYTDGSSFIAEGKRRAGAAIVDGKRTVWASSLPEGTSAQKAELVALTQALRLAEGKDINIYTDSRYAFATAHIHGAIYKQRGWLTSAGKDIKNKEEILALLEAIHLPKRVAIIHCPGHQKGNDPVATGNRRADEAAKQAALSTRVLAETTKPAGKRTADGSEFEKRTADGSEFESPKKKAKVE

SEQ ID NO: 939 - protein, 2094 aa, synthetic construct
MPAAKRVKLDGGDKKYSIGLDIGTNSVGWAVITDEYKVPSKKFKVLGNTDRHSIKKNLIGALLFDSGETAEATRLKRTARRRYTRRKNRICYLQEIFSNEMAKVDDSFFHRLEESFLVEEDKKHERHPIFGNIVDEVAYHEKYPTIYHLRKKLVDSTDKADLRLIYLALAHMIKFRGHFLIEGDLNPDNSDVDKLFIQLVQTYNQLFEENPINASGVDAKAILSARLSKSRRLENLIAQLPGEKKNGLFGNLIALSLGLTPNFKSNFDLAEDAKLQLSKDTYDDDLDNLLAQIGDQYADLFLAAKNLSDAILLSDILRVNTEITKAPLSASMIKRYDEHHQDLTLLKALVRQQLPEKYKEIFFDQSKNGYAGYIDGGASQEEFYKFIKPILEKMDGTEELLVKLNREDLLRKQRTFDNGSIPHQIHLGELHAILRRQEDFYPFLKDNREKIEKILTFRIPYYVGPLARGNSRFAWMTRKSEETITPWNFEEVVDKGASAQSFIERMTNFDKNLPNEKVLPKHSLLYEYFTVYNELTKVKYVTEGMRKPAFLSGEQKKAIVDLLFKTNRKVTVKQLKEDYFKKIECFDSVEISGVEDRFNASLGTYHDLLKIIKDKDFLDNEENEDILEDIVLTLTLFEDREMIEERLKTYAHLFDDKVMKQLKRRRYTGWGRLSRKLINGIRDKQSGKTILDFLKSDGFANRNFMQLIHDDSLTFKEDIQKAQVSGQGDSLHEHIANLAGSPAIKKGILQTVKVVDELVKVMGRHKPENIVIEMARENQTTQKGQKNSRERMKRIEEGIKELGSQILKEHPVENTQLQNEKLYLYYLQNGRDMYVDQELDINRLSDYDVDHIVPQSFLKDDSIDNKVLTRSDKARGKSDNVPSEEVVKKMKNYWRQLLNAKLITQRKFDNLTKAERGGLSELDKAGFIKRQLVETRQITKHVAQILDSRMNTKYDENDKLIREVKVITLKSKLVSDFRKDFQFYKVREINNYHHAHDAYLNAVVGTALIKKYPKLESEFVYGDYKVYDVRKMIAKSEQEIGKATAKYFFYSNIMNFFKTEITLANGEIRKRPLIETNGETGEIVWDKGRDFATVRKVLSMPQVNIVKKTEVQTGGFSKESILPKRNSDKLIARKKDWDPKKYGGFDSPTVAYSVLVVAKVEKGKSKKLKSVKELLGITIMERSSFEKNPIDFLEAKGYKEVKKDLIIKLPKYSLFELENGRKRMLASAGELQKGNELALPSKYVNFLYLASHYEKLKGSPEDNEQKQLFVEQHKHYLDEIIEQISEFSKRVILADANLDKVLSAYNKHRDKPIREQAENIIHLFTLTNLGAPAAFKYFDTTIDRKRYTSTKEVLDATLIHQSITGLYETRIDLSQLGGDGGPAPEAAAKGGSGGVLNLEEEYRLHEKPVPSSIDPSWLQLFPTVWAERAGMGLANQVPPVVVELRSGASPVAVRQYPMSKEAREGIRPHIQRFLDLGVLVPCQSPWNTPLLPVKKPGTNDYRPVQDLREINKRVQDIHPTVPNPYNLLSSLPPSHTWYSVLDLKDAFFCLKLHPNSQPLFAFEWRDPEKGNTGQLTWTRLPQGFKNSPTLFNEALHRDLAPFRALNPQVVLLQYVDDLLVAAPTYRDCKEGTQKLLQELSKLGYRVSAKKAQLCQKEVTYLGYLLKEGKRWLTPARKATVMKIPPPTTPRQVREFLGKAGFCRLFIPGFASLAAPLYPLTKPSIPFIWTEEHQKAFDRIKEALLSAPALALPDLTKPFTLYVDERAGVARGVLTQTLGPWRRPVAYLSKKLDPVASGWPTCLKAVAAVALLLKDADKLTLGQNVTVIASHSLESIVRQPPDRWMTNARMTHYQSLLLNERVSFAPPAVLNPATLLPVESEATPVHRCSEILAEETGTRRDLKDQPLPGVPAWYTDGSSFIAEGKRRAGAAIVDGKRTVWASSLPEGTSAQKAELVALTQALRLAEGKDINIYTDSRYAFATAHIHGAIYKQRGWLTSAGKDIKNKEEILALLEAIHLPKRVAIIHCPGHQKGNDPVATGNRRADEAAKQAALSTRVLAETTKPAGKRTADGSEFEKRTADGSEFESPKKKAKVE

SEQ ID NO: 940 - protein, 2089 aa, synthetic construct
MPAAKRVKLDGGDKKYSIGLDIGTNSVGWAVITDEYKVPSKKFKVLGNTDRHSIKKNLIGALLFDSGETAEATRLKRTARRRYTRRKNRICYLQEIFSNEMAKVDDSFFHRLEESFLVEEDKKHERHPIFGNIVDEVAYHEKYPTIYHLRKKLVDSTDKADLRLIYLALAHMIKFRGHFLIEGDLNPDNSDVDKLFIQLVQTYNQLFEENPINASGVDAKAILSARLSKSRRLENLIAQLPGEKKNGLFGNLIALSLGLTPNFKSNFDLAEDAKLQLSKDTYDDDLDNLLAQIGDQYADLFLAAKNLSDAILLSDILRVNTEITKAPLSASMIKRYDEHHQDLTLLKALVRQQLPEKYKEIFFDQSKNGYAGYIDGGASQEEFYKFIKPILEKMDGTEELLVKLNREDLLRKQRTFDNGSIPHQIHLGELHAILRRQEDFYPFLKDNREKIEKILTFRIPYYVGPLARGNSRFAWMTRKSEETITPWNFEEVVDKGASAQSFIERMTNFDKNLPNEKVLPKHSLLYEYFTVYNELTKVKYVTEGMRKPAFLSGEQKKAIVDLLFKTNRKVTVKQLKEDYFKKIECFDSVEISGVEDRFNASLGTYHDLLKIIKDKDFLDNEENEDILEDIVLTLTLFEDREMIEERLKTYAHLFDDKVMKQLKRRRYTGWGRLSRKLINGIRDKQSGKTILDFLKSDGFANRNFMQLIHDDSLTFKEDIQKAQVSGQGDSLHEHIANLAGSPAIKKGILQTVKVVDELVKVMGRHKPENIVIEMARENQTTQKGQKNSRERMKRIEEGIKELGSQILKEHPVENTQLQNEKLYLYYLQNGRDMYVDQELDINRLSDYDVDHIVPQSFLKDDSIDNKVLTRSDKARGKSDNVPSEEVVKKMKNYWRQLLNAKLITQRKFDNLTKAERGGLSELDKAGFIKRQLVETRQITKHVAQILDSRMNTKYDENDKLIREVKVITLKSKLVSDFRKDFQFYKVREINNYHHAHDAYLNAVVGTALIKKYPKLESEFVYGDYKVYDVRKMIAKSEQEIGKATAKYFFYSNIMNFFKTEITLANGEIRKRPLIETNGETGEIVWDKGRDFATVRKVLSMPQVNIVKKTEVQTGGFSKESILPKRNSDKLIARKKDWDPKKYGGFDSPTVAYSVLVVAKVEKGKSKKLKSVKELLGITIMERSSFEKNPIDFLEAKGYKEVKKDLIIKLPKYSLFELENGRKRMLASAGELQKGNELALPSKYVNFLYLASHYEKLKGSPEDNEQKQLFVEQHKHYLDEIIEQISEFSKRVILADANLDKVLSAYNKHRDKPIREQAENIIHLFTLTNLGAPAAFKYFDTTIDRKRYTSTKEVLDATLIHQSITGLYETRIDLSQLGGDGGGGGPAPGGVLNLEEEYRLHEKPVPSSIDPSWLQLFPTVWAERAGMGLANQVPPVVVELRSGASPVAVRQYPMSKEAREGIRPHIQRFLDLGVLVPCQSPWNTPLLPVKKPGTNDYRPVQDLREINKRVQDIHPTVPNPYNLLSSLPPSHTWYSVLDLKDAFFCLKLHPNSQPLFAFEWRDPEKGNTGQLTWTRLPQGFKNSPTLFNEALHRDLAPFRALNPQVVLLQYVDDLLVAAPTYRDCKEGTQKLLQELSKLGYRVSAKKAQLCQKEVTYLGYLLKEGKRWLTPARKATVMKIPPPTTPRQVREFLGKAGFCRLFIPGFASLAAPLYPLTKPSIPFIWTEEHQKAFDRIKEALLSAPALALPDLTKPFTLYVDERAGVARGVLTQTLGPWRRPVAYLSKKLDPVASGWPTCLKAVAAVALLLKDADKLTLGQNVTVIASHSLESIVRQPPDRWMTNARMTHYQSLLLNERVSFAPPAVLNPATLLPVESEATPVHRCSEILAEETGTRRDLKDQPLPGVPAWYTDGSSFIAEGKRRAGAAIVDGKRTVWASSLPEGTSAQKAELVALTQALRLAEGKDINIYTDSRYAFATAHIHGAIYKQRGWLTSAGKDIKNKEEILALLEAIHLPKRVAIIHCPGHQKGNDPVATGNRRADEAAKQAALSTRVLAETTKPAGKRTADGSEFEKRTADGSEFESPKKKAKVE

SEQ ID NO: 941 - protein, 2089 aa, synthetic construct
MPAAKRVKLDGGDKKYSIGLDIGTNSVGWAVITDEYKVPSKKFKVLGNTDRHSIKKNLIGALLFDSGETAEATRLKRTARRRYTRRKNRICYLQEIFSNEMAKVDDSFFHRLEESFLVEEDKKHERHPIFGNIVDEVAYHEKYPTIYHLRKKLVDSTDKADLRLIYLALAHMIKFRGHFLIEGDLNPDNSDVDKLFIQLVQTYNQLFEENPINASGVDAKAILSARLSKSRRLENLIAQLPGEKKNGLFGNLIALSLGLTPNFKSNFDLAEDAKLQLSKDTYDDDLDNLLAQIGDQYADLFLAAKNLSDAILLSDILRVNTEITKAPLSASMIKRYDEHHQDLTLLKALVRQQLPEKYKEIFFDQSKNGYAGYIDGGASQEEFYKFIKPILEKMDGTEELLVKLNREDLLRKQRTFDNGSIPHQIHLGELHAILRRQEDFYPFLKDNREKIEKILTFRIPYYVGPLARGNSRFAWMTRKSEETITPWNFEEVVDKGASAQSFIERMTNFDKNLPNEKVLPKHSLLYEYFTVYNELTKVKYVTEGMRKPAFLSGEQKKAIVDLLFKTNRKVTVKQLKEDYFKKIECFDSVEISGVEDRFNASLGTYHDLLKIIKDKDFLDNEENEDILEDIVLTLTLFEDREMIEERLKTYAHLFDDKVMKQLKRRRYTGWGRLSRKLINGIRDKQSGKTILDFLKSDGFANRNFMQLIHDDSLTFKEDIQKAQVSGQGDSLHEHIANLAGSPAIKKGILQTVKVVDELVKVMGRHKPENIVIEMARENQTTQKGQKNSRERMKRIEEGIKELGSQILKEHPVENTQLQNEKLYLYYLQNGRDMYVDQELDINRLSDYDVDHIVPQSFLKDDSIDNKVLTRSDKARGKSDNVPSEEVVKKMKNYWRQLLNAKLITQRKFDNLTKAERGGLSELDKAGFIKRQLVETRQITKHVAQILDSRMNTKYDENDKLIREVKVITLKSKLVSDFRKDFQFYKVREINNYHHAHDAYLNAVVGTALIKKYPKLESEFVYGDYKVYDVRKMIAKSEQEIGKATAKYFFYSNIMNFFKTEITLANGEIRKRPLIETNGETGEIVWDKGRDFATVRKVLSMPQVNIVKKTEVQTGGFSKESILPKRNSDKLIARKKDWDPKKYGGFDSPTVAYSVLVVAKVEKGKSKKLKSVKELLGITIMERSSFEKNPIDFLEAKGYKEVKKDLIIKLPKYSLFELENGRKRMLASAGELQKGNELALPSKYVNFLYLASHYEKLKGSPEDNEQKQLFVEQHKHYLDEIIEQISEFSKRVILADANLDKVLSAYNKHRDKPIREQAENIIHLFTLTNLGAPAAFKYFDTTIDRKRYTSTKEVLDATLIHQSITGLYETRIDLSQLGGDGGPAPGSSGGVLNLEEEYRLHEKPVPSSIDPSWLQLFPTVWAERAGMGLANQVPPVVVELRSGASPVAVRQYPMSKEAREGIRPHIQRFLDLGVLVPCQSPWNTPLLPVKKPGTNDYRPVQDLREINKRVQDIHPTVPNPYNLLSSLPPSHTWYSVLDLKDAFFCLKLHPNSQPLFAFEWRDPEKGNTGQLTWTRLPQGFKNSPTLFNEALHRDLAPFRALNPQVVLLQYVDDLLVAAPTYRDCKEGTQKLLQELSKLGYRVSAKKAQLCQKEVTYLGYLLKEGKRWLTPARKATVMKIPPPTTPRQVREFLGKAGFCRLFIPGFASLAAPLYPLTKPSIPFIWTEEHQKAFDRIKEALLSAPALALPDLTKPFTLYVDERAGVARGVLTQTLGPWRRPVAYLSKKLDPVASGWPTCLKAVAAVALLLKDADKLTLGQNVTVIASHSLESIVRQPPDRWMTNARMTHYQSLLLNERVSFAPPAVLNPATLLPVESEATPVHRCSEILAEETGTRRDLKDQPLPGVPAWYTDGSSFIAEGKRRAGAAIVDGKRTVWASSLPEGTSAQKAELVALTQALRLAEGKDINIYTDSRYAFATAHIHGAIYKQRGWLTSAGKDIKNKEEILALLEAIHLPKRVAIIHCPGHQKGNDPVATGNRRADEAAKQAALSTRVLAETTKPAGKRTADGSEFEKRTADGSEFESPKKKAKVE

SEQ ID NO: 942 - protein, 2091 aa, synthetic construct
MPAAKRVKLDGGDKKYSIGLDIGTNSVGWAVITDEYKVPSKKFKVLGNTDRHSIKKNLIGALLFDSGETAEATRLKRTARRRYTRRKNRICYLQEIFSNEMAKVDDSFFHRLEESFLVEEDKKHERHPIFGNIVDEVAYHEKYPTIYHLRKKLVDSTDKADLRLIYLALAHMIKFRGHFLIEGDLNPDNSDVDKLFIQLVQTYNQLFEENPINASGVDAKAILSARLSKSRRLENLIAQLPGEKKNGLFGNLIALSLGLTPNFKSNFDLAEDAKLQLSKDTYDDDLDNLLAQIGDQYADLFLAAKNLSDAILLSDILRVNTEITKAPLSASMIKRYDEHHQDLTLLKALVRQQLPEKYKEIFFDQSKNGYAGYIDGGASQEEFYKFIKPILEKMDGTEELLVKLNREDLLRKQRTFDNGSIPHQIHLGELHAILRRQEDFYPFLKDNREKIEKILTFRIPYYVGPLARGNSRFAWMTRKSEETITPWNFEEVVDKGASAQSFIERMTNFDKNLPNEKVLPKHSLLYEYFTVYNELTKVKYVTEGMRKPAFLSGEQKKAIVDLLFKTNRKVTVKQLKEDYFKKIECFDSVEISGVEDRFNASLGTYHDLLKIIKDKDFLDNEENEDILEDIVLTLTLFEDREMIEERLKTYAHLFDDKVMKQLKRRRYTGWGRLSRKLINGIRDKQSGKTILDFLKSDGFANRNFMQLIHDDSLTFKEDIQKAQVSGQGDSLHEHIANLAGSPAIKKGILQTVKVVDELVKVMGRHKPENIVIEMARENQTTQKGQKNSRERMKRIEEGIKELGSQILKEHPVENTQLQNEKLYLYYLQNGRDMYVDQELDINRLSDYDVDHIVPQSFLKDDSIDNKVLTRSDKARGKSDNVPSEEVVKKMKNYWRQLLNAKLITQRKFDNLTKAERGGLSELDKAGFIKRQLVETRQITKHVAQILDSRMNTKYDENDKLIREVKVITLKSKLVSDFRKDFQFYKVREINNYHHAHDAYLNAVVGTALIKKYPKLESEFVYGDYKVYDVRKMIAKSEQEIGKATAKYFFYSNIMNFFKTEITLANGEIRKRPLIETNGETGEIVWDKGRDFATVRKVLSMPQVNIVKKTEVQTGGFSKESILPKRNSDKLIARKKDWDPKKYGGFDSPTVAYSVLVVAKVEKGKSKKLKSVKELLGITIMERSSFEKNPIDFLEAKGYKEVKKDLIIKLPKYSLFELENGRKRMLASAGELQKGNELALPSKYVNFLYLASHYEKLKGSPEDNEQKQLFVEQHKHYLDEIIEQISEFSKRVILADANLDKVLSAYNKHRDKPIREQAENIIHLFTLTNLGAPAAFKYFDTTIDRKRYTSTKEVLDATLIHQSITGLYETRIDLSQLGGDGGEAAAKGSSGGVLNLEEEYRLHEKPVPSSIDPSWLQLFPTVWAERAGMGLANQVPPVVVELRSGASPVAVRQYPMSKEAREGIRPHIQRFLDLGVLVPCQSPWNTPLLPVKKPGTNDYRPVQDLREINKRVQDIHPTVPNPYNLLSSLPPSHTWYSVLDLKDAFFCLKLHPNSQPLFAFEWRDPEKGNTGQLTWTRLPQGFKNSPTLFNEALHRDLAPFRALNPQVVLLQYVDDLLVAAPTYRDCKEGTQKLLQELSKLGYRVSAKKAQLCQKEVTYLGYLLKEGKRWLTPARKATVMKIPPPTTPRQVREFLGKAGFCRLFIPGFASLAAPLYPLTKPSIPFIWTEEHQKAFDRIKEALLSAPALALPDLTKPFTLYVDERAGVARGVLTQTLGPWRRPVAYLSKKLDPVASGWPTCLKAVAAVALLLKDADKLTLGQNVTVIASHSLESIVRQPPDRWMTNARMTHYQSLLLNERVSFAPPAVLNPATLLPVESEATPVHRCSEILAEETGTRRDLKDQPLPGVPAWYTDGSSFIAEGKRRAGAAIVDGKRTVWASSLPEGTSAQKAELVALTQALRLAEGKDINIYTDSRYAFATAHIHGAIYKQRGWLTSAGKDIKNKEEILALLEAIHLPKRVAIIHCPGHQKGNDPVATGNRRADEAAKQAALSTRVLAETTKPAGKRTADGSEFEKRTADGSEFESPKKKAKVE

SEQ ID NO: 943 - protein, 2089 aa, synthetic construct
MPAAKRVKLDGGDKKYSIGLDIGTNSVGWAVITDEYKVPSKKFKVLGNTDRHSIKKNLIGALLFDSGETAEATRLKRTARRRYTRRKNRICYLQEIFSNEMAKVDDSFFHRLEESFLVEEDKKHERHPIFGNIVDEVAYHEKYPTIYHLRKKLVDSTDKADLRLIYLALAHMIKFRGHFLIEGDLNPDNSDVDKLFIQLVQTYNQLFEENPINASGVDAKAILSARLSKSRRLENLIAQLPGEKKNGLFGNLIALSLGLTPNFKSNFDLAEDAKLQLSKDTYDDDLDNLLAQIGDQYADLFLAAKNLSDAILLSDILRVNTEITKAPLSASMIKRYDEHHQDLTLLKALVRQQLPEKYKEIFFDQSKNGYAGYIDGGASQEEFYKFIKPILEKMDGTEELLVKLNREDLLRKQRTFDNGSIPHQIHLGELHAILRRQEDFYPFLKDNREKIEKILTFRIPYYVGPLARGNSRFAWMTRKSEETITPWNFEEVVDKGASAQSFIERMTNFDKNLPNEKVLPKHSLLYEYFTVYNELTKVKYVTEGMRKPAFLSGEQKKAIVDLLFKTNRKVTVKQLKEDYFKKIECFDSVEISGVEDRFNASLGTYHDLLKIIKDKDFLDNEENEDILEDIVLTLTLFEDREMIEERLKTYAHLFDDKVMKQLKRRRYTGWGRLSRKLINGIRDKQSGKTILDFLKSDGFANRNFMQLIHDDSLTFKEDIQKAQVSGQGDSLHEHIANLAGSPAIKKGILQTVKVVDELVKVMGRHKPENIVIEMARENQTTQKGQKNSRERMKRIEEGIKELGSQILKEHPVENTQLQNEKLYLYYLQNGRDMYVDQELDINRLSDYDVDHIVPQSFLKDDSIDNKVLTRSDKARGKSDNVPSEEVVKKMKNYWRQLLNAKLITQRKFDNLTKAERGGLSELDKAGFIKRQLVETRQITKHVAQILDSRMNTKYDENDKLIREVKVITLKSKLVSDFRKDFQFYKVREINNYHHAHDAYLNAVVGTALIKKYPKLESEFVYGDYKVYDVRKMIAKSEQEIGKATAKYFFYSNIMNFFKTEITLANGEIRKRPLIETNGETGEIVWDKGRDFATVRKVLSMPQVNIVKKTEVQTGGFSKESILPKRNSDKLIARKKDWDPKKYGGFDSPTVAYSVLVVAKVEKGKSKKLKSVKELLGITIMERSSFEKNPIDFLEAKGYKEVKKDLIIKLPKYSLFELENGRKRMLASAGELQKGNELALPSKYVNFLYLASHYEKLKGSPEDNEQKQLFVEQHKHYLDEIIEQISEFSKRVILADANLDKVLSAYNKHRDKPIREQAENIIHLFTLTNLGAPAAFKYFDTTIDRKRYTSTKEVLDATLIHQSITGLYETRIDLSQLGGDGGPAPGGSGGVLNLEEEYRLHEKPVPSSIDPSWLQLFPTVWAERAGMGLANQVPPVVVELRSGASPVAVRQYPMSKEAREGIRPHIQRFLDLGVLVPCQSPWNTPLLPVKKPGTNDYRPVQDLREINKRVQDIHPTVPNPYNLLSSLPPSHTWYSVLDLKDAFFCLKLHPNSQPLFAFEWRDPEKGNTGQLTWTRLPQGFKNSPTLFNEALHRDLAPFRALNPQVVLLQYVDDLLVAAPTYRDCKEGTQKLLQELSKLGYRVSAKKAQLCQKEVTYLGYLLKEGKRWLTPARKATVMKIPPPTTPRQVREFLGKAGFCRLFIPGFASLAAPLYPLTKPSIPFIWTEEHQKAFDRIKEALLSAPALALPDLTKPFTLYVDERAGVARGVLTQTLGPWRRPVAYLSKKLDPVASGWPTCLKAVAAVALLLKDADKLTLGQNVTVIASHSLESIVRQPPDRWMTNARMTHYQSLLLNERVSFAPPAVLNPATLLPVESEATPVHRCSEILAEETGTRRDLKDQPLPGVPAWYTDGSSFIAEGKRRAGAAIVDGKRTVWASSLPEGTSAQKAELVALTQALRLAEGKDINIYTDSRYAFATAHIHGAIYKQRGWLTSAGKDIKNKEEILALLEAIHLPKRVAIIHCPGHQKGNDPVATGNRRADEAAKQAALSTRVLAETTKPAGKRTADGSEFEKRTADGSEFESPKKKAKVE

SEQ ID NO: 944 - protein, 2094 aa, synthetic construct
MPAAKRVKLDGGDKKYSIGLDIGTNSVGWAVITDEYKVPSKKFKVLGNTDRHSIKKNLIGALLFDSGETAEATRLKRTARRRYTRRKNRICYLQEIFSNEMAKVDDSFFHRLEESFLVEEDKKHERHPIFGNIVDEVAYHEKYPTIYHLRKKLVDSTDKADLRLIYLALAHMIKFRGHFLIEGDLNPDNSDVDKLFIQLVQTYNQLFEENPINASGVDAKAILSARLSKSRRLENLIAQLPGEKKNGLFGNLIALSLGLTPNFKSNFDLAEDAKLQLSKDTYDDDLDNLLAQIGDQYADLFLAAKNLSDAILLSDILRVNTEITKAPLSASMIKRYDEHHQDLTLLKALVRQQLPEKYKEIFFDQSKNGYAGYIDGGASQEEFYKFIKPILEKMDGTEELLVKLNREDLLRKQRTFDNGSIPHQIHLGELHAILRRQEDFYPFLKDNREKIEKILTFRIPYYVGPLARGNSRFAWMTRKSEETITPWNFEEVVDKGASAQSFIERMTNFDKNLPNEKVLPKHSLLYEYFTVYNELTKVKYVTEGMRKPAFLSGEQKKAIVDLLFKTNRKVTVKQLKEDYFKKIECFDSVEISGVEDRFNASLGTYHDLLKIIKDKDFLDNEENEDILEDIVLTLTLFEDREMIEERLKTYAHLFDDKVMKQLKRRRYTGWGRLSRKLINGIRDKQSGKTILDFLKSDGFANRNFMQLIHDDSLTFKEDIQKAQVSGQGDSLHEHIANLAGSPAIKKGILQTVKVVDELVKVMGRHKPENIVIEMARENQTTQKGQKNSRERMKRIEEGIKELGSQILKEHPVENTQLQNEKLYLYYLQNGRDMYVDQELDINRLSDYDVDHIVPQSFLKDDSIDNKVLTRSDKARGKSDNVPSEEVVKKMKNYWRQLLNAKLITQRKFDNLTKAERGGLSELDKAGFIKRQLVETRQITKHVAQILDSRMNTKYDENDKLIREVKVITLKSKLVSDFRKDFQFYKVREINNYHHAHDAYLNAVVGTALIKKYPKLESEFVYGDYKVYDVRKMIAKSEQEIGKATAKYFFYSNIMNFFKTEITLANGEIRKRPLIETNGETGEIVWDKGRDFATVRKVLSMPQVNIVKKTEVQTGGFSKESILPKRNSDKLIARKKDWDPKKYGGFDSPTVAYSVLVVAKVEKGKSKKLKSVKELLGITIMERSSFEKNPIDFLEAKGYKEVKKDLIIKLPKYSLFELENGRKRMLASAGELQKGNELALPSKYVNFLYLASHYEKLKGSPEDNEQKQLFVEQHKHYLDEIIEQISEFSKRVILADANLDKVLSAYNKHRDKPIREQAENIIHLFTLTNLGAPAAFKYFDTTIDRKRYTSTKEVLDATLIHQSITGLYETRIDLSQLGGDGGGSSPAPEAAAKGGVLNLEEEYRLHEKPVPSSIDPSWLQLFPTVWAERAGMGLANQVPPVVVELRSGASPVAVRQYPMSKEAREGIRPHIQRFLDLGVLVPCQSPWNTPLLPVKKPGTNDYRPVQDLREINKRVQDIHPTVPNPYNLLSSLPPSHTWYSVLDLKDAFFCLKLHPNSQPLFAFEWRDPEKGNTGQLTWTRLPQGFKNSPTLFNEALHRDLAPFRALNPQVVLLQYVDDLLVAAPTYRDCKEGTQKLLQELSKLGYRVSAKKAQLCQKEVTYLGYLLKEGKRWLTPARKATVMKIPPPTTPRQVREFLGKAGFCRLFIPGFASLAAPLYPLTKPSIPFIWTEEHQKAFDRIKEALLSAPALALPDLTKPFTLYVDERAGVARGVLTQTLGPWRRPVAYLSKKLDPVASGWPTCLKAVAAVALLLKDADKLTLGQNVTVIASHSLESIVRQPPDRWMTNARMTHYQSLLLNERVSFAPPAVLNPATLLPVESEATPVHRCSEILAEETGTRRDLKDQPLPGVPAWYTDGSSFIAEGKRRAGAAIVDGKRTVWASSLPEGTSAQKAELVALTQALRLAEGKDINIYTDSRYAFATAHIHGAIYKQRGWLTSAGKDIKNKEEILALLEAIHLPKRVAIIHCPGHQKGNDPVATGNRRADEAAKQAALSTRVLAETTKPAGKRTADGSEFEKRTADGSEFESPKKKAKVE

SEQ ID NO: 945 - protein, 2093 aa, synthetic construct
MPAAKRVKLDGGDKKYSIGLDIGTNSVGWAVITDEYKVPSKKFKVLGNTDRHSIKKNLIGALLFDSGETAEATRLKRTARRRYTRRKNRICYLQEIFSNEMAKVDDSFFHRLEESFLVEEDKKHERHPIFGNIVDEVAYHEKYPTIYHLRKKLVDSTDKADLRLIYLALAHMIKFRGHFLIEGDLNPDNSDVDKLFIQLVQTYNQLFEENPINASGVDAKAILSARLSKSRRLENLIAQLPGEKKNGLFGNLIALSLGLTPNFKSNFDLAEDAKLQLSKDTYDDDLDNLLAQIGDQYADLFLAAKNLSDAILLSDILRVNTEITKAPLSASMIKRYDEHHQDLTLLKALVRQQLPEKYKEIFFDQSKNGYAGYIDGGASQEEFYKFIKPILEKMDGTEELLVKLNREDLLRKQRTFDNGSIPHQIHLGELHAILRRQEDFYPFLKDNREKIEKILTFRIPYYVGPLARGNSRFAWMTRKSEETITPWNFEEVVDKGASAQSFIERMTNFDKNLPNEKVLPKHSLLYEYFTVYNELTKVKYVTEGMRKPAFLSGEQKKAIVDLLFKTNRKVTVKQLKEDYFKKIECFDSVEISGVEDRFNASLGTYHDLLKIIKDKDFLDNEENEDILEDIVLTLTLFEDREMIEERLKTYAHLFDDKVMKQLKRRRYTGWGRLSRKLINGIRDKQSGKTILDFLKSDGFANRNFMQLIHDDSLTFKEDIQKAQVSGQGDSLHEHIANLAGSPAIKKGILQTVKVVDELVKVMGRHKPENIVIEMARENQTTQKGQKNSRERMKRIEEGIKELGSQILKEHPVENTQLQNEKLYLYYLQNGRDMYVDQELDINRLSDYDVDHIVPQSFLKDDSIDNKVLTRSDKARGKSDNVPSEEVVKKMKNYWRQLLNAKLITQRKFDNLTKAERGGLSELDKAGFIKRQLVETRQITKHVAQILDSRMNTKYDENDKLIREVKVITLKSKLVSDFRKDFQFYKVREINNYHHAHDAYLNAVVGTALIKKYPKLESEFVYGDYKVYDVRKMIAKSEQEIGKATAKYFFYSNIMNFFKTEITLANGEIRKRPLIETNGETGEIVWDKGRDFATVRKVLSMPQVNIVKKTEVQTGGFSKESILPKRNSDKLIARKKDWDPKKYGGFDSPTVAYSVLVVAKVEKGKSKKLKSVKELLGITIMERSSFEKNPIDFLEAKGYKEVKKDLIIKLPKYSLFELENGRKRMLASAGELQKGNELALPSKYVNFLYLASHYEKLKGSPEDNEQKQLFVEQHKHYLDEIIEQISEFSKRVILADANLDKVLSAYNKHRDKPIREQAENIIHLFTLTNLGAPAAFKYFDTTIDRKRYTSTKEVLDATLIHQSITGLYETRIDLSQLGGDGGGGGGSGGGGSGGVLNLEEEYRLHEKPVPSSIDPSWLQLFPTVWAERAGMGLANQVPPVVVELRSGASPVAVRQYPMSKEAREGIRPHIQRFLDLGVLVPCQSPWNTPLLPVKKPGTNDYRPVQDLREINKRVQDIHPTVPNPYNLLSSLPPSHTWYSVLDLKDAFFCLKLHPNSQPLFAFEWRDPEKGNTGQLTWTRLPQGFKNSPTLFNEALHRDLAPFRALNPQVVLLQYVDDLLVAAPTYRDCKEGTQKLLQELSKLGYRVSAKKAQLCQKEVTYLGYLLKEGKRWLTPARKATVMKIPPPTTPRQVREFLGKAGFCRLFIPGFASLAAPLYPLTKPSIPFIWTEEHQKAFDRIKEALLSAPALALPDLTKPFTLYVDERAGVARGVLTQTLGPWRRPVAYLSKKLDPVASGWPTCLKAVAAVALLLKDADKLTLGQNVTVIASHSLESIVRQPPDRWMTNARMTHYQSLLLNERVSFAPPAVLNPATLLPVESEATPVHRCSEILAEETGTRRDLKDQPLPGVPAWYTDGSSFIAEGKRRAGAAIVDGKRTVWASSLPEGTSAQKAELVALTQALRLAEGKDINIYTDSRYAFATAHIHGAIYKQRGWLTSAGKDIKNKEEILALLEAIHLPKRVAIIHCPGHQKGNDPVATGNRRADEAAKQAALSTRVLAETTKPAGKRTADGSEFEKRTADGSEFESPKKKAKVE

SEQ ID NO: 946 - protein, 2092 aa, synthetic construct
MPAAKRVKLDGGDKKYSIGLDIGTNSVGWAVITDEYKVPSKKFKVLGNTDRHSIKKNLIGALLFDSGETAEATRLKRTARRRYTRRKNRICYLQEIFSNEMAKVDDSFFHRLEESFLVEEDKKHERHPIFGNIVDEVAYHEKYPTIYHLRKKLVDSTDKADLRLIYLALAHMIKFRGHFLIEGDLNPDNSDVDKLFIQLVQTYNQLFEENPINASGVDAKAILSARLSKSRRLENLIAQLPGEKKNGLFGNLIALSLGLTPNFKSNFDLAEDAKLQLSKDTYDDDLDNLLAQIGDQYADLFLAAKNLSDAILLSDILRVNTEITKAPLSASMIKRYDEHHQDLTLLKALVRQQLPEKYKEIFFDQSKNGYAGYIDGGASQEEFYKFIKPILEKMDGTEELLVKLNREDLLRKQRTFDNGSIPHQIHLGELHAILRRQEDFYPFLKDNREKIEKILTFRIPYYVGPLARGNSRFAWMTRKSEETITPWNFEEVVDKGASAQSFIERMTNFDKNLPNEKVLPKHSLLYEYFTVYNELTKVKYVTEGMRKPAFLSGEQKKAIVDLLFKTNRKVTVKQLKEDYFKKIECFDSVEISGVEDRFNASLGTYHDLLKIIKDKDFLDNEENEDILEDIVLTLTLFEDREMIEERLKTYAHLFDDKVMKQLKRRRYTGWGRLSRKLINGIRDKQSGKTILDFLKSDGFANRNFMQLIHDDSLTFKEDIQKAQVSGQGDSLHEHIANLAGSPAIKKGILQTVKVVDELVKVMGRHKPENIVIEMARENQTTQKGQKNSRERMKRIEEGIKELGSQILKEHPVENTQLQNEKLYLYYLQNGRDMYVDQELDINRLSDYDVDHIVPQSFLKDDSIDNKVLTRSDKARGKSDNVPSEEVVKKMKNYWRQLLNAKLITQRKFDNLTKAERGGLSELDKAGFIKRQLVETRQITKHVAQILDSRMNTKYDENDKLIREVKVITLKSKLVSDFRKDFQFYKVREINNYHHAHDAYLNAVVGTALIKKYPKLESEFVYGDYKVYDVRKMIAKSEQEIGKATAKYFFYSNIMNFFKTEITLANGEIRKRPLIETNGETGEIVWDKGRDFATVRKVLSMPQVNIVKKTEVQTGGFSKESILPKRNSDKLIARKKDWDPKKYGGFDSPTVAYSVLVVAKVEKGKSKKLKSVKELLGITIMERSSFEKNPIDFLEAKGYKEVKKDLIIKLPKYSLFELENGRKRMLASAGELQKGNELALPSKYVNFLYLASHYEKLKGSPEDNEQKQLFVEQHKHYLDEIIEQISEFSKRVILADANLDKVLSAYNKHRDKPIREQAENIIHLFTLTNLGAPAAFKYFDTTIDRKRYTSTKEVLDATLIHQSITGLYETRIDLSQLGGDGGGGGGSSGGSGGVLNLEEEYRLHEKPVPSSIDPSWLQLFPTVWAERAGMGLANQVPPVVVELRSGASPVAVRQYPMSKEAREGIRPHIQRFLDLGVLVPCQSPWNTPLLPVKKPGTNDYRPVQDLREINKRVQDIHPTVPNPYNLLSSLPPSHTWYSVLDLKDAFFCLKLHPNSQPLFAFEWRDPEKGNTGQLTWTRLPQGFKNSPTLFNEALHRDLAPFRALNPQVVLLQYVDDLLVAAPTYRDCKEGTQKLLQELSKLGYRVSAKKAQLCQKEVTYLGYLLKEGKRWLTPARKATVMKIPPPTTPRQVREFLGKAGFCRLFIPGFASLAAPLYPLTKPSIPFIWTEEHQKAFDRIKEALLSAPALALPDLTKPFTLYVDERAGVARGVLTQTLGPWRRPVAYLSKKLDPVASGWPTCLKAVAAVALLLKDADKLTLGQNVTVIASHSLESIVRQPPDRWMTNARMTHYQSLLLNERVSFAPPAVLNPATLLPVESEATPVHRCSEILAEETGTRRDLKDQPLPGVPAWYTDGSSFIAEGKRRAGAAIVDGKRTVWASSLPEGTSAQKAELVALTQALRLAEGKDINIYTDSRYAFATAHIHGAIYKQRGWLTSAGKDIKNKEEILALLEAIHLPKRVAIIHCPGHQKGNDPVATGNRRADEAAKQAALSTRVLAETTKPAGKRTADGSEFEKRTADGSEFESPKKKAKVE

SEQ ID NO: 947 - protein, 2091 aa, synthetic construct
MPAAKRVKLDGGDKKYSIGLDIGTNSVGWAVITDEYKVPSKKFKVLGNTDRHSIKKNLIGALLFDSGETAEATRLKRTARRRYTRRKNRICYLQEIFSNEMAKVDDSFFHRLEESFLVEEDKKHERHPIFGNIVDEVAYHEKYPTIYHLRKKLVDSTDKADLRLIYLALAHMIKFRGHFLIEGDLNPDNSDVDKLFIQLVQTYNQLFEENPINASGVDAKAILSARLSKSRRLENLIAQLPGEKKNGLFGNLIALSLGLTPNFKSNFDLAEDAKLQLSKDTYDDDLDNLLAQIGDQYADLFLAAKNLSDAILLSDILRVNTEITKAPLSASMIKRYDEHHQDLTLLKALVRQQLPEKYKEIFFDQSKNGYAGYIDGGASQEEFYKFIKPILEKMDGTEELLVKLNREDLLRKQRTFDNGSIPHQIHLGELHAILRRQEDFYPFLKDNREKIEKILTFRIPYYVGPLARGNSRFAWMTRKSEETITPWNFEEVVDKGASAQSFIERMTNFDKNLPNEKVLPKHSLLYEYFTVYNELTKVKYVTEGMRKPAFLSGEQKKAIVDLLFKTNRKVTVKQLKEDYFKKIECFDSVEISGVEDRFNASLGTYHDLLKIIKDKDFLDNEENEDILEDIVLTLTLFEDREMIEERLKTYAHLFDDKVMKQLKRRRYTGWGRLSRKLINGIRDKQSGKTILDFLKSDGFANRNFMQLIHDDSLTFKEDIQKAQVSGQGDSLHEHIANLAGSPAIKKGILQTVKVVDELVKVMGRHKPENIVIEMARENQTTQKGQKNSRERMKRIEEGIKELGSQILKEHPVENTQLQNEKLYLYYLQNGRDMYVDQELDINRLSDYDVDHIVPQSFLKDDSIDNKVLTRSDKARGKSDNVPSEEVVKKMKNYWRQLLNAKLITQRKFDNLTKAERGGLSELDKAGFIKRQLVETRQITKHVAQILDSRMNTKYDENDKLIREVKVITLKSKLVSDFRKDFQFYKVREINNYHHAHDAYLNAVVGTALIKKYPKLESEFVYGDYKVYDVRKMIAKSEQEIGKATAKYFFYSNIMNFFKTEITLANGEIRKRPLIETNGETGEIVWDKGRDFATVRKVLSMPQVNIVKKTEVQTGGFSKESILPKRNSDKLIARKKDWDPKKYGGFDSPTVAYSVLVVAKVEKGKSKKLKSVKELLGITIMERSSFEKNPIDFLEAKGYKEVKKDLIIKLPKYSLFELENGRKRMLASAGELQKGNELALPSKYVNFLYLASHYEKLKGSPEDNEQKQLFVEQHKHYLDEIIEQISEFSKRVILADANLDKVLSAYNKHRDKPIREQAENIIHLFTLTNLGAPAAFKYFDTTIDRKRYTSTKEVLDATLIHQSITGLYETRIDLSQLGGDGGPAPEAAAKGGVLNLEEEYRLHEKPVPSSIDPSWLQLFPTVWAERAGMGLANQVPPVVVELRSGASPVAVRQYPMSKEAREGIRPHIQRFLDLGVLVPCQSPWNTPLLPVKKPGTNDYRPVQDLREINKRVQDIHPTVPNPYNLLSSLPPSHTWYSVLDLKDAFFCLKLHPNSQPLFAFEWRDPEKGNTGQLTWTRLPQGFKNSPTLFNEALHRDLAPFRALNPQVVLLQYVDDLLVAAPTYRDCKEGTQKLLQELSKLGYRVSAKKAQLCQKEVTYLGYLLKEGKRWLTPARKATVMKIPPPTTPRQVREFLGKAGFCRLFIPGFASLAAPLYPLTKPSIPFIWTEEHQKAFDRIKEALLSAPALALPDLTKPFTLYVDERAGVARGVLTQTLGPWRRPVAYLSKKLDPVASGWPTCLKAVAAVALLLKDADKLTLGQNVTVIASHSLESIVRQPPDRWMTNARMTHYQSLLLNERVSFAPPAVLNPATLLPVESEATPVHRCSEILAEETGTRRDLKDQPLPGVPAWYTDGSSFIAEGKRRAGAAIVDGKRTVWASSLPEGTSAQKAELVALTQALRLAEGKDINIYTDSRYAFATAHIHGAIYKQRGWLTSAGKDIKNKEEILALLEAIHLPKRVAIIHCPGHQKGNDPVATGNRRADEAAKQAALSTRVLAETTKPAGKRTADGSEFEKRTADGSEFESPKKKAKVE

SEQ ID NO: 948 - protein, 2094 aa, synthetic construct
MPAAKRVKLDGGDKKYSIGLDIGTNSVGWAVITDEYKVPSKKFKVLGNTDRHSIKKNLIGALLFDSGETAEATRLKRTARRRYTRRKNRICYLQEIFSNEMAKVDDSFFHRLEESFLVEEDKKHERHPIFGNIVDEVAYHEKYPTIYHLRKKLVDSTDKADLRLIYLALAHMIKFRGHFLIEGDLNPDNSDVDKLFIQLVQTYNQLFEENPINASGVDAKAILSARLSKSRRLENLIAQLPGEKKNGLFGNLIALSLGLTPNFKSNFDLAEDAKLQLSKDTYDDDLDNLLAQIGDQYADLFLAAKNLSDAILLSDILRVNTEITKAPLSASMIKRYDEHHQDLTLLKALVRQQLPEKYKEIFFDQSKNGYAGYIDGGASQEEFYKFIKPILEKMDGTEELLVKLNREDLLRKQRTFDNGSIPHQIHLGELHAILRRQEDFYPFLKDNREKIEKILTFRIPYYVGPLARGNSRFAWMTRKSEETITPWNFEEVVDKGASAQSFIERMTNFDKNLPNEKVLPKHSLLYEYFTVYNELTKVKYVTEGMRKPAFLSGEQKKAIVDLLFKTNRKVTVKQLKEDYFKKIECFDSVEISGVEDRFNASLGTYHDLLKIIKDKDFLDNEENEDILEDIVLTLTLFEDREMIEERLKTYAHLFDDKVMKQLKRRRYTGWGRLSRKLINGIRDKQSGKTILDFLKSDGFANRNFMQLIHDDSLTFKEDIQKAQVSGQGDSLHEHIANLAGSPAIKKGILQTVKVVDELVKVMGRHKPENIVIEMARENQTTQKGQKNSRERMKRIEEGIKELGSQILKEHPVENTQLQNEKLYLYYLQNGRDMYVDQELDINRLSDYDVDHIVPQSFLKDDSIDNKVLTRSDKARGKSDNVPSEEVVKKMKNYWRQLLNAKLITQRKFDNLTKAERGGLSELDKAGFIKRQLVETRQITKHVAQILDSRMNTKYDENDKLIREVKVITLKSKLVSDFRKDFQFYKVREINNYHHAHDAYLNAVVGTALIKKYPKLESEFVYGDYKVYDVRKMIAKSEQEIGKATAKYFFYSNIMNFFKTEITLANGEIRKRPLIETNGETGEIVWDKGRDFATVRKVLSMPQVNIVKKTEVQTGGFSKESILPKRNSDKLIARKKDWDPKKYGGFDSPTVAYSVLVVAKVEKGKSKKLKSVKELLGITIMERSSFEKNPIDFLEAKGYKEVKKDLIIKLPKYSLFELENGRKRMLASAGELQKGNELALPSKYVNFLYLASHYEKLKGSPEDNEQKQLFVEQHKHYLDEIIEQISEFSKRVILADANLDKVLSAYNKHRDKPIREQAENIIHLFTLTNLGAPAAFKYFDTTIDRKRYTSTKEVLDATLIHQSITGLYETRIDLSQLGGDGGEAAAKGSSGGSGGVLNLEEEYRLHEKPVPSSIDPSWLQLFPTVWAERAGMGLANQVPPVVVELRSGASPVAVRQYPMSKEAREGIRPHIQRFLDLGVLVPCQSPWNTPLLPVKKPGTNDYRPVQDLREINKRVQDIHPTVPNPYNLLSSLPPSHTWYSVLDLKDAFFCLKLHPNSQPLFAFEWRDPEKGNTGQLTWTRLPQGFKNSPTLFNEALHRDLAPFRALNPQVVLLQYVDDLLVAAPTYRDCKEGTQKLLQELSKLGYRVSAKKAQLCQKEVTYLGYLLKEGKRWLTPARKATVMKIPPPTTPRQVREFLGKAGFCRLFIPGFASLAAPLYPLTKPSIPFIWTEEHQKAFDRIKEALLSAPALALPDLTKPFTLYVDERAGVARGVLTQTLGPWRRPVAYLSKKLDPVASGWPTCLKAVAAVALLLKDADKLTLGQNVTVIASHSLESIVRQPPDRWMTNARMTHYQSLLLNERVSFAPPAVLNPATLLPVESEATPVHRCSEILAEETGTRRDLKDQPLPGVPAWYTDGSSFIAEGKRRAGAAIVDGKRTVWASSLPEGTSAQKAELVALTQALRLAEGKDINIYTDSRYAFATAHIHGAIYKQRGWLTSAGKDIKNKEEILALLEAIHLPKRVAIIHCPGHQKGNDPVATGNRRADEAAKQAALSTRVLAETTKPAGKRTADGSEFEKRTADGSEFESPKKKAKVE

SEQ ID NO: 949 - protein, 2090 aa, synthetic construct
MPAAKRVKLDGGDKKYSIGLDIGTNSVGWAVITDEYKVPSKKFKVLGNTDRHSIKKNLIGALLFDSGETAEATRLKRTARRRYTRRKNRICYLQEIFSNEMAKVDDSFFHRLEESFLVEEDKKHERHPIFGNIVDEVAYHEKYPTIYHLRKKLVDSTDKADLRLIYLALAHMIKFRGHFLIEGDLNPDNSDVDKLFIQLVQTYNQLFEENPINASGVDAKAILSARLSKSRRLENLIAQLPGEKKNGLFGNLIALSLGLTPNFKSNFDLAEDAKLQLSKDTYDDDLDNLLAQIGDQYADLFLAAKNLSDAILLSDILRVNTEITKAPLSASMIKRYDEHHQDLTLLKALVRQQLPEKYKEIFFDQSKNGYAGYIDGGASQEEFYKFIKPILEKMDGTEELLVKLNREDLLRKQRTFDNGSIPHQIHLGELHAILRRQEDFYPFLKDNREKIEKILTFRIPYYVGPLARGNSRFAWMTRKSEETITPWNFEEVVDKGASAQSFIERMTNFDKNLPNEKVLPKHSLLYEYFTVYNELTKVKYVTEGMRKPAFLSGEQKKAIVDLLFKTNRKVTVKQLKEDYFKKIECFDSVEISGVEDRFNASLGTYHDLLKIIKDKDFLDNEENEDILEDIVLTLTLFEDREMIEERLKTYAHLFDDKVMKQLKRRRYTGWGRLSRKLINGIRDKQSGKTILDFLKSDGFANRNFMQLIHDDSLTFKEDIQKAQVSGQGDSLHEHIANLAGSPAIKKGILQTVKVVDELVKVMGRHKPENIVIEMARENQTTQKGQKNSRERMKRIEEGIKELGSQILKEHPVENTQLQNEKLYLYYLQNGRDMYVDQELDINRLSDYDVDHIVPQSFLKDDSIDNKVLTRSDKARGKSDNVPSEEVVKKMKNYWRQLLNAKLITQRKFDNLTKAERGGLSELDKAGFIKRQLVETRQITKHVAQILDSRMNTKYDENDKLIREVKVITLKSKLVSDFRKDFQFYKVREINNYHHAHDAYLNAVVGTALIKKYPKLESEFVYGDYKVYDVRKMIAKSEQEIGKATAKYFFYSNIMNFFKTEITLANGEIRKRPLIETNGETGEIVWDKGRDFATVRKVLSMPQVNIVKKTEVQTGGFSKESILPKRNSDKLIARKKDWDPKKYGGFDSPTVAYSVLVVAKVEKGKSKKLKSVKELLGITIMERSSFEKNPIDFLEAKGYKEVKKDLIIKLPKYSLFELENGRKRMLASAGELQKGNELALPSKYVNFLYLASHYEKLKGSPEDNEQKQLFVEQHKHYLDEIIEQISEFSKRVILADANLDKVLSAYNKHRDKPIREQAENIIHLFTLTNLGAPAAFKYFDTTIDRKRYTSTKEVLDATLIHQSITGLYETRIDLSQLGGDGGPAPAPAPGGVLNLEEEYRLHEKPVPSSIDPSWLQLFPTVWAERAGMGLANQVPPVVVELRSGASPVAVRQYPMSKEAREGIRPHIQRFLDLGVLVPCQSPWNTPLLPVKKPGTNDYRPVQDLREINKRVQDIHPTVPNPYNLLSSLPPSHTWYSVLDLKDAFFCLKLHPNSQPLFAFEWRDPEKGNTGQLTWTRLPQGFKNSPTLFNEALHRDLAPFRALNPQVVLLQYVDDLLVAAPTYRDCKEGTQKLLQELSKLGYRVSAKKAQLCQKEVTYLGYLLKEGKRWLTPARKATVMKIPPPTTPRQVREFLGKAGFCRLFIPGFASLAAPLYPLTKPSIPFIWTEEHQKAFDRIKEALLSAPALALPDLTKPFTLYVDERAGVARGVLTQTLGPWRRPVAYLSKKLDPVASGWPTCLKAVAAVALLLKDADKLTLGQNVTVIASHSLESIVRQPPDRWMTNARMTHYQSLLLNERVSFAPPAVLNPATLLPVESEATPVHRCSEILAEETGTRRDLKDQPLPGVPAWYTDGSSFIAEGKRRAGAAIVDGKRTVWASSLPEGTSAQKAELVALTQALRLAEGKDINIYTDSRYAFATAHIHGAIYKQRGWLTSAGKDIKNKEEILALLEAIHLPKRVAIIHCPGHQKGNDPVATGNRRADEAAKQAALSTRVLAETTKPAGKRTADGSEFEKRTADGSEFESPKKKAKVE

SEQ ID NO: 950 - protein, 2089 aa, synthetic construct
MPAAKRVKLDGGDKKYSIGLDIGTNSVGWAVITDEYKVPSKKFKVLGNTDRHSIKKNLIGALLFDSGETAEATRLKRTARRRYTRRKNRICYLQEIFSNEMAKVDDSFFHRLEESFLVEEDKKHERHPIFGNIVDEVAYHEKYPTIYHLRKKLVDSTDKADLRLIYLALAHMIKFRGHFLIEGDLNPDNSDVDKLFIQLVQTYNQLFEENPINASGVDAKAILSARLSKSRRLENLIAQLPGEKKNGLFGNLIALSLGLTPNFKSNFDLAEDAKLQLSKDTYDDDLDNLLAQIGDQYADLFLAAKNLSDAILLSDILRVNTEITKAPLSASMIKRYDEHHQDLTLLKALVRQQLPEKYKEIFFDQSKNGYAGYIDGGASQEEFYKFIKPILEKMDGTEELLVKLNREDLLRKQRTFDNGSIPHQIHLGELHAILRRQEDFYPFLKDNREKIEKILTFRIPYYVGPLARGNSRFAWMTRKSEETITPWNFEEVVDKGASAQSFIERMTNFDKNLPNEKVLPKHSLLYEYFTVYNELTKVKYVTEGMRKPAFLSGEQKKAIVDLLFKTNRKVTVKQLKEDYFKKIECFDSVEISGVEDRFNASLGTYHDLLKIIKDKDFLDNEENEDILEDIVLTLTLFEDREMIEERLKTYAHLFDDKVMKQLKRRRYTGWGRLSRKLINGIRDKQSGKTILDFLKSDGFANRNFMQLIHDDSLTFKEDIQKAQVSGQGDSLHEHIANLAGSPAIKKGILQTVKVVDELVKVMGRHKPENIVIEMARENQTTQKGQKNSRERMKRIEEGIKELGSQILKEHPVENTQLQNEKLYLYYLQNGRDMYVDQELDINRLSDYDVDHIVPQSFLKDDSIDNKVLTRSDKARGKSDNVPSEEVVKKMKNYWRQLLNAKLITQRKFDNLTKAERGGLSELDKAGFIKRQLVETRQITKHVAQILDSRMNTKYDENDKLIREVKVITLKSKLVSDFRKDFQFYKVREINNYHHAHDAYLNAVVGTALIKKYPKLESEFVYGDYKVYDVRKMIAKSEQEIGKATAKYFFYSNIMNFFKTEITLANGEIRKRPLIETNGETGEIVWDKGRDFATVRKVLSMPQVNIVKKTEVQTGGFSKESILPKRNSDKLIARKKDWDPKKYGGFDSPTVAYSVLVVAKVEKGKSKKLKSVKELLGITIMERSSFEKNPIDFLEAKGYKEVKKDLIIKLPKYSLFELENGRKRMLASAGELQKGNELALPSKYVNFLYLASHYEKLKGSPEDNEQKQLFVEQHKHYLDEIIEQISEFSKRVILADANLDKVLSAYNKHRDKPIREQAENIIHLFTLTNLGAPAAFKYFDTTIDRKRYTSTKEVLDATLIHQSITGLYETRIDLSQLGGDGGGSSGGSGGVLNLEEEYRLHEKPVPSSIDPSWLQLFPTVWAERAGMGLANQVPPVVVELRSGASPVAVRQYPMSKEAREGIRPHIQRFLDLGVLVPCQSPWNTPLLPVKKPGTNDYRPVQDLREINKRVQDIHPTVPNPYNLLSSLPPSHTWYSVLDLKDAFFCLKLHPNSQPLFAFEWRDPEKGNTGQLTWTRLPQGFKNSPTLFNEALHRDLAPFRALNPQVVLLQYVDDLLVAAPTYRDCKEGTQKLLQELSKLGYRVSAKKAQLCQKEVTYLGYLLKEGKRWLTPARKATVMKIPPPTTPRQVREFLGKAGFCRLFIPGFASLAAPLYPLTKPSIPFIWTEEHQKAFDRIKEALLSAPALALPDLTKPFTLYVDERAGVARGVLTQTLGPWRRPVAYLSKKLDPVASGWPTCLKAVAAVALLLKDADKLTLGQNVTVIASHSLESIVRQPPDRWMTNARMTHYQSLLLNERVSFAPPAVLNPATLLPVESEATPVHRCSEILAEETGTRRDLKDQPLPGVPAWYTDGSSFIAEGKRRAGAAIVDGKRTVWASSLPEGTSAQKAELVALTQALRLAEGKDINIYTDSRYAFATAHIHGAIYKQRGWLTSAGKDIKNKEEILALLEAIHLPKRVAIIHCPGHQKGNDPVATGNRRADEAAKQAALSTRVLAETTKPAGKRTADGSEFEKRTADGSEFESPKKKAKVE

SEQ ID NO: 951 - protein, 2131 aa, synthetic construct
MPAAKRVKLDGGDKKYSIGLDIGTNSVGWAVITDEYKVPSKKFKVLGNTDRHSIKKNLIGALLFDSGETAEATRLKRTARRRYTRRKNRICYLQEIFSNEMAKVDDSFFHRLEESFLVEEDKKHERHPIFGNIVDEVAYHEKYPTIYHLRKKLVDSTDKADLRLIYLALAHMIKFRGHFLIEGDLNPDNSDVDKLFIQLVQTYNQLFEENPINASGVDAKAILSARLSKSRRLENLIAQLPGEKKNGLFGNLIALSLGLTPNFKSNFDLAEDAKLQLSKDTYDDDLDNLLAQIGDQYADLFLAAKNLSDAILLSDILRVNTEITKAPLSASMIKRYDEHHQDLTLLKALVRQQLPEKYKEIFFDQSKNGYAGYIDGGASQEEFYKFIKPILEKMDGTEELLVKLNREDLLRKQRTFDNGSIPHQIHLGELHAILRRQEDFYPFLKDNREKIEKILTFRIPYYVGPLARGNSRFAWMTRKSEETITPWNFEEVVDKGASAQSFIERMTNFDKNLPNEKVLPKHSLLYEYFTVYNELTKVKYVTEGMRKPAFLSGEQKKAIVDLLFKTNRKVTVKQLKEDYFKKIECFDSVEISGVEDRFNASLGTYHDLLKIIKDKDFLDNEENEDILEDIVLTLTLFEDREMIEERLKTYAHLFDDKVMKQLKRRRYTGWGRLSRKLINGIRDKQSGKTILDFLKSDGFANRNFMQLIHDDSLTFKEDIQKAQVSGQGDSLHEHIANLAGSPAIKKGILQTVKVVDELVKVMGRHKPENIVIEMARENQTTQKGQKNSRERMKRIEEGIKELGSQILKEHPVENTQLQNEKLYLYYLQNGRDMYVDQELDINRLSDYDVDHIVPQSFLKDDSIDNKVLTRSDKARGKSDNVPSEEVVKKMKNYWRQLLNAKLITQRKFDNLTKAERGGLSELDKAGFIKRQLVETRQITKHVAQILDSRMNTKYDENDKLIREVKVITLKSKLVSDFRKDFQFYKVREINNYHHAHDAYLNAVVGTALIKKYPKLESEFVYGDYKVYDVRKMIAKSEQEIGKATAKYFFYSNIMNFFKTEITLANGEIRKRPLIETNGETGEIVWDKGRDFATVRKVLSMPQVNIVKKTEVQTGGFSKESILPKRNSDKLIARKKDWDPKKYGGFDSPTVAYSVLVVAKVEKGKSKKLKSVKELLGITIMERSSFEKNPIDFLEAKGYKEVKKDLIIKLPKYSLFELENGRKRMLASAGELQKGNELALPSKYVNFLYLASHYEKLKGSPEDNEQKQLFVEQHKHYLDEIIEQISEFSKRVILADANLDKVLSAYNKHRDKPIREQAENIIHLFTLTNLGAPAAFKYFDTTIDRKRYTSTKEVLDATLIHQSITGLYETRIDLSQLGGDGGAEAAAKEAAAKEAAAKEAAAKALEAEAAAKEAAAKEAAAKEAAAKAGGTLNIEDEYRLHETSKEPDVPLGSTWLSDFPQAWAETGGMGLAVRQAPLIIPLKATSTPVSIKQYPMSQEARLGIKPHIQRLLDQGILVPCQSPWNTPLLPVKKPGTNDYRPVQDLREVNKRVEDIHPTVPNPYNLLSGLPPSHQWYTVLDLKDAFFCLRLHPTSQPLFAFEWRDPEMGISGQLTWTRLPQGFKNSPTLFDEALHRDLADFRIQHPDLILLQYVDDLLLAATSEQDCQRGTRALLQTLGNLGYRASAKKAQICQKQVKYLGYLLKEGQRWLTEARKETVMGQPTPKTPRQLREFLGTAGFCRLWIPGFAEMAAPLYPLTKTGTLFNWGPDQQKAYQEIKQALLTAPALGLPDLTKPFELFVDEKQGYAKGVLTQKLGPWRRPVAYLSKKLDPVAAGWPPCLRMVAAIAVLTKDAGKLTMGQPLVILAPHAVEALVKQPPDRWLSNARMTHYQAMLLDTDRVQFGPVVALNPATLLPLPEKEAPHDCLEILAETHGTRPDLTDQPIPDADYTWYTDGSSFLQEGQRRAGAAVTTETEVIWARALPAGTSAQRAELIALTQALKMAEGKKLNVYTDSRYAFATAHVHGEIYRRRGLLTSEGREIKNKNEILALLKALFLPKRLSIIHCPGHQKGNSAEARGNRMADQAAREAAMKAVLETSTLLAGKRTADGSEFEKRTADGSEFESPKKKAKVE

SEQ ID NO: 952 - protein, 2118 aa, synthetic construct
MPAAKRVKLDGGDKKYSIGLDIGTNSVGWAVITDEYKVPSKKFKVLGNTDRHSIKKNLIGALLFDSGETAEATRLKRTARRRYTRRKNRICYLQEIFSNEMAKVDDSFFHRLEESFLVEEDKKHERHPIFGNIVDEVAYHEKYPTIYHLRKKLVDSTDKADLRLIYLALAHMIKFRGHFLIEGDLNPDNSDVDKLFIQLVQTYNQLFEENPINASGVDAKAILSARLSKSRRLENLIAQLPGEKKNGLFGNLIALSLGLTPNFKSNFDLAEDAKLQLSKDTYDDDLDNLLAQIGDQYADLFLAAKNLSDAILLSDILRVNTEITKAPLSASMIKRYDEHHQDLTLLKALVRQQLPEKYKEIFFDQSKNGYAGYIDGGASQEEFYKFIKPILEKMDGTEELLVKLNREDLLRKQRTFDNGSIPHQIHLGELHAILRRQEDFYPFLKDNREKIEKILTFRIPYYVGPLARGNSRFAWMTRKSEETITPWNFEEVVDKGASAQSFIERMTNFDKNLPNEKVLPKHSLLYEYFTVYNELTKVKYVTEGMRKPAFLSGEQKKAIVDLLFKTNRKVTVKQLKEDYFKKIECFDSVEISGVEDRFNASLGTYHDLLKIIKDKDFLDNEENEDILEDIVLTLTLFEDREMIEERLKTYAHLFDDKVMKQLKRRRYTGWGRLSRKLINGIRDKQSGKTILDFLKSDGFANRNFMQLIHDDSLTFKEDIQKAQVSGQGDSLHEHIANLAGSPAIKKGILQTVKVVDELVKVMGRHKPENIVIEMARENQTTQKGQKNSRERMKRIEEGIKELGSQILKEHPVENTQLQNEKLYLYYLQNGRDMYVDQELDINRLSDYDVDHIVPQSFLKDDSIDNKVLTRSDKARGKSDNVPSEEVVKKMKNYWRQLLNAKLITQRKFDNLTKAERGGLSELDKAGFIKRQLVETRQITKHVAQILDSRMNTKYDENDKLIREVKVITLKSKLVSDFRKDFQFYKVREINNYHHAHDAYLNAVVGTALIKKYPKLESEFVYGDYKVYDVRKMIAKSEQEIGKATAKYFFYSNIMNFFKTEITLANGEIRKRPLIETNGETGEIVWDKGRDFATVRKVLSMPQVNIVKKTEVQTGGFSKESILPKRNSDKLIARKKDWDPKKYGGFDSPTVAYSVLVVAKVEKGKSKKLKSVKELLGITIMERSSFEKNPIDFLEAKGYKEVKKDLIIKLPKYSLFELENGRKRMLASAGELQKGNELALPSKYVNFLYLASHYEKLKGSPEDNEQKQLFVEQHKHYLDEIIEQISEFSKRVILADANLDKVLSAYNKHRDKPIREQAENIIHLFTLTNLGAPAAFKYFDTTIDRKRYTSTKEVLDATLIHQSITGLYETRIDLSQLGGDGGSGGSSGGSSGSETPGTSESATPESSGGSSGGSSGGTLNIEDEYRLHETSKEPDVPLGSTWLSDFPQAWAETGGMGLAVRQAPLIIPLKATSTPVSIKQYPMSQEARLGIKPHIQRLLDQGILVPCQSPWNTPLLPVKKPGTNDYRPVQDLREVNKRVEDIHPTVPNPYNLLSGLPPSHQWYTVLDLKDAFFCLRLHPTSQPLFAFEWRDPEMGISGQLTWTRLPQGFKNSPTLFDEALHRDLADFRIQHPDLILLQYVDDLLLAATSEQDCQRGTRALLQTLGNLGYRASAKKAQICQKQVKYLGYLLKEGQRWLTEARKETVMGQPTPKTPRQLREFLGTAGFCRLWIPGFAEMAAPLYPLTKTGTLFNWGPDQQKAYQEIKQALLTAPALGLPDLTKPFELFVDEKQGYAKGVLTQKLGPWRRPVAYLSKKLDPVAAGWPPCLRMVAAIAVLTKDAGKLTMGQPLVILAPHAVEALVKQPPDRWLSNARMTHYQAMLLDTDRVQFGPVVALNPATLLPLPEKEAPHDCLEILAETHGTRPDLTDQPIPDADYTWYTDGSSFLQEGQRRAGAAVTTETEVIWARALPAGTSAQRAELIALTQALKMAEGKKLNVYTDSRYAFATAHVHGEIYRRRGLLTSEGREIKNKNEILALLKALFLPKRLSIIHCPGHQKGNSAEARGNRMADQAAREAAMKAVLETSTLLAGKRTADGSEFEKRTADGSEFESPKKKAKVE

SEQ ID NO: 953 - protein, 2105 aa, synthetic construct
MPAAKRVKLDGGDKKYSIGLDIGTNSVGWAVITDEYKVPSKKFKVLGNTDRHSIKKNLIGALLFDSGETAEATRLKRTARRRYTRRKNRICYLQEIFSNEMAKVDDSFFHRLEESFLVEEDKKHERHPIFGNIVDEVAYHEKYPTIYHLRKKLVDSTDKADLRLIYLALAHMIKFRGHFLIEGDLNPDNSDVDKLFIQLVQTYNQLFEENPINASGVDAKAILSARLSKSRRLENLIAQLPGEKKNGLFGNLIALSLGLTPNFKSNFDLAEDAKLQLSKDTYDDDLDNLLAQIGDQYADLFLAAKNLSDAILLSDILRVNTEITKAPLSASMIKRYDEHHQDLTLLKALVRQQLPEKYKEIFFDQSKNGYAGYIDGGASQEEFYKFIKPILEKMDGTEELLVKLNREDLLRKQRTFDNGSIPHQIHLGELHAILRRQEDFYPFLKDNREKIEKILTFRIPYYVGPLARGNSRFAWMTRKSEETITPWNFEEVVDKGASAQSFIERMTNFDKNLPNEKVLPKHSLLYEYFTVYNELTKVKYVTEGMRKPAFLSGEQKKAIVDLLFKTNRKVTVKQLKEDYFKKIECFDSVEISGVEDRFNASLGTYHDLLKIIKDKDFLDNEENEDILEDIVLTLTLFEDREMIEERLKTYAHLFDDKVMKQLKRRRYTGWGRLSRKLINGIRDKQSGKTILDFLKSDGFANRNFMQLIHDDSLTFKEDIQKAQVSGQGDSLHEHIANLAGSPAIKKGILQTVKVVDELVKVMGRHKPENIVIEMARENQTTQKGQKNSRERMKRIEEGIKELGSQILKEHPVENTQLQNEKLYLYYLQNGRDMYVDQELDINRLSDYDVDHIVPQSFLKDDSIDNKVLTRSDKARGKSDNVPSEEVVKKMKNYWRQLLNAKLITQRKFDNLTKAERGGLSELDKAGFIKRQLVETRQITKHVAQILDSRMNTKYDENDKLIREVKVITLKSKLVSDFRKDFQFYKVREINNYHHAHDAYLNAVVGTALIKKYPKLESEFVYGDYKVYDVRKMIAKSEQEIGKATAKYFFYSNIMNFFKTEITLANGEIRKRPLIETNGETGEIVWDKGRDFATVRKVLSMPQVNIVKKTEVQTGGFSKESILPKRNSDKLIARKKDWDPKKYGGFDSPTVAYSVLVVAKVEKGKSKKLKSVKELLGITIMERSSFEKNPIDFLEAKGYKEVKKDLIIKLPKYSLFELENGRKRMLASAGELQKGNELALPSKYVNFLYLASHYEKLKGSPEDNEQKQLFVEQHKHYLDEIIEQISEFSKRVILADANLDKVLSAYNKHRDKPIREQAENIIHLFTLTNLGAPAAFKYFDTTIDRKRYTSTKEVLDATLIHQSITGLYETRIDLSQLGGDGGGGGGSGGGGSGGGGSGGGGSGGTLNIEDEYRLHETSKEPDVPLGSTWLSDFPQAWAETGGMGLAVRQAPLIIPLKATSTPVSIKQYPMSQEARLGIKPHIQRLLDQGILVPCQSPWNTPLLPVKKPGTNDYRPVQDLREVNKRVEDIHPTVPNPYNLLSGLPPSHQWYTVLDLKDAFFCLRLHPTSQPLFAFEWRDPEMGISGQLTWTRLPQGFKNSPTLFDEALHRDLADFRIQHPDLILLQYVDDLLLAATSEQDCQRGTRALLQTLGNLGYRASAKKAQICQKQVKYLGYLLKEGQRWLTEARKETVMGQPTPKTPRQLREFLGTAGFCRLWIPGFAEMAAPLYPLTKTGTLFNWGPDQQKAYQEIKQALLTAPALGLPDLTKPFELFVDEKQGYAKGVLTQKLGPWRRPVAYLSKKLDPVAAGWPPCLRMVAAIAVLTKDAGKLTMGQPLVILAPHAVEALVKQPPDRWLSNARMTHYQAMLLDTDRVQFGPVVALNPATLLPLPEKEAPHDCLEILAETHGTRPDLTDQPIPDADYTWYTDGSSFLQEGQRRAGAAVTTETEVIWARALPAGTSAQRAELIALTQALKMAEGKKLNVYTDSRYAFATAHVHGEIYRRRGLLTSEGREIKNKNEILALLKALFLPKRLSIIHCPGHQKGNSAEARGNRMADQAAREAAMKAVLETSTLLAGKRTADGSEFEKRTADGSEFESPKKKAKVE

SEQ ID NO: 954 - protein, 2093 aa, synthetic construct
MPAAKRVKLDGGDKKYSIGLDIGTNSVGWAVITDEYKVPSKKFKVLGNTDRHSIKKNLIGALLFDSGETAEATRLKRTARRRYTRRKNRICYLQEIFSNEMAKVDDSFFHRLEESFLVEEDKKHERHPIFGNIVDEVAYHEKYPTIYHLRKKLVDSTDKADLRLIYLALAHMIKFRGHFLIEGDLNPDNSDVDKLFIQLVQTYNQLFEENPINASGVDAKAILSARLSKSRRLENLIAQLPGEKKNGLFGNLIALSLGLTPNFKSNFDLAEDAKLQLSKDTYDDDLDNLLAQIGDQYADLFLAAKNLSDAILLSDILRVNTEITKAPLSASMIKRYDEHHQDLTLLKALVRQQLPEKYKEIFFDQSKNGYAGYIDGGASQEEFYKFIKPILEKMDGTEELLVKLNREDLLRKQRTFDNGSIPHQIHLGELHAILRRQEDFYPFLKDNREKIEKILTFRIPYYVGPLARGNSRFAWMTRKSEETITPWNFEEVVDKGASAQSFIERMTNFDKNLPNEKVLPKHSLLYEYFTVYNELTKVKYVTEGMRKPAFLSGEQKKAIVDLLFKTNRKVTVKQLKEDYFKKIECFDSVEISGVEDRFNASLGTYHDLLKIIKDKDFLDNEENEDILEDIVLTLTLFEDREMIEERLKTYAHLFDDKVMKQLKRRRYTGWGRLSRKLINGIRDKQSGKTILDFLKSDGFANRNFMQLIHDDSLTFKEDIQKAQVSGQGDSLHEHIANLAGSPAIKKGILQTVKVVDELVKVMGRHKPENIVIEMARENQTTQKGQKNSRERMKRIEEGIKELGSQILKEHPVENTQLQNEKLYLYYLQNGRDMYVDQELDINRLSDYDVDHIVPQSFLKDDSIDNKVLTRSDKARGKSDNVPSEEVVKKMKNYWRQLLNAKLITQRKFDNLTKAERGGLSELDKAGFIKRQLVETRQITKHVAQILDSRMNTKYDENDKLIREVKVITLKSKLVSDFRKDFQFYKVREINNYHHAHDAYLNAVVGTALIKKYPKLESEFVYGDYKVYDVRKMIAKSEQEIGKATAKYFFYSNIMNFFKTEITLANGEIRKRPLIETNGETGEIVWDKGRDFATVRKVLSMPQVNIVKKTEVQTGGFSKESILPKRNSDKLIARKKDWDPKKYGGFDSPTVAYSVLVVAKVEKGKSKKLKSVKELLGITIMERSSFEKNPIDFLEAKGYKEVKKDLIIKLPKYSLFELENGRKRMLASAGELQKGNELALPSKYVNFLYLASHYEKLKGSPEDNEQKQLFVEQHKHYLDEIIEQISEFSKRVILADANLDKVLSAYNKHRDKPIREQAENIIHLFTLTNLGAPAAFKYFDTTIDRKRYTSTKEVLDATLIHQSITGLYETRIDLSQLGGDGGGSSEAAAKGGTLNIEDEYRLHETSKEPDVPLGSTWLSDFPQAWAETGGMGLAVRQAPLIIPLKATSTPVSIKQYPMSQEARLGIKPHIQRLLDQGILVPCQSPWNTPLLPVKKPGTNDYRPVQDLREVNKRVEDIHPTVPNPYNLLSGLPPSHQWYTVLDLKDAFFCLRLHPTSQPLFAFEWRDPEMGISGQLTWTRLPQGFKNSPTLFDEALHRDLADFRIQHPDLILLQYVDDLLLAATSEQDCQRGTRALLQTLGNLGYRASAKKAQICQKQVKYLGYLLKEGQRWLTEARKETVMGQPTPKTPRQLREFLGTAGFCRLWIPGFAEMAAPLYPLTKTGTLFNWGPDQQKAYQEIKQALLTAPALGLPDLTKPFELFVDEKQGYAKGVLTQKLGPWRRPVAYLSKKLDPVAAGWPPCLRMVAAIAVLTKDAGKLTMGQPLVILAPHAVEALVKQPPDRWLSNARMTHYQAMLLDTDRVQFGPVVALNPATLLPLPEKEAPHDCLEILAETHGTRPDLTDQPIPDADYTWYTDGSSFLQEGQRRAGAAVTTETEVIWARALPAGTSAQRAELIALTQALKMAEGKKLNVYTDSRYAFATAHVHGEIYRRRGLLTSEGREIKNKNEILALLKALFLPKRLSIIHCPGHQKGNSAEARGNRMADQAAREAAMKAVLETSTLLAGKRTADGSEFEKRTADGSEFESPKKKAKVE

SEQ ID NO: 955 - protein, 2096 aa, synthetic construct
MPAAKRVKLDGGDKKYSIGLDIGTNSVGWAVITDEYKVPSKKFKVLGNTDRHSIKKNLIGALLFDSGETAEATRLKRTARRRYTRRKNRICYLQEIFSNEMAKVDDSFFHRLEESFLVEEDKKHERHPIFGNIVDEVAYHEKYPTIYHLRKKLVDSTDKADLRLIYLALAHMIKFRGHFLIEGDLNPDNSDVDKLFIQLVQTYNQLFEENPINASGVDAKAILSARLSKSRRLENLIAQLPGEKKNGLFGNLIALSLGLTPNFKSNFDLAEDAKLQLSKDTYDDDLDNLLAQIGDQYADLFLAAKNLSDAILLSDILRVNTEITKAPLSASMIKRYDEHHQDLTLLKALVRQQLPEKYKEIFFDQSKNGYAGYIDGGASQEEFYKFIKPILEKMDGTEELLVKLNREDLLRKQRTFDNGSIPHQIHLGELHAILRRQEDFYPFLKDNREKIEKILTFRIPYYVGPLARGNSRFAWMTRKSEETITPWNFEEVVDKGASAQSFIERMTNFDKNLPNEKVLPKHSLLYEYFTVYNELTKVKYVTEGMRKPAFLSGEQKKAIVDLLFKTNRKVTVKQLKEDYFKKIECFDSVEISGVEDRFNASLGTYHDLLKIIKDKDFLDNEENEDILEDIVLTLTLFEDREMIEERLKTYAHLFDDKVMKQLKRRRYTGWGRLSRKLINGIRDKQSGKTILDFLKSDGFANRNFMQLIHDDSLTFKEDIQKAQVSGQGDSLHEHIANLAGSPAIKKGILQTVKVVDELVKVMGRHKPENIVIEMARENQTTQKGQKNSRERMKRIEEGIKELGSQILKEHPVENTQLQNEKLYLYYLQNGRDMYVDQELDINRLSDYDVDHIVPQSFLKDDSIDNKVLTRSDKARGKSDNVPSEEVVKKMKNYWRQLLNAKLITQRKFDNLTKAERGGLSELDKAGFIKRQLVETRQITKHVAQILDSRMNTKYDENDKLIREVKVITLKSKLVSDFRKDFQFYKVREINNYHHAHDAYLNAVVGTALIKKYPKLESEFVYGDYKVYDVRKMIAKSEQEIGKATAKYFFYSNIMNFFKTEITLANGEIRKRPLIETNGETGEIVWDKGRDFATVRKVLSMPQVNIVKKTEVQTGGFSKESILPKRNSDKLIARKKDWDPKKYGGFDSPTVAYSVLVVAKVEKGKSKKLKSVKELLGITIMERSSFEKNPIDFLEAKGYKEVKKDLIIKLPKYSLFELENGRKRMLASAGELQKGNELALPSKYVNFLYLASHYEKLKGSPEDNEQKQLFVEQHKHYLDEIIEQISEFSKRVILADANLDKVLSAYNKHRDKPIREQAENIIHLFTLTNLGAPAAFKYFDTTIDRKRYTSTKEVLDATLIHQSITGLYETRIDLSQLGGDGGEAAAKGGGGSSGGTLNIEDEYRLHETSKEPDVPLGSTWLSDFPQAWAETGGMGLAVRQAPLIIPLKATSTPVSIKQYPMSQEARLGIKPHIQRLLDQGILVPCQSPWNTPLLPVKKPGTNDYRPVQDLREVNKRVEDIHPTVPNPYNLLSGLPPSHQWYTVLDLKDAFFCLRLHPTSQPLFAFEWRDPEMGISGQLTWTRLPQGFKNSPTLFDEALHRDLADFRIQHPDLILLQYVDDLLLAATSEQDCQRGTRALLQTLGNLGYRASAKKAQICQKQVKYLGYLLKEGQRWLTEARKETVMGQPTPKTPRQLREFLGTAGFCRLWIPGFAEMAAPLYPLTKTGTLFNWGPDQQKAYQEIKQALLTAPALGLPDLTKPFELFVDEKQGYAKGVLTQKLGPWRRPVAYLSKKLDPVAAGWPPCLRMVAAIAVLTKDAGKLTMGQPLVILAPHAVEALVKQPPDRWLSNARMTHYQAMLLDTDRVQFGPVVALNPATLLPLPEKEAPHDCLEILAETHGTRPDLTDQPIPDADYTWYTDGSSFLQEGQRRAGAAVTTETEVIWARALPAGTSAQRAELIALTQALKMAEGKKLNVYTDSRYAFATAHVHGEIYRRRGLLTSEGREIKNKNEILALLKALFLPKRLSIIHCPGHQKGNSAEARGNRMADQAAREAAMKAVLETSTLLAGKRTADGSEFEKRTADGSEFESPKKKAKVE

SEQ ID NO: 956 - protein, 2092 aa, synthetic construct
MPAAKRVKLDGGDKKYSIGLDIGTNSVGWAVITDEYKVPSKKFKVLGNTDRHSIKKNLIGALLFDSGETAEATRLKRTARRRYTRRKNRICYLQEIFSNEMAKVDDSFFHRLEESFLVEEDKKHERHPIFGNIVDEVAYHEKYPTIYHLRKKLVDSTDKADLRLIYLALAHMIKFRGHFLIEGDLNPDNSDVDKLFIQLVQTYNQLFEENPINASGVDAKAILSARLSKSRRLENLIAQLPGEKKNGLFGNLIALSLGLTPNFKSNFDLAEDAKLQLSKDTYDDDLDNLLAQIGDQYADLFLAAKNLSDAILLSDILRVNTEITKAPLSASMIKRYDEHHQDLTLLKALVRQQLPEKYKEIFFDQSKNGYAGYIDGGASQEEFYKFIKPILEKMDGTEELLVKLNREDLLRKQRTFDNGSIPHQIHLGELHAILRRQEDFYPFLKDNREKIEKILTFRIPYYVGPLARGNSRFAWMTRKSEETITPWNFEEVVDKGASAQSFIERMTNFDKNLPNEKVLPKHSLLYEYFTVYNELTKVKYVTEGMRKPAFLSGEQKKAIVDLLFKTNRKVTVKQLKEDYFKKIECFDSVEISGVEDRFNASLGTYHDLLKIIKDKDFLDNEENEDILEDIVLTLTLFEDREMIEERLKTYAHLFDDKVMKQLKRRRYTGWGRLSRKLINGIRDKQSGKTILDFLKSDGFANRNFMQLIHDDSLTFKEDIQKAQVSGQGDSLHEHIANLAGSPAIKKGILQTVKVVDELVKVMGRHKPENIVIEMARENQTTQKGQKNSRERMKRIEEGIKELGSQILKEHPVENTQLQNEKLYLYYLQNGRDMYVDQELDINRLSDYDVDHIVPQSFLKDDSIDNKVLTRSDKARGKSDNVPSEEVVKKMKNYWRQLLNAKLITQRKFDNLTKAERGGLSELDKAGFIKRQLVETRQITKHVAQILDSRMNTKYDENDKLIREVKVITLKSKLVSDFRKDFQFYKVREINNYHHAHDAYLNAVVGTALIKKYPKLESEFVYGDYKVYDVRKMIAKSEQEIGKATAKYFFYSNIMNFFKTEITLANGEIRKRPLIETNGETGEIVWDKGRDFATVRKVLSMPQVNIVKKTEVQTGGFSKESILPKRNSDKLIARKKDWDPKKYGGFDSPTVAYSVLVVAKVEKGKSKKLKSVKELLGITIMERSSFEKNPIDFLEAKGYKEVKKDLIIKLPKYSLFELENGRKRMLASAGELQKGNELALPSKYVNFLYLASHYEKLKGSPEDNEQKQLFVEQHKHYLDEIIEQISEFSKRVILADANLDKVLSAYNKHRDKPIREQAENIIHLFTLTNLGAPAAFKYFDTTIDRKRYTSTKEVLDATLIHQSITGLYETRIDLSQLGGDGGGGGGGGGGGTLNIEDEYRLHETSKEPDVPLGSTWLSDFPQAWAETGGMGLAVRQAPLIIPLKATSTPVSIKQYPMSQEARLGIKPHIQRLLDQGILVPCQSPWNTPLLPVKKPGTNDYRPVQDLREVNKRVEDIHPTVPNPYNLLSGLPPSHQWYTVLDLKDAFFCLRLHPTSQPLFAFEWRDPEMGISGQLTWTRLPQGFKNSPTLFDEALHRDLADFRIQHPDLILLQYVDDLLLAATSEQDCQRGTRALLQTLGNLGYRASAKKAQICQKQVKYLGYLLKEGQRWLTEARKETVMGQPTPKTPRQLREFLGTAGFCRLWIPGFAEMAAPLYPLTKTGTLFNWGPDQQKAYQEIKQALLTAPALGLPDLTKPFELFVDEKQGYAKGVLTQKLGPWRRPVAYLSKKLDPVAAGWPPCLRMVAAIAVLTKDAGKLTMGQPLVILAPHAVEALVKQPPDRWLSNARMTHYQAMLLDTDRVQFGPVVALNPATLLPLPEKEAPHDCLEILAETHGTRPDLTDQPIPDADYTWYTDGSSFLQEGQRRAGAAVTTETEVIWARALPAGTSAQRAELIALTQALKMAEGKKLNVYTDSRYAFATAHVHGEIYRRRGLLTSEGREIKNKNEILALLKALFLPKRLSIIHCPGHQKGNSAEARGNRMADQAAREAAMKAVLETSTLLAGKRTADGSEFEKRTADGSEFESPKKKAKVE

SEQ ID NO: 957 - protein, 2094 aa, synthetic construct
MPAAKRVKLDGGDKKYSIGLDIGTNSVGWAVITDEYKVPSKKFKVLGNTDRHSIKKNLIGALLFDSGETAEATRLKRTARRRYTRRKNRICYLQEIFSNEMAKVDDSFFHRLEESFLVEEDKKHERHPIFGNIVDEVAYHEKYPTIYHLRKKLVDSTDKADLRLIYLALAHMIKFRGHFLIEGDLNPDNSDVDKLFIQLVQTYNQLFEENPINASGVDAKAILSARLSKSRRLENLIAQLPGEKKNGLFGNLIALSLGLTPNFKSNFDLAEDAKLQLSKDTYDDDLDNLLAQIGDQYADLFLAAKNLSDAILLSDILRVNTEITKAPLSASMIKRYDEHHQDLTLLKALVRQQLPEKYKEIFFDQSKNGYAGYIDGGASQEEFYKFIKPILEKMDGTEELLVKLNREDLLRKQRTFDNGSIPHQIHLGELHAILRRQEDFYPFLKDNREKIEKILTFRIPYYVGPLARGNSRFAWMTRKSEETITPWNFEEVVDKGASAQSFIERMTNFDKNLPNEKVLPKHSLLYEYFTVYNELTKVKYVTEGMRKPAFLSGEQKKAIVDLLFKTNRKVTVKQLKEDYFKKIECFDSVEISGVEDRFNASLGTYHDLLKIIKDKDFLDNEENEDILEDIVLTLTLFEDREMIEERLKTYAHLFDDKVMKQLKRRRYTGWGRLSRKLINGIRDKQSGKTILDFLKSDGFANRNFMQLIHDDSLTFKEDIQKAQVSGQGDSLHEHIANLAGSPAIKKGILQTVKVVDELVKVMGRHKPENIVIEMARENQTTQKGQKNSRERMKRIEEGIKELGSQILKEHPVENTQLQNEKLYLYYLQNGRDMYVDQELDINRLSDYDVDHIVPQSFLKDDSIDNKVLTRSDKARGKSDNVPSEEVVKKMKNYWRQLLNAKLITQRKFDNLTKAERGGLSELDKAGFIKRQLVETRQITKHVAQILDSRMNTKYDENDKLIREVKVITLKSKLVSDFRKDFQFYKVREINNYHHAHDAYLNAVVGTALIKKYPKLESEFVYGDYKVYDVRKMIAKSEQEIGKATAKYFFYSNIMNFFKTEITLANGEIRKRPLIETNGETGEIVWDKGRDFATVRKVLSMPQVNIVKKTEVQTGGFSKESILPKRNSDKLIARKKDWDPKKYGGFDSPTVAYSVLVVAKVEKGKSKKLKSVKELLGITIMERSSFEKNPIDFLEAKGYKEVKKDLIIKLPKYSLFELENGRKRMLASAGELQKGNELALPSKYVNFLYLASHYEKLKGSPEDNEQKQLFVEQHKHYLDEIIEQISEFSKRVILADANLDKVLSAYNKHRDKPIREQAENIIHLFTLTNLGAPAAFKYFDTTIDRKRYTSTKEVLDATLIHQSITGLYETRIDLSQLGGDGGGSSGGSGGGGGTLNIEDEYRLHETSKEPDVPLGSTWLSDFPQAWAETGGMGLAVRQAPLIIPLKATSTPVSIKQYPMSQEARLGIKPHIQRLLDQGILVPCQSPWNTPLLPVKKPGTNDYRPVQDLREVNKRVEDIHPTVPNPYNLLSGLPPSHQWYTVLDLKDAFFCLRLHPTSQPLFAFEWRDPEMGISGQLTWTRLPQGFKNSPTLFDEALHRDLADFRIQHPDLILLQYVDDLLLAATSEQDCQRGTRALLQTLGNLGYRASAKKAQICQKQVKYLGYLLKEGQRWLTEARKETVMGQPTPKTPRQLREFLGTAGFCRLWIPGFAEMAAPLYPLTKTGTLFNWGPDQQKAYQEIKQALLTAPALGLPDLTKPFELFVDEKQGYAKGVLTQKLGPWRRPVAYLSKKLDPVAAGWPPCLRMVAAIAVLTKDAGKLTMGQPLVILAPHAVEALVKQPPDRWLSNARMTHYQAMLLDTDRVQFGPVVALNPATLLPLPEKEAPHDCLEILAETHGTRPDLTDQPIPDADYTWYTDGSSFLQEGQRRAGAAVTTETEVIWARALPAGTSAQRAELIALTQALKMAEGKKLNVYTDSRYAFATAHVHGEIYRRRGLLTSEGREIKNKNEILALLKALFLPKRLSIIHCPGHQKGNSAEARGNRMADQAAREAAMKAVLETSTLLAGKRTADGSEFEKRTADGSEFESPKKKAKVE

SEQ ID NO: 958 - protein, 2103 aa, synthetic construct
MPAAKRVKLDGGDKKYSIGLDIGTNSVGWAVITDEYKVPSKKFKVLGNTDRHSIKKNLIGALLFDSGETAEATRLKRTARRRYTRRKNRICYLQEIFSNEMAKVDDSFFHRLEESFLVEEDKKHERHPIFGNIVDEVAYHEKYPTIYHLRKKLVDSTDKADLRLIYLALAHMIKFRGHFLIEGDLNPDNSDVDKLFIQLVQTYNQLFEENPINASGVDAKAILSARLSKSRRLENLIAQLPGEKKNGLFGNLIALSLGLTPNFKSNFDLAEDAKLQLSKDTYDDDLDNLLAQIGDQYADLFLAAKNLSDAILLSDILRVNTEITKAPLSASMIKRYDEHHQDLTLLKALVRQQLPEKYKEIFFDQSKNGYAGYIDGGASQEEFYKFIKPILEKMDGTEELLVKLNREDLLRKQRTFDNGSIPHQIHLGELHAILRRQEDFYPFLKDNREKIEKILTFRIPYYVGPLARGNSRFAWMTRKSEETITPWNFEEVVDKGASAQSFIERMTNFDKNLPNEKVLPKHSLLYEYFTVYNELTKVKYVTEGMRKPAFLSGEQKKAIVDLLFKTNRKVTVKQLKEDYFKKIECFDSVEISGVEDRFNASLGTYHDLLKIIKDKDFLDNEENEDILEDIVLTLTLFEDREMIEERLKTYAHLFDDKVMKQLKRRRYTGWGRLSRKLINGIRDKQSGKTILDFLKSDGFANRNFMQLIHDDSLTFKEDIQKAQVSGQGDSLHEHIANLAGSPAIKKGILQTVKVVDELVKVMGRHKPENIVIEMARENQTTQKGQKNSRERMKRIEEGIKELGSQILKEHPVENTQLQNEKLYLYYLQNGRDMYVDQELDINRLSDYDVDHIVPQSFLKDDSIDNKVLTRSDKARGKSDNVPSEEVVKKMKNYWRQLLNAKLITQRKFDNLTKAERGGLSELDKAGFIKRQLVETRQITKHVAQILDSRMNTKYDENDKLIREVKVITLKSKLVSDFRKDFQFYKVREINNYHHAHDAYLNAVVGTALIKKYPKLESEFVYGDYKVYDVRKMIAKSEQEIGKATAKYFFYSNIMNFFKTEITLANGEIRKRPLIETNGETGEIVWDKGRDFATVRKVLSMPQVNIVKKTEVQTGGFSKESILPKRNSDKLIARKKDWDPKKYGGFDSPTVAYSVLVVAKVEKGKSKKLKSVKELLGITIMERSSFEKNPIDFLEAKGYKEVKKDLIIKLPKYSLFELENGRKRMLASAGELQKGNELALPSKYVNFLYLASHYEKLKGSPEDNEQKQLFVEQHKHYLDEIIEQISEFSKRVILADANLDKVLSAYNKHRDKPIREQAENIIHLFTLTNLGAPAAFKYFDTTIDRKRYTSTKEVLDATLIHQSITGLYETRIDLSQLGGDGGGGSGGSGGSGGSGGSGGSGGTLNIEDEYRLHETSKEPDVPLGSTWLSDFPQAWAETGGMGLAVRQAPLIIPLKATSTPVSIKQYPMSQEARLGIKPHIQRLLDQGILVPCQSPWNTPLLPVKKPGTNDYRPVQDLREVNKRVEDIHPTVPNPYNLLSGLPPSHQWYTVLDLKDAFFCLRLHPTSQPLFAFEWRDPEMGISGQLTWTRLPQGFKNSPTLFNEALHRDLADFRIQHPDLILLQYVDDLLLAATSEQDCQRGTRALLQTLGNLGYRASAKKAQICQKQVKYLGYLLKEGQRWLTEARKETVMGQPTPKTPRQLREFLGTAGFCRLWIPGFAEMAAPLYPLTKPGTLFNWGPDQQKAYQEIKQALLTAPALGLPDLTKPFELFVDEKQGYAKGVLTQKLGPWRRPVAYLSKKLDPVAAGWPPCLRMVAAIAVLTKDAGKLTMGQPLVILAPHAVEALVKQPPDRWLSNARMTHYQAMLLDTDRVQFGPVVALNPATLLPLPEKEAPHDCLEILAETHGTRPDLTDQPIPDADYTWYTDGSSFLQEGQRRAGAAVTTETEVIWARALPAGTSAQRAELIALTQALKMAEGKKLNVYTDSRYAFATAHVHGEIYRRRGWLTSEGREIKNKNEILALLKALFLPKRLSIIHCPGHQKGNSAEARGNRMADQAAREAAMKAVLETSTLLAGKRTADGSEFEKRTADGSEFESPKKKAKVE

SEQ ID NO: 959 - protein, 2094 aa, synthetic construct
MPAAKRVKLDGGDKKYSIGLDIGTNSVGWAVITDEYKVPSKKFKVLGNTDRHSIKKNLIGALLFDSGETAEATRLKRTARRRYTRRKNRICYLQEIFSNEMAKVDDSFFHRLEESFLVEEDKKHERHPIFGNIVDEVAYHEKYPTIYHLRKKLVDSTDKADLRLIYLALAHMIKFRGHFLIEGDLNPDNSDVDKLFIQLVQTYNQLFEENPINASGVDAKAILSARLSKSRRLENLIAQLPGEKKNGLFGNLIALSLGLTPNFKSNFDLAEDAKLQLSKDTYDDDLDNLLAQIGDQYADLFLAAKNLSDAILLSDILRVNTEITKAPLSASMIKRYDEHHQDLTLLKALVRQQLPEKYKEIFFDQSKNGYAGYIDGGASQEEFYKFIKPILEKMDGTEELLVKLNREDLLRKQRTFDNGSIPHQIHLGELHAILRRQEDFYPFLKDNREKIEKILTFRIPYYVGPLARGNSRFAWMTRKSEETITPWNFEEVVDKGASAQSFIERMTNFDKNLPNEKVLPKHSLLYEYFTVYNELTKVKYVTEGMRKPAFLSGEQKKAIVDLLFKTNRKVTVKQLKEDYFKKIECFDSVEISGVEDRFNASLGTYHDLLKIIKDKDFLDNEENEDILEDIVLTLTLFEDREMIEERLKTYAHLFDDKVMKQLKRRRYTGWGRLSRKLINGIRDKQSGKTILDFLKSDGFANRNFMQLIHDDSLTFKEDIQKAQVSGQGDSLHEHIANLAGSPAIKKGILQTVKVVDELVKVMGRHKPENIVIEMARENQTTQKGQKNSRERMKRIEEGIKELGSQILKEHPVENTQLQNEKLYLYYLQNGRDMYVDQELDINRLSDYDVDHIVPQSFLKDDSIDNKVLTRSDKARGKSDNVPSEEVVKKMKNYWRQLLNAKLITQRKFDNLTKAERGGLSELDKAGFIKRQLVETRQITKHVAQILDSRMNTKYDENDKLIREVKVITLKSKLVSDFRKDFQFYKVREINNYHHAHDAYLNAVVGTALIKKYPKLESEFVYGDYKVYDVRKMIAKSEQEIGKATAKYFFYSNIMNFFKTEITLANGEIRKRPLIETNGETGEIVWDKGRDFATVRKVLSMPQVNIVKKTEVQTGGFSKESILPKRNSDKLIARKKDWDPKKYGGFDSPTVAYSVLVVAKVEKGKSKKLKSVKELLGITIMERSSFEKNPIDFLEAKGYKEVKKDLIIKLPKYSLFELENGRKRMLASAGELQKGNELALPSKYVNFLYLASHYEKLKGSPEDNEQKQLFVEQHKHYLDEIIEQISEFSKRVILADANLDKVLSAYNKHRDKPIREQAENIIHLFTLTNLGAPAAFKYFDTTIDRKRYTSTKEVLDATLIHQSITGLYETRIDLSQLGGDGGGSSGSSGSSGGTLNIEDEYRLHETSKEPDVPLGSTWLSDFPQAWAETGGMGLAVRQAPLIIPLKATSTPVSIKQYPMSQEARLGIKPHIQRLLDQGILVPCQSPWNTPLLPVKKPGTNDYRPVQDLREVNKRVEDIHPTVPNPYNLLSGLPPSHQWYTVLDLKDAFFCLRLHPTSQPLFAFEWRDPEMGISGQLTWTRLPQGFKNSPTLFNEALHRDLADFRIQHPDLILLQYVDDLLLAATSEQDCQRGTRALLQTLGNLGYRASAKKAQICQKQVKYLGYLLKEGQRWLTEARKETVMGQPTPKTPRQLREFLGTAGFCRLWIPGFAEMAAPLYPLTKPGTLFNWGPDQQKAYQEIKQALLTAPALGLPDLTKPFELFVDEKQGYAKGVLTQKLGPWRRPVAYLSKKLDPVAAGWPPCLRMVAAIAVLTKDAGKLTMGQPLVILAPHAVEALVKQPPDRWLSNARMTHYQAMLLDTDRVQFGPVVALNPATLLPLPEKEAPHDCLEILAETHGTRPDLTDQPIPDADYTWYTDGSSFLQEGQRRAGAAVTTETEVIWARALPAGTSAQRAELIALTQALKMAEGKKLNVYTDSRYAFATAHVHGEIYRRRGWLTSEGREIKNKNEILALLKALFLPKRLSIIHCPGHQKGNSAEARGNRMADQAAREAAMKAVLETSTLLAGKRTADGSEFEKRTADGSEFESPKKKAKVE

SEQ ID NO: 960 - protein, 2096 aa, synthetic construct
MPAAKRVKLDGGDKKYSIGLDIGTNSVGWAVITDEYKVPSKKFKVLGNTDRHSIKKNLIGALLFDSGETAEATRLKRTARRRYTRRKNRICYLQEIFSNEMAKVDDSFFHRLEESFLVEEDKKHERHPIFGNIVDEVAYHEKYPTIYHLRKKLVDSTDKADLRLIYLALAHMIKFRGHFLIEGDLNPDNSDVDKLFIQLVQTYNQLFEENPINASGVDAKAILSARLSKSRRLENLIAQLPGEKKNGLFGNLIALSLGLTPNFKSNFDLAEDAKLQLSKDTYDDDLDNLLAQIGDQYADLFLAAKNLSDAILLSDILRVNTEITKAPLSASMIKRYDEHHQDLTLLKALVRQQLPEKYKEIFFDQSKNGYAGYIDGGASQEEFYKFIKPILEKMDGTEELLVKLNREDLLRKQRTFDNGSIPHQIHLGELHAILRRQEDFYPFLKDNREKIEKILTFRIPYYVGPLARGNSRFAWMTRKSEETITPWNFEEVVDKGASAQSFIERMTNFDKNLPNEKVLPKHSLLYEYFTVYNELTKVKYVTEGMRKPAFLSGEQKKAIVDLLFKTNRKVTVKQLKEDYFKKIECFDSVEISGVEDRFNASLGTYHDLLKIIKDKDFLDNEENEDILEDIVLTLTLFEDREMIEERLKTYAHLFDDKVMKQLKRRRYTGWGRLSRKLINGIRDKQSGKTILDFLKSDGFANRNFMQLIHDDSLTFKEDIQKAQVSGQGDSLHEHIANLAGSPAIKKGILQTVKVVDELVKVMGRHKPENIVIEMARENQTTQKGQKNSRERMKRIEEGIKELGSQILKEHPVENTQLQNEKLYLYYLQNGRDMYVDQELDINRLSDYDVDHIVPQSFLKDDSIDNKVLTRSDKARGKSDNVPSEEVVKKMKNYWRQLLNAKLITQRKFDNLTKAERGGLSELDKAGFIKRQLVETRQITKHVAQILDSRMNTKYDENDKLIREVKVITLKSKLVSDFRKDFQFYKVREINNYHHAHDAYLNAVVGTALIKKYPKLESEFVYGDYKVYDVRKMIAKSEQEIGKATAKYFFYSNIMNFFKTEITLANGEIRKRPLIETNGETGEIVWDKGRDFATVRKVLSMPQVNIVKKTEVQTGGFSKESILPKRNSDKLIARKKDWDPKKYGGFDSPTVAYSVLVVAKVEKGKSKKLKSVKELLGITIMERSSFEKNPIDFLEAKGYKEVKKDLIIKLPKYSLFELENGRKRMLASAGELQKGNELALPSKYVNFLYLASHYEKLKGSPEDNEQKQLFVEQHKHYLDEIIEQISEFSKRVILADANLDKVLSAYNKHRDKPIREQAENIIHLFTLTNLGAPAAFKYFDTTIDRKRYTSTKEVLDATLIHQSITGLYETRIDLSQLGGDGGEAAAKGSSPAPGGTLNIEDEYRLHETSKEPDVPLGSTWLSDFPQAWAETGGMGLAVRQAPLIIPLKATSTPVSIKQYPMSQEARLGIKPHIQRLLDQGILVPCQSPWNTPLLPVKKPGTNDYRPVQDLREVNKRVEDIHPTVPNPYNLLSGLPPSHQWYTVLDLKDAFFCLRLHPTSQPLFAFEWRDPEMGISGQLTWTRLPQGFKNSPTLFNEALHRDLADFRIQHPDLILLQYVDDLLLAATSEQDCQRGTRALLQTLGNLGYRASAKKAQICQKQVKYLGYLLKEGQRWLTEARKETVMGQPTPKTPRQLREFLGTAGFCRLWIPGFAEMAAPLYPLTKPGTLFNWGPDQQKAYQEIKQALLTAPALGLPDLTKPFELFVDEKQGYAKGVLTQKLGPWRRPVAYLSKKLDPVAAGWPPCLRMVAAIAVLTKDAGKLTMGQPLVILAPHAVEALVKQPPDRWLSNARMTHYQAMLLDTDRVQFGPVVALNPATLLPLPEKEAPHDCLEILAETHGTRPDLTDQPIPDADYTWYTDGSSFLQEGQRRAGAAVTTETEVIWARALPAGTSAQRAELIALTQALKMAEGKKLNVYTDSRYAFATAHVHGEIYRRRGWLTSEGREIKNKNEILALLKALFLPKRLSIIHCPGHQKGNSAEARGNRMADQAAREAAMKAVLETSTLLAGKRTADGSEFEKRTADGSEFESPKKKAKVE

SEQ ID NO: 961 - protein, 2096 aa, synthetic construct
MPAAKRVKLDGGDKKYSIGLDIGTNSVGWAVITDEYKVPSKKFKVLGNTDRHSIKKNLIGALLFDSGETAEATRLKRTARRRYTRRKNRICYLQEIFSNEMAKVDDSFFHRLEESFLVEEDKKHERHPIFGNIVDEVAYHEKYPTIYHLRKKLVDSTDKADLRLIYLALAHMIKFRGHFLIEGDLNPDNSDVDKLFIQLVQTYNQLFEENPINASGVDAKAILSARLSKSRRLENLIAQLPGEKKNGLFGNLIALSLGLTPNFKSNFDLAEDAKLQLSKDTYDDDLDNLLAQIGDQYADLFLAAKNLSDAILLSDILRVNTEITKAPLSASMIKRYDEHHQDLTLLKALVRQQLPEKYKEIFFDQSKNGYAGYIDGGASQEEFYKFIKPILEKMDGTEELLVKLNREDLLRKQRTFDNGSIPHQIHLGELHAILRRQEDFYPFLKDNREKIEKILTFRIPYYVGPLARGNSRFAWMTRKSEETITPWNFEEVVDKGASAQSFIERMTNFDKNLPNEKVLPKHSLLYEYFTVYNELTKVKYVTEGMRKPAFLSGEQKKAIVDLLFKTNRKVTVKQLKEDYFKKIECFDSVEISGVEDRFNASLGTYHDLLKIIKDKDFLDNEENEDILEDIVLTLTLFEDREMIEERLKTYAHLFDDKVMKQLKRRRYTGWGRLSRKLINGIRDKQSGKTILDFLKSDGFANRNFMQLIHDDSLTFKEDIQKAQVSGQGDSLHEHIANLAGSPAIKKGILQTVKVVDELVKVMGRHKPENIVIEMARENQTTQKGQKNSRERMKRIEEGIKELGSQILKEHPVENTQLQNEKLYLYYLQNGRDMYVDQELDINRLSDYDVDHIVPQSFLKDDSIDNKVLTRSDKARGKSDNVPSEEVVKKMKNYWRQLLNAKLITQRKFDNLTKAERGGLSELDKAGFIKRQLVETRQITKHVAQILDSRMNTKYDENDKLIREVKVITLKSKLVSDFRKDFQFYKVREINNYHHAHDAYLNAVVGTALIKKYPKLESEFVYGDYKVYDVRKMIAKSEQEIGKATAKYFFYSNIMNFFKTEITLANGEIRKRPLIETNGETGEIVWDKGRDFATVRKVLSMPQVNIVKKTEVQTGGFSKESILPKRNSDKLIARKKDWDPKKYGGFDSPTVAYSVLVVAKVEKGKSKKLKSVKELLGITIMERSSFEKNPIDFLEAKGYKEVKKDLIIKLPKYSLFELENGRKRMLASAGELQKGNELALPSKYVNFLYLASHYEKLKGSPEDNEQKQLFVEQHKHYLDEIIEQISEFSKRVILADANLDKVLSAYNKHRDKPIREQAENIIHLFTLTNLGAPAAFKYFDTTIDRKRYTSTKEVLDATLIHQSITGLYETRIDLSQLGGDGGEAAAKPAPGGSGGTLNIEDEYRLHETSKEPDVPLGSTWLSDFPQAWAETGGMGLAVRQAPLIIPLKATSTPVSIKQYPMSQEARLGIKPHIQRLLDQGILVPCQSPWNTPLLPVKKPGTNDYRPVQDLREVNKRVEDIHPTVPNPYNLLSGLPPSHQWYTVLDLKDAFFCLRLHPTSQPLFAFEWRDPEMGISGQLTWTRLPQGFKNSPTLFNEALHRDLADFRIQHPDLILLQYVDDLLLAATSEQDCQRGTRALLQTLGNLGYRASAKKAQICQKQVKYLGYLLKEGQRWLTEARKETVMGQPTPKTPRQLREFLGTAGFCRLWIPGFAEMAAPLYPLTKPGTLFNWGPDQQKAYQEIKQALLTAPALGLPDLTKPFELFVDEKQGYAKGVLTQKLGPWRRPVAYLSKKLDPVAAGWPPCLRMVAAIAVLTKDAGKLTMGQPLVILAPHAVEALVKQPPDRWLSNARMTHYQAMLLDTDRVQFGPVVALNPATLLPLPEKEAPHDCLEILAETHGTRPDLTDQPIPDADYTWYTDGSSFLQEGQRRAGAAVTTETEVIWARALPAGTSAQRAELIALTQALKMAEGKKLNVYTDSRYAFATAHVHGEIYRRRGWLTSEGREIKNKNEILALLKALFLPKRLSIIHCPGHQKGNSAEARGNRMADQAAREAAMKAVLETSTLLAGKRTADGSEFEKRTADGSEFESPKKKAKVE

SEQ ID NO: 962 - protein, 2131 aa, synthetic construct
MPAAKRVKLDGGDKKYSIGLDIGTNSVGWAVITDEYKVPSKKFKVLGNTDRHSIKKNLIGALLFDSGETAEATRLKRTARRRYTRRKNRICYLQEIFSNEMAKVDDSFFHRLEESFLVEEDKKHERHPIFGNIVDEVAYHEKYPTIYHLRKKLVDSTDKADLRLIYLALAHMIKFRGHFLIEGDLNPDNSDVDKLFIQLVQTYNQLFEENPINASGVDAKAILSARLSKSRRLENLIAQLPGEKKNGLFGNLIALSLGLTPNFKSNFDLAEDAKLQLSKDTYDDDLDNLLAQIGDQYADLFLAAKNLSDAILLSDILRVNTEITKAPLSASMIKRYDEHHQDLTLLKALVRQQLPEKYKEIFFDQSKNGYAGYIDGGASQEEFYKFIKPILEKMDGTEELLVKLNREDLLRKQRTFDNGSIPHQIHLGELHAILRRQEDFYPFLKDNREKIEKILTFRIPYYVGPLARGNSRFAWMTRKSEETITPWNFEEVVDKGASAQSFIERMTNFDKNLPNEKVLPKHSLLYEYFTVYNELTKVKYVTEGMRKPAFLSGEQKKAIVDLLFKTNRKVTVKQLKEDYFKKIECFDSVEISGVEDRFNASLGTYHDLLKIIKDKDFLDNEENEDILEDIVLTLTLFEDREMIEERLKTYAHLFDDKVMKQLKRRRYTGWGRLSRKLINGIRDKQSGKTILDFLKSDGFANRNFMQLIHDDSLTFKEDIQKAQVSGQGDSLHEHIANLAGSPAIKKGILQTVKVVDELVKVMGRHKPENIVIEMARENQTTQKGQKNSRERMKRIEEGIKELGSQILKEHPVENTQLQNEKLYLYYLQNGRDMYVDQELDINRLSDYDVDHIVPQSFLKDDSIDNKVLTRSDKARGKSDNVPSEEVVKKMKNYWRQLLNAKLITQRKFDNLTKAERGGLSELDKAGFIKRQLVETRQITKHVAQILDSRMNTKYDENDKLIREVKVITLKSKLVSDFRKDFQFYKVREINNYHHAHDAYLNAVVGTALIKKYPKLESEFVYGDYKVYDVRKMIAKSEQEIGKATAKYFFYSNIMNFFKTEITLANGEIRKRPLIETNGETGEIVWDKGRDFATVRKVLSMPQVNIVKKTEVQTGGFSKESILPKRNSDKLIARKKDWDPKKYGGFDSPTVAYSVLVVAKVEKGKSKKLKSVKELLGITIMERSSFEKNPIDFLEAKGYKEVKKDLIIKLPKYSLFELENGRKRMLASAGELQKGNELALPSKYVNFLYLASHYEKLKGSPEDNEQKQLFVEQHKHYLDEIIEQISEFSKRVILADANLDKVLSAYNKHRDKPIREQAENIIHLFTLTNLGAPAAFKYFDTTIDRKRYTSTKEVLDATLIHQSITGLYETRIDLSQLGGDGGAEAAAKEAAAKEAAAKEAAAKALEAEAAAKEAAAKEAAAKEAAAKAGGTLNIEDEYRLHETSKEPDVPLGSTWLSDFPQAWAETGGMGLAVRQAPLIIPLKATSTPVSIKQYPMSQEARLGIKPHIQRLLDQGILVPCQSPWNTPLLPVKKPGTNDYRPVQDLREVNKRVEDIHPTVPNPYNLLSGLPPSHQWYTVLDLKDAFFCLRLHPTSQPLFAFEWRDPEMGISGQLTWTRLPQGFKNSPTLFNEALHRDLADFRIQHPDLILLQYVDDLLLAATSEQDCQRGTRALLQTLGNLGYRASAKKAQICQKQVKYLGYLLKEGQRWLTEARKETVMGQPTPKTPRQLREFLGTAGFCRLWIPGFAEMAAPLYPLTKPGTLFNWGPDQQKAYQEIKQALLTAPALGLPDLTKPFELFVDEKQGYAKGVLTQKLGPWRRPVAYLSKKLDPVAAGWPPCLRMVAAIAVLTKDAGKLTMGQPLVILAPHAVEALVKQPPDRWLSNARMTHYQAMLLDTDRVQFGPVVALNPATLLPLPEKEAPHDCLEILAETHGTRPDLTDQPIPDADYTWYTDGSSFLQEGQRRAGAAVTTETEVIWARALPAGTSAQRAELIALTQALKMAEGKKLNVYTDSRYAFATAHVHGEIYRRRGWLTSEGREIKNKNEILALLKALFLPKRLSIIHCPGHQKGNSAEARGNRMADQAAREAAMKAVLETSTLLAGKRTADGSEFEKRTADGSEFESPKKKAKVE

SEQ ID NO: 963 - protein, 2096 aa, synthetic construct
MPAAKRVKLDGGDKKYSIGLDIGTNSVGWAVITDEYKVPSKKFKVLGNTDRHSIKKNLIGALLFDSGETAEATRLKRTARRRYTRRKNRICYLQEIFSNEMAKVDDSFFHRLEESFLVEEDKKHERHPIFGNIVDEVAYHEKYPTIYHLRKKLVDSTDKADLRLIYLALAHMIKFRGHFLIEGDLNPDNSDVDKLFIQLVQTYNQLFEENPINASGVDAKAILSARLSKSRRLENLIAQLPGEKKNGLFGNLIALSLGLTPNFKSNFDLAEDAKLQLSKDTYDDDLDNLLAQIGDQYADLFLAAKNLSDAILLSDILRVNTEITKAPLSASMIKRYDEHHQDLTLLKALVRQQLPEKYKEIFFDQSKNGYAGYIDGGASQEEFYKFIKPILEKMDGTEELLVKLNREDLLRKQRTFDNGSIPHQIHLGELHAILRRQEDFYPFLKDNREKIEKILTFRIPYYVGPLARGNSRFAWMTRKSEETITPWNFEEVVDKGASAQSFIERMTNFDKNLPNEKVLPKHSLLYEYFTVYNELTKVKYVTEGMRKPAFLSGEQKKAIVDLLFKTNRKVTVKQLKEDYFKKIECFDSVEISGVEDRFNASLGTYHDLLKIIKDKDFLDNEENEDILEDIVLTLTLFEDREMIEERLKTYAHLFDDKVMKQLKRRRYTGWGRLSRKLINGIRDKQSGKTILDFLKSDGFANRNFMQLIHDDSLTFKEDIQKAQVSGQGDSLHEHIANLAGSPAIKKGILQTVKVVDELVKVMGRHKPENIVIEMARENQTTQKGQKNSRERMKRIEEGIKELGSQILKEHPVENTQLQNEKLYLYYLQNGRDMYVDQELDINRLSDYDVDHIVPQSFLKDDSIDNKVLTRSDKARGKSDNVPSEEVVKKMKNYWRQLLNAKLITQRKFDNLTKAERGGLSELDKAGFIKRQLVETRQITKHVAQILDSRMNTKYDENDKLIREVKVITLKSKLVSDFRKDFQFYKVREINNYHHAHDAYLNAVVGTALIKKYPKLESEFVYGDYKVYDVRKMIAKSEQEIGKATAKYFFYSNIMNFFKTEITLANGEIRKRPLIETNGETGEIVWDKGRDFATVRKVLSMPQVNIVKKTEVQTGGFSKESILPKRNSDKLIARKKDWDPKKYGGFDSPTVAYSVLVVAKVEKGKSKKLKSVKELLGITIMERSSFEKNPIDFLEAKGYKEVKKDLIIKLPKYSLFELENGRKRMLASAGELQKGNELALPSKYVNFLYLASHYEKLKGSPEDNEQKQLFVEQHKHYLDEIIEQISEFSKRVILADANLDKVLSAYNKHRDKPIREQAENIIHLFTLTNLGAPAAFKYFDTTIDRKRYTSTKEVLDATLIHQSITGLYETRIDLSQLGGDGGEAAAKGGGPAPGGTLNIEDEYRLHETSKEPDVPLGSTWLSDFPQAWAETGGMGLAVRQAPLIIPLKATSTPVSIKQYPMSQEARLGIKPHIQRLLDQGILVPCQSPWNTPLLPVKKPGTNDYRPVQDLREVNKRVEDIHPTVPNPYNLLSGLPPSHQWYTVLDLKDAFFCLRLHPTSQPLFAFEWRDPEMGISGQLTWTRLPQGFKNSPTLFNEALHRDLADFRIQHPDLILLQYVDDLLLAATSEQDCQRGTRALLQTLGNLGYRASAKKAQICQKQVKYLGYLLKEGQRWLTEARKETVMGQPTPKTPRQLREFLGTAGFCRLWIPGFAEMAAPLYPLTKPGTLFNWGPDQQKAYQEIKQALLTAPALGLPDLTKPFELFVDEKQGYAKGVLTQKLGPWRRPVAYLSKKLDPVAAGWPPCLRMVAAIAVLTKDAGKLTMGQPLVILAPHAVEALVKQPPDRWLSNARMTHYQAMLLDTDRVQFGPVVALNPATLLPLPEKEAPHDCLEILAETHGTRPDLTDQPIPDADYTWYTDGSSFLQEGQRRAGAAVTTETEVIWARALPAGTSAQRAELIALTQALKMAEGKKLNVYTDSRYAFATAHVHGEIYRRRGWLTSEGREIKNKNEILALLKALFLPKRLSIIHCPGHQKGNSAEARGNRMADQAAREAAMKAVLETSTLLAGKRTADGSEFEKRTADGSEFESPKKKAKVE

SEQ ID NO: 964 - protein, 2100 aa, synthetic construct
MPAAKRVKLDGGDKKYSIGLDIGTNSVGWAVITDEYKVPSKKFKVLGNTDRHSIKKNLIGALLFDSGETAEATRLKRTARRRYTRRKNRICYLQEIFSNEMAKVDDSFFHRLEESFLVEEDKKHERHPIFGNIVDEVAYHEKYPTIYHLRKKLVDSTDKADLRLIYLALAHMIKFRGHFLIEGDLNPDNSDVDKLFIQLVQTYNQLFEENPINASGVDAKAILSARLSKSRRLENLIAQLPGEKKNGLFGNLIALSLGLTPNFKSNFDLAEDAKLQLSKDTYDDDLDNLLAQIGDQYADLFLAAKNLSDAILLSDILRVNTEITKAPLSASMIKRYDEHHQDLTLLKALVRQQLPEKYKEIFFDQSKNGYAGYIDGGASQEEFYKFIKPILEKMDGTEELLVKLNREDLLRKQRTFDNGSIPHQIHLGELHAILRRQEDFYPFLKDNREKIEKILTFRIPYYVGPLARGNSRFAWMTRKSEETITPWNFEEVVDKGASAQSFIERMTNFDKNLPNEKVLPKHSLLYEYFTVYNELTKVKYVTEGMRKPAFLSGEQKKAIVDLLFKTNRKVTVKQLKEDYFKKIECFDSVEISGVEDRFNASLGTYHDLLKIIKDKDFLDNEENEDILEDIVLTLTLFEDREMIEERLKTYAHLFDDKVMKQLKRRRYTGWGRLSRKLINGIRDKQSGKTILDFLKSDGFANRNFMQLIHDDSLTFKEDIQKAQVSGQGDSLHEHIANLAGSPAIKKGILQTVKVVDELVKVMGRHKPENIVIEMARENQTTQKGQKNSRERMKRIEEGIKELGSQILKEHPVENTQLQNEKLYLYYLQNGRDMYVDQELDINRLSDYDVDHIVPQSFLKDDSIDNKVLTRSDKARGKSDNVPSEEVVKKMKNYWRQLLNAKLITQRKFDNLTKAERGGLSELDKAGFIKRQLVETRQITKHVAQILDSRMNTKYDENDKLIREVKVITLKSKLVSDFRKDFQFYKVREINNYHHAHDAYLNAVVGTALIKKYPKLESEFVYGDYKVYDVRKMIAKSEQEIGKATAKYFFYSNIMNFFKTEITLANGEIRKRPLIETNGETGEIVWDKGRDFATVRKVLSMPQVNIVKKTEVQTGGFSKESILPKRNSDKLIARKKDWDPKKYGGFDSPTVAYSVLVVAKVEKGKSKKLKSVKELLGITIMERSSFEKNPIDFLEAKGYKEVKKDLIIKLPKYSLFELENGRKRMLASAGELQKGNELALPSKYVNFLYLASHYEKLKGSPEDNEQKQLFVEQHKHYLDEIIEQISEFSKRVILADANLDKVLSAYNKHRDKPIREQAENIIHLFTLTNLGAPAAFKYFDTTIDRKRYTSTKEVLDATLIHQSITGLYETRIDLSQLGGDGGGSSGSSGSSGSSGSSGGTLNIEDEYRLHETSKEPDVPLGSTWLSDFPQAWAETGGMGLAVRQAPLIIPLKATSTPVSIKQYPMSQEARLGIKPHIQRLLDQGILVPCQSPWNTPLLPVKKPGTNDYRPVQDLREVNKRVEDIHPTVPNPYNLLSGLPPSHQWYTVLDLKDAFFCLRLHPTSQPLFAFEWRDPEMGISGQLTWTRLPQGFKNSPTLFNEALHRDLADFRIQHPDLILLQYVDDLLLAATSEQDCQRGTRALLQTLGNLGYRASAKKAQICQKQVKYLGYLLKEGQRWLTEARKETVMGQPTPKTPRQLREFLGTAGFCRLWIPGFAEMAAPLYPLTKPGTLFNWGPDQQKAYQEIKQALLTAPALGLPDLTKPFELFVDEKQGYAKGVLTQKLGPWRRPVAYLSKKLDPVAAGWPPCLRMVAAIAVLTKDAGKLTMGQPLVILAPHAVEALVKQPPDRWLSNARMTHYQAMLLDTDRVQFGPVVALNPATLLPLPEKEAPHDCLEILAETHGTRPDLTDQPIPDADYTWYTDGSSFLQEGQRRAGAAVTTETEVIWARALPAGTSAQRAELIALTQALKMAEGKKLNVYTDSRYAFATAHVHGEIYRRRGWLTSEGREIKNKNEILALLKALFLPKRLSIIHCPGHQKGNSAEARGNRMADQAAREAAMKAVLETSTLLAGKRTADGSEFEKRTADGSEFESPKKKAKVE

SEQ ID NO: 965 - protein, 2105 aa, synthetic construct
MPAAKRVKLDGGDKKYSIGLDIGTNSVGWAVITDEYKVPSKKFKVLGNTDRHSIKKNLIGALLFDSGETAEATRLKRTARRRYTRRKNRICYLQEIFSNEMAKVDDSFFHRLEESFLVEEDKKHERHPIFGNIVDEVAYHEKYPTIYHLRKKLVDSTDKADLRLIYLALAHMIKFRGHFLIEGDLNPDNSDVDKLFIQLVQTYNQLFEENPINASGVDAKAILSARLSKSRRLENLIAQLPGEKKNGLFGNLIALSLGLTPNFKSNFDLAEDAKLQLSKDTYDDDLDNLLAQIGDQYADLFLAAKNLSDAILLSDILRVNTEITKAPLSASMIKRYDEHHQDLTLLKALVRQQLPEKYKEIFFDQSKNGYAGYIDGGASQEEFYKFIKPILEKMDGTEELLVKLNREDLLRKQRTFDNGSIPHQIHLGELHAILRRQEDFYPFLKDNREKIEKILTFRIPYYVGPLARGNSRFAWMTRKSEETITPWNFEEVVDKGASAQSFIERMTNFDKNLPNEKVLPKHSLLYEYFTVYNELTKVKYVTEGMRKPAFLSGEQKKAIVDLLFKTNRKVTVKQLKEDYFKKIECFDSVEISGVEDRFNASLGTYHDLLKIIKDKDFLDNEENEDILEDIVLTLTLFEDREMIEERLKTYAHLFDDKVMKQLKRRRYTGWGRLSRKLINGIRDKQSGKTILDFLKSDGFANRNFMQLIHDDSLTFKEDIQKAQVSGQGDSLHEHIANLAGSPAIKKGILQTVKVVDELVKVMGRHKPENIVIEMARENQTTQKGQKNSRERMKRIEEGIKELGSQILKEHPVENTQLQNEKLYLYYLQNGRDMYVDQELDINRLSDYDVDHIVPQSFLKDDSIDNKVLTRSDKARGKSDNVPSEEVVKKMKNYWRQLLNAKLITQRKFDNLTKAERGGLSELDKAGFIKRQLVETRQITKHVAQILDSRMNTKYDENDKLIREVKVITLKSKLVSDFRKDFQFYKVREINNYHHAHDAYLNAVVGTALIKKYPKLESEFVYGDYKVYDVRKMIAKSEQEIGKATAKYFFYSNIMNFFKTEITLANGEIRKRPLIETNGETGEIVWDKGRDFATVRKVLSMPQVNIVKKTEVQTGGFSKESILPKRNSDKLIARKKDWDPKKYGGFDSPTVAYSVLVVAKVEKGKSKKLKSVKELLGITIMERSSFEKNPIDFLEAKGYKEVKKDLIIKLPKYSLFELENGRKRMLASAGELQKGNELALPSKYVNFLYLASHYEKLKGSPEDNEQKQLFVEQHKHYLDEIIEQISEFSKRVILADANLDKVLSAYNKHRDKPIREQAENIIHLFTLTNLGAPAAFKYFDTTIDRKRYTSTKEVLDATLIHQSITGLYETRIDLSQLGGDGGEAAAKEAAAKEAAAKEAAAKGGTLNIEDEYRLHETSKEPDVPLGSTWLSDFPQAWAETGGMGLAVRQAPLIIPLKATSTPVSIKQYPMSQEARLGIKPHIQRLLDQGILVPCQSPWNTPLLPVKKPGTNDYRPVQDLREVNKRVEDIHPTVPNPYNLLSGLPPSHQWYTVLDLKDAFFCLRLHPTSQPLFAFEWRDPEMGISGQLTWTRLPQGFKNSPTLFNEALHRDLADFRIQHPDLILLQYVDDLLLAATSEQDCQRGTRALLQTLGNLGYRASAKKAQICQKQVKYLGYLLKEGQRWLTEARKETVMGQPTPKTPRQLREFLGTAGFCRLWIPGFAEMAAPLYPLTKPGTLFNWGPDQQKAYQEIKQALLTAPALGLPDLTKPFELFVDEKQGYAKGVLTQKLGPWRRPVAYLSKKLDPVAAGWPPCLRMVAAIAVLTKDAGKLTMGQPLVILAPHAVEALVKQPPDRWLSNARMTHYQAMLLDTDRVQFGPVVALNPATLLPLPEKEAPHDCLEILAETHGTRPDLTDQPIPDADYTWYTDGSSFLQEGQRRAGAAVTTETEVIWARALPAGTSAQRAELIALTQALKMAEGKKLNVYTDSRYAFATAHVHGEIYRRRGWLTSEGREIKNKNEILALLKALFLPKRLSIIHCPGHQKGNSAEARGNRMADQAAREAAMKAVLETSTLLAGKRTADGSEFEKRTADGSEFESPKKKAKVE

SEQ ID NO: 966 - protein, 2093 aa, synthetic construct
MPAAKRVKLDGGDKKYSIGLDIGTNSVGWAVITDEYKVPSKKFKVLGNTDRHSIKKNLIGALLFDSGETAEATRLKRTARRRYTRRKNRICYLQEIFSNEMAKVDDSFFHRLEESFLVEEDKKHERHPIFGNIVDEVAYHEKYPTIYHLRKKLVDSTDKADLRLIYLALAHMIKFRGHFLIEGDLNPDNSDVDKLFIQLVQTYNQLFEENPINASGVDAKAILSARLSKSRRLENLIAQLPGEKKNGLFGNLIALSLGLTPNFKSNFDLAEDAKLQLSKDTYDDDLDNLLAQIGDQYADLFLAAKNLSDAILLSDILRVNTEITKAPLSASMIKRYDEHHQDLTLLKALVRQQLPEKYKEIFFDQSKNGYAGYIDGGASQEEFYKFIKPILEKMDGTEELLVKLNREDLLRKQRTFDNGSIPHQIHLGELHAILRRQEDFYPFLKDNREKIEKILTFRIPYYVGPLARGNSRFAWMTRKSEETITPWNFEEVVDKGASAQSFIERMTNFDKNLPNEKVLPKHSLLYEYFTVYNELTKVKYVTEGMRKPAFLSGEQKKAIVDLLFKTNRKVTVKQLKEDYFKKIECFDSVEISGVEDRFNASLGTYHDLLKIIKDKDFLDNEENEDILEDIVLTLTLFEDREMIEERLKTYAHLFDDKVMKQLKRRRYTGWGRLSRKLINGIRDKQSGKTILDFLKSDGFANRNFMQLIHDDSLTFKEDIQKAQVSGQGDSLHEHIANLAGSPAIKKGILQTVKVVDELVKVMGRHKPENIVIEMARENQTTQKGQKNSRERMKRIEEGIKELGSQILKEHPVENTQLQNEKLYLYYLQNGRDMYVDQELDINRLSDYDVDHIVPQSFLKDDSIDNKVLTRSDKARGKSDNVPSEEVVKKMKNYWRQLLNAKLITQRKFDNLTKAERGGLSELDKAGFIKRQLVETRQITKHVAQILDSRMNTKYDENDKLIREVKVITLKSKLVSDFRKDFQFYKVREINNYHHAHDAYLNAVVGTALIKKYPKLESEFVYGDYKVYDVRKMIAKSEQEIGKATAKYFFYSNIMNFFKTEITLANGEIRKRPLIETNGETGEIVWDKGRDFATVRKVLSMPQVNIVKKTEVQTGGFSKESILPKRNSDKLIARKKDWDPKKYGGFDSPTVAYSVLVVAKVEKGKSKKLKSVKELLGITIMERSSFEKNPIDFLEAKGYKEVKKDLIIKLPKYSLFELENGRKRMLASAGELQKGNELALPSKYVNFLYLASHYEKLKGSPEDNEQKQLFVEQHKHYLDEIIEQISEFSKRVILADANLDKVLSAYNKHRDKPIREQAENIIHLFTLTNLGAPAAFKYFDTTIDRKRYTSTKEVLDATLIHQSITGLYETRIDLSQLGGDGGGSSEAAAKGGTLNIEDEYRLHETSKEPDVPLGSTWLSDFPQAWAETGGMGLAVRQAPLIIPLKATSTPVSIKQYPMSQEARLGIKPHIQRLLDQGILVPCQSPWNTPLLPVKKPGTNDYRPVQDLREVNKRVEDIHPTVPNPYNLLSGLPPSHQWYTVLDLKDAFFCLRLHPTSQPLFAFEWRDPEMGISGQLTWTRLPQGFKNSPTLFNEALHRDLADFRIQHPDLILLQYVDDLLLAATSEQDCQRGTRALLQTLGNLGYRASAKKAQICQKQVKYLGYLLKEGQRWLTEARKETVMGQPTPKTPRQLREFLGTAGFCRLWIPGFAEMAAPLYPLTKPGTLFNWGPDQQKAYQEIKQALLTAPALGLPDLTKPFELFVDEKQGYAKGVLTQKLGPWRRPVAYLSKKLDPVAAGWPPCLRMVAAIAVLTKDAGKLTMGQPLVILAPHAVEALVKQPPDRWLSNARMTHYQAMLLDTDRVQFGPVVALNPATLLPLPEKEAPHDCLEILAETHGTRPDLTDQPIPDADYTWYTDGSSFLQEGQRRAGAAVTTETEVIWARALPAGTSAQRAELIALTQALKMAEGKKLNVYTDSRYAFATAHVHGEIYRRRGWLTSEGREIKNKNEILALLKALFLPKRLSIIHCPGHQKGNSAEARGNRMADQAAREAAMKAVLETSTLLAGKRTADGSEFEKRTADGSEFESPKKKAKVE

SEQ ID NO: 967 - protein, 2096 aa, synthetic construct
MPAAKRVKLDGGDKKYSIGLDIGTNSVGWAVITDEYKVPSKKFKVLGNTDRHSIKKNLIGALLFDSGETAEATRLKRTARRRYTRRKNRICYLQEIFSNEMAKVDDSFFHRLEESFLVEEDKKHERHPIFGNIVDEVAYHEKYPTIYHLRKKLVDSTDKADLRLIYLALAHMIKFRGHFLIEGDLNPDNSDVDKLFIQLVQTYNQLFEENPINASGVDAKAILSARLSKSRRLENLIAQLPGEKKNGLFGNLIALSLGLTPNFKSNFDLAEDAKLQLSKDTYDDDLDNLLAQIGDQYADLFLAAKNLSDAILLSDILRVNTEITKAPLSASMIKRYDEHHQDLTLLKALVRQQLPEKYKEIFFDQSKNGYAGYIDGGASQEEFYKFIKPILEKMDGTEELLVKLNREDLLRKQRTFDNGSIPHQIHLGELHAILRRQEDFYPFLKDNREKIEKILTFRIPYYVGPLARGNSRFAWMTRKSEETITPWNFEEVVDKGASAQSFIERMTNFDKNLPNEKVLPKHSLLYEYFTVYNELTKVKYVTEGMRKPAFLSGEQKKAIVDLLFKTNRKVTVKQLKEDYFKKIECFDSVEISGVEDRFNASLGTYHDLLKIIKDKDFLDNEENEDILEDIVLTLTLFEDREMIEERLKTYAHLFDDKVMKQLKRRRYTGWGRLSRKLINGIRDKQSGKTILDFLKSDGFANRNFMQLIHDDSLTFKEDIQKAQVSGQGDSLHEHIANLAGSPAIKKGILQTVKVVDELVKVMGRHKPENIVIEMARENQTTQKGQKNSRERMKRIEEGIKELGSQILKEHPVENTQLQNEKLYLYYLQNGRDMYVDQELDINRLSDYDVDHIVPQSFLKDDSIDNKVLTRSDKARGKSDNVPSEEVVKKMKNYWRQLLNAKLITQRKFDNLTKAERGGLSELDKAGFIKRQLVETRQITKHVAQILDSRMNTKYDENDKLIREVKVITLKSKLVSDFRKDFQFYKVREINNYHHAHDAYLNAVVGTALIKKYPKLESEFVYGDYKVYDVRKMIAKSEQEIGKATAKYFFYSNIMNFFKTEITLANGEIRKRPLIETNGETGEIVWDKGRDFATVRKVLSMPQVNIVKKTEVQTGGFSKESILPKRNSDKLIARKKDWDPKKYGGFDSPTVAYSVLVVAKVEKGKSKKLKSVKELLGITIMERSSFEKNPIDFLEAKGYKEVKKDLIIKLPKYSLFELENGRKRMLASAGELQKGNELALPSKYVNFLYLASHYEKLKGSPEDNEQKQLFVEQHKHYLDEIIEQISEFSKRVILADANLDKVLSAYNKHRDKPIREQAENIIHLFTLTNLGAPAAFKYFDTTIDRKRYTSTKEVLDATLIHQSITGLYETRIDLSQLGGDGGPAPGSSEAAAKGGTLNIEDEYRLHETSKEPDVPLGSTWLSDFPQAWAETGGMGLAVRQAPLIIPLKATSTPVSIKQYPMSQEARLGIKPHIQRLLDQGILVPCQSPWNTPLLPVKKPGTNDYRPVQDLREVNKRVEDIHPTVPNPYNLLSGLPPSHQWYTVLDLKDAFFCLRLHPTSQPLFAFEWRDPEMGISGQLTWTRLPQGFKNSPTLFNEALHRDLADFRIQHPDLILLQYVDDLLLAATSEQDCQRGTRALLQTLGNLGYRASAKKAQICQKQVKYLGYLLKEGQRWLTEARKETVMGQPTPKTPRQLREFLGTAGFCRLWIPGFAEMAAPLYPLTKPGTLFNWGPDQQKAYQEIKQALLTAPALGLPDLTKPFELFVDEKQGYAKGVLTQKLGPWRRPVAYLSKKLDPVAAGWPPCLRMVAAIAVLTKDAGKLTMGQPLVILAPHAVEALVKQPPDRWLSNARMTHYQAMLLDTDRVQFGPVVALNPATLLPLPEKEAPHDCLEILAETHGTRPDLTDQPIPDADYTWYTDGSSFLQEGQRRAGAAVTTETEVIWARALPAGTSAQRAELIALTQALKMAEGKKLNVYTDSRYAFATAHVHGEIYRRRGWLTSEGREIKNKNEILALLKALFLPKRLSIIHCPGHQKGNSAEARGNRMADQAAREAAMKAVLETSTLLAGKRTADGSEFEKRTADGSEFESPKKKAKVE

SEQ ID NO: 968 - protein, 2096 aa, synthetic construct
MPAAKRVKLDGGDKKYSIGLDIGTNSVGWAVITDEYKVPSKKFKVLGNTDRHSIKKNLIGALLFDSGETAEATRLKRTARRRYTRRKNRICYLQEIFSNEMAKVDDSFFHRLEESFLVEEDKKHERHPIFGNIVDEVAYHEKYPTIYHLRKKLVDSTDKADLRLIYLALAHMIKFRGHFLIEGDLNPDNSDVDKLFIQLVQTYNQLFEENPINASGVDAKAILSARLSKSRRLENLIAQLPGEKKNGLFGNLIALSLGLTPNFKSNFDLAEDAKLQLSKDTYDDDLDNLLAQIGDQYADLFLAAKNLSDAILLSDILRVNTEITKAPLSASMIKRYDEHHQDLTLLKALVRQQLPEKYKEIFFDQSKNGYAGYIDGGASQEEFYKFIKPILEKMDGTEELLVKLNREDLLRKQRTFDNGSIPHQIHLGELHAILRRQEDFYPFLKDNREKIEKILTFRIPYYVGPLARGNSRFAWMTRKSEETITPWNFEEVVDKGASAQSFIERMTNFDKNLPNEKVLPKHSLLYEYFTVYNELTKVKYVTEGMRKPAFLSGEQKKAIVDLLFKTNRKVTVKQLKEDYFKKIECFDSVEISGVEDRFNASLGTYHDLLKIIKDKDFLDNEENEDILEDIVLTLTLFEDREMIEERLKTYAHLFDDKVMKQLKRRRYTGWGRLSRKLINGIRDKQSGKTILDFLKSDGFANRNFMQLIHDDSLTFKEDIQKAQVSGQGDSLHEHIANLAGSPAIKKGILQTVKVVDELVKVMGRHKPENIVIEMARENQTTQKGQKNSRERMKRIEEGIKELGSQILKEHPVENTQLQNEKLYLYYLQNGRDMYVDQELDINRLSDYDVDHIVPQSFLKDDSIDNKVLTRSDKARGKSDNVPSEEVVKKMKNYWRQLLNAKLITQRKFDNLTKAERGGLSELDKAGFIKRQLVETRQITKHVAQILDSRMNTKYDENDKLIREVKVITLKSKLVSDFRKDFQFYKVREINNYHHAHDAYLNAVVGTALIKKYPKLESEFVYGDYKVYDVRKMIAKSEQEIGKATAKYFFYSNIMNFFKTEITLANGEIRKRPLIETNGETGEIVWDKGRDFATVRKVLSMPQVNIVKKTEVQTGGFSKESILPKRNSDKLIARKKDWDPKKYGGFDSPTVAYSVLVVAKVEKGKSKKLKSVKELLGITIMERSSFEKNPIDFLEAKGYKEVKKDLIIKLPKYSLFELENGRKRMLASAGELQKGNELALPSKYVNFLYLASHYEKLKGSPEDNEQKQLFVEQHKHYLDEIIEQISEFSKRVILADANLDKVLSAYNKHRDKPIREQAENIIHLFTLTNLGAPAAFKYFDTTIDRKRYTSTKEVLDATLIHQSITGLYETRIDLSQLGGDGGGGSPAPEAAAKGGTLNIEDEYRLHETSKEPDVPLGSTWLSDFPQAWAETGGMGLAVRQAPLIIPLKATSTPVSIKQYPMSQEARLGIKPHIQRLLDQGILVPCQSPWNTPLLPVKKPGTNDYRPVQDLREVNKRVEDIHPTVPNPYNLLSGLPPSHQWYTVLDLKDAFFCLRLHPTSQPLFAFEWRDPEMGISGQLTWTRLPQGFKNSPTLFNEALHRDLADFRIQHPDLILLQYVDDLLLAATSEQDCQRGTRALLQTLGNLGYRASAKKAQICQKQVKYLGYLLKEGQRWLTEARKETVMGQPTPKTPRQLREFLGTAGFCRLWIPGFAEMAAPLYPLTKPGTLFNWGPDQQKAYQEIKQALLTAPALGLPDLTKPFELFVDEKQGYAKGVLTQKLGPWRRPVAYLSKKLDPVAAGWPPCLRMVAAIAVLTKDAGKLTMGQPLVILAPHAVEALVKQPPDRWLSNARMTHYQAMLLDTDRVQFGPVVALNPATLLPLPEKEAPHDCLEILAETHGTRPDLTDQPIPDADYTWYTDGSSFLQEGQRRAGAAVTTETEVIWARALPAGTSAQRAELIALTQALKMAEGKKLNVYTDSRYAFATAHVHGEIYRRRGWLTSEGREIKNKNEILALLKALFLPKRLSIIHCPGHQKGNSAEARGNRMADQAAREAAMKAVLETSTLLAGKRTADGSEFEKRTADGSEFESPKKKAKVE

SEQ ID NO: 969 - protein, 2094 aa, synthetic construct
MPAAKRVKLDGGDKKYSIGLDIGTNSVGWAVITDEYKVPSKKFKVLGNTDRHSIKKNLIGALLFDSGETAEATRLKRTARRRYTRRKNRICYLQEIFSNEMAKVDDSFFHRLEESFLVEEDKKHERHPIFGNIVDEVAYHEKYPTIYHLRKKLVDSTDKADLRLIYLALAHMIKFRGHFLIEGDLNPDNSDVDKLFIQLVQTYNQLFEENPINASGVDAKAILSARLSKSRRLENLIAQLPGEKKNGLFGNLIALSLGLTPNFKSNFDLAEDAKLQLSKDTYDDDLDNLLAQIGDQYADLFLAAKNLSDAILLSDILRVNTEITKAPLSASMIKRYDEHHQDLTLLKALVRQQLPEKYKEIFFDQSKNGYAGYIDGGASQEEFYKFIKPILEKMDGTEELLVKLNREDLLRKQRTFDNGSIPHQIHLGELHAILRRQEDFYPFLKDNREKIEKILTFRIPYYVGPLARGNSRFAWMTRKSEETITPWNFEEVVDKGASAQSFIERMTNFDKNLPNEKVLPKHSLLYEYFTVYNELTKVKYVTEGMRKPAFLSGEQKKAIVDLLFKTNRKVTVKQLKEDYFKKIECFDSVEISGVEDRFNASLGTYHDLLKIIKDKDFLDNEENEDILEDIVLTLTLFEDREMIEERLKTYAHLFDDKVMKQLKRRRYTGWGRLSRKLINGIRDKQSGKTILDFLKSDGFANRNFMQLIHDDSLTFKEDIQKAQVSGQGDSLHEHIANLAGSPAIKKGILQTVKVVDELVKVMGRHKPENIVIEMARENQTTQKGQKNSRERMKRIEEGIKELGSQILKEHPVENTQLQNEKLYLYYLQNGRDMYVDQELDINRLSDYDVDHIVPQSFLKDDSIDNKVLTRSDKARGKSDNVPSEEVVKKMKNYWRQLLNAKLITQRKFDNLTKAERGGLSELDKAGFIKRQLVETRQITKHVAQILDSRMNTKYDENDKLIREVKVITLKSKLVSDFRKDFQFYKVREINNYHHAHDAYLNAVVGTALIKKYPKLESEFVYGDYKVYDVRKMIAKSEQEIGKATAKYFFYSNIMNFFKTEITLANGEIRKRPLIETNGETGEIVWDKGRDFATVRKVLSMPQVNIVKKTEVQTGGFSKESILPKRNSDKLIARKKDWDPKKYGGFDSPTVAYSVLVVAKVEKGKSKKLKSVKELLGITIMERSSFEKNPIDFLEAKGYKEVKKDLIIKLPKYSLFELENGRKRMLASAGELQKGNELALPSKYVNFLYLASHYEKLKGSPEDNEQKQLFVEQHKHYLDEIIEQISEFSKRVILADANLDKVLSAYNKHRDKPIREQAENIIHLFTLTNLGAPAAFKYFDTTIDRKRYTSTKEVLDATLIHQSITGLYETRIDLSQLGGDGGGGGGSSPAPGGTLNIEDEYRLHETSKEPDVPLGSTWLSDFPQAWAETGGMGLAVRQAPLIIPLKATSTPVSIKQYPMSQEARLGIKPHIQRLLDQGILVPCQSPWNTPLLPVKKPGTNDYRPVQDLREVNKRVEDIHPTVPNPYNLLSGLPPSHQWYTVLDLKDAFFCLRLHPTSQPLFAFEWRDPEMGISGQLTWTRLPQGFKNSPTLFNEALHRDLADFRIQHPDLILLQYVDDLLLAATSEQDCQRGTRALLQTLGNLGYRASAKKAQICQKQVKYLGYLLKEGQRWLTEARKETVMGQPTPKTPRQLREFLGTAGFCRLWIPGFAEMAAPLYPLTKPGTLFNWGPDQQKAYQEIKQALLTAPALGLPDLTKPFELFVDEKQGYAKGVLTQKLGPWRRPVAYLSKKLDPVAAGWPPCLRMVAAIAVLTKDAGKLTMGQPLVILAPHAVEALVKQPPDRWLSNARMTHYQAMLLDTDRVQFGPVVALNPATLLPLPEKEAPHDCLEILAETHGTRPDLTDQPIPDADYTWYTDGSSFLQEGQRRAGAAVTTETEVIWARALPAGTSAQRAELIALTQALKMAEGKKLNVYTDSRYAFATAHVHGEIYRRRGWLTSEGREIKNKNEILALLKALFLPKRLSIIHCPGHQKGNSAEARGNRMADQAAREAAMKAVLETSTLLAGKRTADGSEFEKRTADGSEFESPKKKAKVE

SEQ ID NO: 970 - protein, 2094 aa, synthetic construct
MPAAKRVKLDGGDKKYSIGLDIGTNSVGWAVITDEYKVPSKKFKVLGNTDRHSIKKNLIGALLFDSGETAEATRLKRTARRRYTRRKNRICYLQEIFSNEMAKVDDSFFHRLEESFLVEEDKKHERHPIFGNIVDEVAYHEKYPTIYHLRKKLVDSTDKADLRLIYLALAHMIKFRGHFLIEGDLNPDNSDVDKLFIQLVQTYNQLFEENPINASGVDAKAILSARLSKSRRLENLIAQLPGEKKNGLFGNLIALSLGLTPNFKSNFDLAEDAKLQLSKDTYDDDLDNLLAQIGDQYADLFLAAKNLSDAILLSDILRVNTEITKAPLSASMIKRYDEHHQDLTLLKALVRQQLPEKYKEIFFDQSKNGYAGYIDGGASQEEFYKFIKPILEKMDGTEELLVKLNREDLLRKQRTFDNGSIPHQIHLGELHAILRRQEDFYPFLKDNREKIEKILTFRIPYYVGPLARGNSRFAWMTRKSEETITPWNFEEVVDKGASAQSFIERMTNFDKNLPNEKVLPKHSLLYEYFTVYNELTKVKYVTEGMRKPAFLSGEQKKAIVDLLFKTNRKVTVKQLKEDYFKKIECFDSVEISGVEDRFNASLGTYHDLLKIIKDKDFLDNEENEDILEDIVLTLTLFEDREMIEERLKTYAHLFDDKVMKQLKRRRYTGWGRLSRKLINGIRDKQSGKTILDFLKSDGFANRNFMQLIHDDSLTFKEDIQKAQVSGQGDSLHEHIANLAGSPAIKKGILQTVKVVDELVKVMGRHKPENIVIEMARENQTTQKGQKNSRERMKRIEEGIKELGSQILKEHPVENTQLQNEKLYLYYLQNGRDMYVDQELDINRLSDYDVDHIVPQSFLKDDSIDNKVLTRSDKARGKSDNVPSEEVVKKMKNYWRQLLNAKLITQRKFDNLTKAERGGLSELDKAGFIKRQLVETRQITKHVAQILDSRMNTKYDENDKLIREVKVITLKSKLVSDFRKDFQFYKVREINNYHHAHDAYLNAVVGTALIKKYPKLESEFVYGDYKVYDVRKMIAKSEQEIGKATAKYFFYSNIMNFFKTEITLANGEIRKRPLIETNGETGEIVWDKGRDFATVRKVLSMPQVNIVKKTEVQTGGFSKESILPKRNSDKLIARKKDWDPKKYGGFDSPTVAYSVLVVAKVEKGKSKKLKSVKELLGITIMERSSFEKNPIDFLEAKGYKEVKKDLIIKLPKYSLFELENGRKRMLASAGELQKGNELALPSKYVNFLYLASHYEKLKGSPEDNEQKQLFVEQHKHYLDEIIEQISEFSKRVILADANLDKVLSAYNKHRDKPIREQAENIIHLFTLTNLGAPAAFKYFDTTIDRKRYTSTKEVLDATLIHQSITGLYETRIDLSQLGGDGGPAPGSSGGSGGTLNIEDEYRLHETSKEPDVPLGSTWLSDFPQAWAETGGMGLAVRQAPLIIPLKATSTPVSIKQYPMSQEARLGIKPHIQRLLDQGILVPCQSPWNTPLLPVKKPGTNDYRPVQDLREVNKRVEDIHPTVPNPYNLLSGLPPSHQWYTVLDLKDAFFCLRLHPTSQPLFAFEWRDPEMGISGQLTWTRLPQGFKNSPTLFNEALHRDLADFRIQHPDLILLQYVDDLLLAATSEQDCQRGTRALLQTLGNLGYRASAKKAQICQKQVKYLGYLLKEGQRWLTEARKETVMGQPTPKTPRQLREFLGTAGFCRLWIPGFAEMAAPLYPLTKPGTLFNWGPDQQKAYQEIKQALLTAPALGLPDLTKPFELFVDEKQGYAKGVLTQKLGPWRRPVAYLSKKLDPVAAGWPPCLRMVAAIAVLTKDAGKLTMGQPLVILAPHAVEALVKQPPDRWLSNARMTHYQAMLLDTDRVQFGPVVALNPATLLPLPEKEAPHDCLEILAETHGTRPDLTDQPIPDADYTWYTDGSSFLQEGQRRAGAAVTTETEVIWARALPAGTSAQRAELIALTQALKMAEGKKLNVYTDSRYAFATAHVHGEIYRRRGWLTSEGREIKNKNEILALLKALFLPKRLSIIHCPGHQKGNSAEARGNRMADQAAREAAMKAVLETSTLLAGKRTADGSEFEKRTADGSEFESPKKKAKVE

SEQ ID NO: 971 - protein, 2096 aa, synthetic construct
MPAAKRVKLDGGDKKYSIGLDIGTNSVGWAVITDEYKVPSKKFKVLGNTDRHSIKKNLIGALLFDSGETAEATRLKRTARRRYTRRKNRICYLQEIFSNEMAKVDDSFFHRLEESFLVEEDKKHERHPIFGNIVDEVAYHEKYPTIYHLRKKLVDSTDKADLRLIYLALAHMIKFRGHFLIEGDLNPDNSDVDKLFIQLVQTYNQLFEENPINASGVDAKAILSARLSKSRRLENLIAQLPGEKKNGLFGNLIALSLGLTPNFKSNFDLAEDAKLQLSKDTYDDDLDNLLAQIGDQYADLFLAAKNLSDAILLSDILRVNTEITKAPLSASMIKRYDEHHQDLTLLKALVRQQLPEKYKEIFFDQSKNGYAGYIDGGASQEEFYKFIKPILEKMDGTEELLVKLNREDLLRKQRTFDNGSIPHQIHLGELHAILRRQEDFYPFLKDNREKIEKILTFRIPYYVGPLARGNSRFAWMTRKSEETITPWNFEEVVDKGASAQSFIERMTNFDKNLPNEKVLPKHSLLYEYFTVYNELTKVKYVTEGMRKPAFLSGEQKKAIVDLLFKTNRKVTVKQLKEDYFKKIECFDSVEISGVEDRFNASLGTYHDLLKIIKDKDFLDNEENEDILEDIVLTLTLFEDREMIEERLKTYAHLFDDKVMKQLKRRRYTGWGRLSRKLINGIRDKQSGKTILDFLKSDGFANRNFMQLIHDDSLTFKEDIQKAQVSGQGDSLHEHIANLAGSPAIKKGILQTVKVVDELVKVMGRHKPENIVIEMARENQTTQKGQKNSRERMKRIEEGIKELGSQILKEHPVENTQLQNEKLYLYYLQNGRDMYVDQELDINRLSDYDVDHIVPQSFLKDDSIDNKVLTRSDKARGKSDNVPSEEVVKKMKNYWRQLLNAKLITQRKFDNLTKAERGGLSELDKAGFIKRQLVETRQITKHVAQILDSRMNTKYDENDKLIREVKVITLKSKLVSDFRKDFQFYKVREINNYHHAHDAYLNAVVGTALIKKYPKLESEFVYGDYKVYDVRKMIAKSEQEIGKATAKYFFYSNIMNFFKTEITLANGEIRKRPLIETNGETGEIVWDKGRDFATVRKVLSMPQVNIVKKTEVQTGGFSKESILPKRNSDKLIARKKDWDPKKYGGFDSPTVAYSVLVVAKVEKGKSKKLKSVKELLGITIMERSSFEKNPIDFLEAKGYKEVKKDLIIKLPKYSLFELENGRKRMLASAGELQKGNELALPSKYVNFLYLASHYEKLKGSPEDNEQKQLFVEQHKHYLDEIIEQISEFSKRVILADANLDKVLSAYNKHRDKPIREQAENIIHLFTLTNLGAPAAFKYFDTTIDRKRYTSTKEVLDATLIHQSITGLYETRIDLSQLGGDGGGSSGGGEAAAKGGTLNIEDEYRLHETSKEPDVPLGSTWLSDFPQAWAETGGMGLAVRQAPLIIPLKATSTPVSIKQYPMSQEARLGIKPHIQRLLDQGILVPCQSPWNTPLLPVKKPGTNDYRPVQDLREVNKRVEDIHPTVPNPYNLLSGLPPSHQWYTVLDLKDAFFCLRLHPTSQPLFAFEWRDPEMGISGQLTWTRLPQGFKNSPTLFNEALHRDLADFRIQHPDLILLQYVDDLLLAATSEQDCQRGTRALLQTLGNLGYRASAKKAQICQKQVKYLGYLLKEGQRWLTEARKETVMGQPTPKTPRQLREFLGTAGFCRLWIPGFAEMAAPLYPLTKPGTLFNWGPDQQKAYQEIKQALLTAPALGLPDLTKPFELFVDEKQGYAKGVLTQKLGPWRRPVAYLSKKLDPVAAGWPPCLRMVAAIAVLTKDAGKLTMGQPLVILAPHAVEALVKQPPDRWLSNARMTHYQAMLLDTDRVQFGPVVALNPATLLPLPEKEAPHDCLEILAETHGTRPDLTDQPIPDADYTWYTDGSSFLQEGQRRAGAAVTTETEVIWARALPAGTSAQRAELIALTQALKMAEGKKLNVYTDSRYAFATAHVHGEIYRRRGWLTSEGREIKNKNEILALLKALFLPKRLSIIHCPGHQKGNSAEARGNRMADQAAREAAMKAVLETSTLLAGKRTADGSEFEKRTADGSEFESPKKKAKVE

SEQ ID NO: 972 - protein, 2100 aa, synthetic construct
MPAAKRVKLDGGDKKYSIGLDIGTNSVGWAVITDEYKVPSKKFKVLGNTDRHSIKKNLIGALLFDSGETAEATRLKRTARRRYTRRKNRICYLQEIFSNEMAKVDDSFFHRLEESFLVEEDKKHERHPIFGNIVDEVAYHEKYPTIYHLRKKLVDSTDKADLRLIYLALAHMIKFRGHFLIEGDLNPDNSDVDKLFIQLVQTYNQLFEENPINASGVDAKAILSARLSKSRRLENLIAQLPGEKKNGLFGNLIALSLGLTPNFKSNFDLAEDAKLQLSKDTYDDDLDNLLAQIGDQYADLFLAAKNLSDAILLSDILRVNTEITKAPLSASMIKRYDEHHQDLTLLKALVRQQLPEKYKEIFFDQSKNGYAGYIDGGASQEEFYKFIKPILEKMDGTEELLVKLNREDLLRKQRTFDNGSIPHQIHLGELHAILRRQEDFYPFLKDNREKIEKILTFRIPYYVGPLARGNSRFAWMTRKSEETITPWNFEEVVDKGASAQSFIERMTNFDKNLPNEKVLPKHSLLYEYFTVYNELTKVKYVTEGMRKPAFLSGEQKKAIVDLLFKTNRKVTVKQLKEDYFKKIECFDSVEISGVEDRFNASLGTYHDLLKIIKDKDFLDNEENEDILEDIVLTLTLFEDREMIEERLKTYAHLFDDKVMKQLKRRRYTGWGRLSRKLINGIRDKQSGKTILDFLKSDGFANRNFMQLIHDDSLTFKEDIQKAQVSGQGDSLHEHIANLAGSPAIKKGILQTVKVVDELVKVMGRHKPENIVIEMARENQTTQKGQKNSRERMKRIEEGIKELGSQILKEHPVENTQLQNEKLYLYYLQNGRDMYVDQELDINRLSDYDVDHIVPQSFLKDDSIDNKVLTRSDKARGKSDNVPSEEVVKKMKNYWRQLLNAKLITQRKFDNLTKAERGGLSELDKAGFIKRQLVETRQITKHVAQILDSRMNTKYDENDKLIREVKVITLKSKLVSDFRKDFQFYKVREINNYHHAHDAYLNAVVGTALIKKYPKLESEFVYGDYKVYDVRKMIAKSEQEIGKATAKYFFYSNIMNFFKTEITLANGEIRKRPLIETNGETGEIVWDKGRDFATVRKVLSMPQVNIVKKTEVQTGGFSKESILPKRNSDKLIARKKDWDPKKYGGFDSPTVAYSVLVVAKVEKGKSKKLKSVKELLGITIMERSSFEKNPIDFLEAKGYKEVKKDLIIKLPKYSLFELENGRKRMLASAGELQKGNELALPSKYVNFLYLASHYEKLKGSPEDNEQKQLFVEQHKHYLDEIIEQISEFSKRVILADANLDKVLSAYNKHRDKPIREQAENIIHLFTLTNLGAPAAFKYFDTTIDRKRYTSTKEVLDATLIHQSITGLYETRIDLSQLGGDGGGGGGSEAAAKGGGGSGGTLNIEDEYRLHETSKEPDVPLGSTWLSDFPQAWAETGGMGLAVRQAPLIIPLKATSTPVSIKQYPMSQEARLGIKPHIQRLLDQGILVPCQSPWNTPLLPVKKPGTNDYRPVQDLREVNKRVEDIHPTVPNPYNLLSGLPPSHQWYTVLDLKDAFFCLRLHPTSQPLFAFEWRDPEMGISGQLTWTRLPQGFKNSPTLFNEALHRDLADFRIQHPDLILLQYVDDLLLAATSEQDCQRGTRALLQTLGNLGYRASAKKAQICQKQVKYLGYLLKEGQRWLTEARKETVMGQPTPKTPRQLREFLGTAGFCRLWIPGFAEMAAPLYPLTKPGTLFNWGPDQQKAYQEIKQALLTAPALGLPDLTKPFELFVDEKQGYAKGVLTQKLGPWRRPVAYLSKKLDPVAAGWPPCLRMVAAIAVLTKDAGKLTMGQPLVILAPHAVEALVKQPPDRWLSNARMTHYQAMLLDTDRVQFGPVVALNPATLLPLPEKEAPHDCLEILAETHGTRPDLTDQPIPDADYTWYTDGSSFLQEGQRRAGAAVTTETEVIWARALPAGTSAQRAELIALTQALKMAEGKKLNVYTDSRYAFATAHVHGEIYRRRGWLTSEGREIKNKNEILALLKALFLPKRLSIIHCPGHQKGNSAEARGNRMADQAAREAAMKAVLETSTLLAGKRTADGSEFEKRTADGSEFESPKKKAKVE

SEQ ID NO: 973 - protein, 2096 aa, synthetic construct
MPAAKRVKLDGGDKKYSIGLDIGTNSVGWAVITDEYKVPSKKFKVLGNTDRHSIKKNLIGALLFDSGETAEATRLKRTARRRYTRRKNRICYLQEIFSNEMAKVDDSFFHRLEESFLVEEDKKHERHPIFGNIVDEVAYHEKYPTIYHLRKKLVDSTDKADLRLIYLALAHMIKFRGHFLIEGDLNPDNSDVDKLFIQLVQTYNQLFEENPINASGVDAKAILSARLSKSRRLENLIAQLPGEKKNGLFGNLIALSLGLTPNFKSNFDLAEDAKLQLSKDTYDDDLDNLLAQIGDQYADLFLAAKNLSDAILLSDILRVNTEITKAPLSASMIKRYDEHHQDLTLLKALVRQQLPEKYKEIFFDQSKNGYAGYIDGGASQEEFYKFIKPILEKMDGTEELLVKLNREDLLRKQRTFDNGSIPHQIHLGELHAILRRQEDFYPFLKDNREKIEKILTFRIPYYVGPLARGNSRFAWMTRKSEETITPWNFEEVVDKGASAQSFIERMTNFDKNLPNEKVLPKHSLLYEYFTVYNELTKVKYVTEGMRKPAFLSGEQKKAIVDLLFKTNRKVTVKQLKEDYFKKIECFDSVEISGVEDRFNASLGTYHDLLKIIKDKDFLDNEENEDILEDIVLTLTLFEDREMIEERLKTYAHLFDDKVMKQLKRRRYTGWGRLSRKLINGIRDKQSGKTILDFLKSDGFANRNFMQLIHDDSLTFKEDIQKAQVSGQGDSLHEHIANLAGSPAIKKGILQTVKVVDELVKVMGRHKPENIVIEMARENQTTQKGQKNSRERMKRIEEGIKELGSQILKEHPVENTQLQNEKLYLYYLQNGRDMYVDQELDINRLSDYDVDHIVPQSFLKDDSIDNKVLTRSDKARGKSDNVPSEEVVKKMKNYWRQLLNAKLITQRKFDNLTKAERGGLSELDKAGFIKRQLVETRQITKHVAQILDSRMNTKYDENDKLIREVKVITLKSKLVSDFRKDFQFYKVREINNYHHAHDAYLNAVVGTALIKKYPKLESEFVYGDYKVYDVRKMIAKSEQEIGKATAKYFFYSNIMNFFKTEITLANGEIRKRPLIETNGETGEIVWDKGRDFATVRKVLSMPQVNIVKKTEVQTGGFSKESILPKRNSDKLIARKKDWDPKKYGGFDSPTVAYSVLVVAKVEKGKSKKLKSVKELLGITIMERSSFEKNPIDFLEAKGYKEVKKDLIIKLPKYSLFELENGRKRMLASAGELQKGNELALPSKYVNFLYLASHYEKLKGSPEDNEQKQLFVEQHKHYLDEIIEQISEFSKRVILADANLDKVLSAYNKHRDKPIREQAENIIHLFTLTNLGAPAAFKYFDTTIDRKRYTSTKEVLDATLIHQSITGLYETRIDLSQLGGDGGGGGGGSEAAAKGGTLNIEDEYRLHETSKEPDVPLGSTWLSDFPQAWAETGGMGLAVRQAPLIIPLKATSTPVSIKQYPMSQEARLGIKPHIQRLLDQGILVPCQSPWNTPLLPVKKPGTNDYRPVQDLREVNKRVEDIHPTVPNPYNLLSGLPPSHQWYTVLDLKDAFFCLRLHPTSQPLFAFEWRDPEMGISGQLTWTRLPQGFKNSPTLFNEALHRDLADFRIQHPDLILLQYVDDLLLAATSEQDCQRGTRALLQTLGNLGYRASAKKAQICQKQVKYLGYLLKEGQRWLTEARKETVMGQPTPKTPRQLREFLGTAGFCRLWIPGFAEMAAPLYPLTKPGTLFNWGPDQQKAYQEIKQALLTAPALGLPDLTKPFELFVDEKQGYAKGVLTQKLGPWRRPVAYLSKKLDPVAAGWPPCLRMVAAIAVLTKDAGKLTMGQPLVILAPHAVEALVKQPPDRWLSNARMTHYQAMLLDTDRVQFGPVVALNPATLLPLPEKEAPHDCLEILAETHGTRPDLTDQPIPDADYTWYTDGSSFLQEGQRRAGAAVTTETEVIWARALPAGTSAQRAELIALTQALKMAEGKKLNVYTDSRYAFATAHVHGEIYRRRGWLTSEGREIKNKNEILALLKALFLPKRLSIIHCPGHQKGNSAEARGNRMADQAAREAAMKAVLETSTLLAGKRTADGSEFEKRTADGSEFESPKKKAKVE

SEQ ID NO: 974 - protein, 2091 aa, synthetic construct
MPAAKRVKLDGGDKKYSIGLDIGTNSVGWAVITDEYKVPSKKFKVLGNTDRHSIKKNLIGALLFDSGETAEATRLKRTARRRYTRRKNRICYLQEIFSNEMAKVDDSFFHRLEESFLVEEDKKHERHPIFGNIVDEVAYHEKYPTIYHLRKKLVDSTDKADLRLIYLALAHMIKFRGHFLIEGDLNPDNSDVDKLFIQLVQTYNQLFEENPINASGVDAKAILSARLSKSRRLENLIAQLPGEKKNGLFGNLIALSLGLTPNFKSNFDLAEDAKLQLSKDTYDDDLDNLLAQIGDQYADLFLAAKNLSDAILLSDILRVNTEITKAPLSASMIKRYDEHHQDLTLLKALVRQQLPEKYKEIFFDQSKNGYAGYIDGGASQEEFYKFIKPILEKMDGTEELLVKLNREDLLRKQRTFDNGSIPHQIHLGELHAILRRQEDFYPFLKDNREKIEKILTFRIPYYVGPLARGNSRFAWMTRKSEETITPWNFEEVVDKGASAQSFIERMTNFDKNLPNEKVLPKHSLLYEYFTVYNELTKVKYVTEGMRKPAFLSGEQKKAIVDLLFKTNRKVTVKQLKEDYFKKIECFDSVEISGVEDRFNASLGTYHDLLKIIKDKDFLDNEENEDILEDIVLTLTLFEDREMIEERLKTYAHLFDDKVMKQLKRRRYTGWGRLSRKLINGIRDKQSGKTILDFLKSDGFANRNFMQLIHDDSLTFKEDIQKAQVSGQGDSLHEHIANLAGSPAIKKGILQTVKVVDELVKVMGRHKPENIVIEMARENQTTQKGQKNSRERMKRIEEGIKELGSQILKEHPVENTQLQNEKLYLYYLQNGRDMYVDQELDINRLSDYDVDHIVPQSFLKDDSIDNKVLTRSDKARGKSDNVPSEEVVKKMKNYWRQLLNAKLITQRKFDNLTKAERGGLSELDKAGFIKRQLVETRQITKHVAQILDSRMNTKYDENDKLIREVKVITLKSKLVSDFRKDFQFYKVREINNYHHAHDAYLNAVVGTALIKKYPKLESEFVYGDYKVYDVRKMIAKSEQEIGKATAKYFFYSNIMNFFKTEITLANGEIRKRPLIETNGETGEIVWDKGRDFATVRKVLSMPQVNIVKKTEVQTGGFSKESILPKRNSDKLIARKKDWDPKKYGGFDSPTVAYSVLVVAKVEKGKSKKLKSVKELLGITIMERSSFEKNPIDFLEAKGYKEVKKDLIIKLPKYSLFELENGRKRMLASAGELQKGNELALPSKYVNFLYLASHYEKLKGSPEDNEQKQLFVEQHKHYLDEIIEQISEFSKRVILADANLDKVLSAYNKHRDKPIREQAENIIHLFTLTNLGAPAAFKYFDTTIDRKRYTSTKEVLDATLIHQSITGLYETRIDLSQLGGDGGGGGGGSGGTLNIEDEYRLHETSKEPDVPLGSTWLSDFPQAWAETGGMGLAVRQAPLIIPLKATSTPVSIKQYPMSQEARLGIKPHIQRLLDQGILVPCQSPWNTPLLPVKKPGTNDYRPVQDLREVNKRVEDIHPTVPNPYNLLSGLPPSHQWYTVLDLKDAFFCLRLHPTSQPLFAFEWRDPEMGISGQLTWTRLPQGFKNSPTLFNEALHRDLADFRIQHPDLILLQYVDDLLLAATSEQDCQRGTRALLQTLGNLGYRASAKKAQICQKQVKYLGYLLKEGQRWLTEARKETVMGQPTPKTPRQLREFLGTAGFCRLWIPGFAEMAAPLYPLTKPGTLFNWGPDQQKAYQEIKQALLTAPALGLPDLTKPFELFVDEKQGYAKGVLTQKLGPWRRPVAYLSKKLDPVAAGWPPCLRMVAAIAVLTKDAGKLTMGQPLVILAPHAVEALVKQPPDRWLSNARMTHYQAMLLDTDRVQFGPVVALNPATLLPLPEKEAPHDCLEILAETHGTRPDLTDQPIPDADYTWYTDGSSFLQEGQRRAGAAVTTETEVIWARALPAGTSAQRAELIALTQALKMAEGKKLNVYTDSRYAFATAHVHGEIYRRRGWLTSEGREIKNKNEILALLKALFLPKRLSIIHCPGHQKGNSAEARGNRMADQAAREAAMKAVLETSTLLAGKRTADGSEFEKRTADGSEFESPKKKAKVE

SEQ ID NO: 975 - protein, 2096 aa, synthetic construct
MPAAKRVKLDGGDKKYSIGLDIGTNSVGWAVITDEYKVPSKKFKVLGNTDRHSIKKNLIGALLFDSGETAEATRLKRTARRRYTRRKNRICYLQEIFSNEMAKVDDSFFHRLEESFLVEEDKKHERHPIFGNIVDEVAYHEKYPTIYHLRKKLVDSTDKADLRLIYLALAHMIKFRGHFLIEGDLNPDNSDVDKLFIQLVQTYNQLFEENPINASGVDAKAILSARLSKSRRLENLIAQLPGEKKNGLFGNLIALSLGLTPNFKSNFDLAEDAKLQLSKDTYDDDLDNLLAQIGDQYADLFLAAKNLSDAILLSDILRVNTEITKAPLSASMIKRYDEHHQDLTLLKALVRQQLPEKYKEIFFDQSKNGYAGYIDGGASQEEFYKFIKPILEKMDGTEELLVKLNREDLLRKQRTFDNGSIPHQIHLGELHAILRRQEDFYPFLKDNREKIEKILTFRIPYYVGPLARGNSRFAWMTRKSEETITPWNFEEVVDKGASAQSFIERMTNFDKNLPNEKVLPKHSLLYEYFTVYNELTKVKYVTEGMRKPAFLSGEQKKAIVDLLFKTNRKVTVKQLKEDYFKKIECFDSVEISGVEDRFNASLGTYHDLLKIIKDKDFLDNEENEDILEDIVLTLTLFEDREMIEERLKTYAHLFDDKVMKQLKRRRYTGWGRLSRKLINGIRDKQSGKTILDFLKSDGFANRNFMQLIHDDSLTFKEDIQKAQVSGQGDSLHEHIANLAGSPAIKKGILQTVKVVDELVKVMGRHKPENIVIEMARENQTTQKGQKNSRERMKRIEEGIKELGSQILKEHPVENTQLQNEKLYLYYLQNGRDMYVDQELDINRLSDYDVDHIVPQSFLKDDSIDNKVLTRSDKARGKSDNVPSEEVVKKMKNYWRQLLNAKLITQRKFDNLTKAERGGLSELDKAGFIKRQLVETRQITKHVAQILDSRMNTKYDENDKLIREVKVITLKSKLVSDFRKDFQFYKVREINNYHHAHDAYLNAVVGTALIKKYPKLESEFVYGDYKVYDVRKMIAKSEQEIGKATAKYFFYSNIMNFFKTEITLANGEIRKRPLIETNGETGEIVWDKGRDFATVRKVLSMPQVNIVKKTEVQTGGFSKESILPKRNSDKLIARKKDWDPKKYGGFDSPTVAYSVLVVAKVEKGKSKKLKSVKELLGITIMERSSFEKNPIDFLEAKGYKEVKKDLIIKLPKYSLFELENGRKRMLASAGELQKGNELALPSKYVNFLYLASHYEKLKGSPEDNEQKQLFVEQHKHYLDEIIEQISEFSKRVILADANLDKVLSAYNKHRDKPIREQAENIIHLFTLTNLGAPAAFKYFDTTIDRKRYTSTKEVLDATLIHQSITGLYETRIDLSQLGGDGGGSSGGSEAAAKGGTLNIEDEYRLHETSKEPDVPLGSTWLSDFPQAWAETGGMGLAVRQAPLIIPLKATSTPVSIKQYPMSQEARLGIKPHIQRLLDQGILVPCQSPWNTPLLPVKKPGTNDYRPVQDLREVNKRVEDIHPTVPNPYNLLSGLPPSHQWYTVLDLKDAFFCLRLHPTSQPLFAFEWRDPEMGISGQLTWTRLPQGFKNSPTLFNEALHRDLADFRIQHPDLILLQYVDDLLLAATSEQDCQRGTRALLQTLGNLGYRASAKKAQICQKQVKYLGYLLKEGQRWLTEARKETVMGQPTPKTPRQLREFLGTAGFCRLWIPGFAEMAAPLYPLTKPGTLFNWGPDQQKAYQEIKQALLTAPALGLPDLTKPFELFVDEKQGYAKGVLTQKLGPWRRPVAYLSKKLDPVAAGWPPCLRMVAAIAVLTKDAGKLTMGQPLVILAPHAVEALVKQPPDRWLSNARMTHYQAMLLDTDRVQFGPVVALNPATLLPLPEKEAPHDCLEILAETHGTRPDLTDQPIPDADYTWYTDGSSFLQEGQRRAGAAVTTETEVIWARALPAGTSAQRAELIALTQALKMAEGKKLNVYTDSRYAFATAHVHGEIYRRRGWLTSEGREIKNKNEILALLKALFLPKRLSIIHCPGHQKGNSAEARGNRMADQAAREAAMKAVLETSTLLAGKRTADGSEFEKRTADGSEFESPKKKAKVE

SEQ ID NO: 976 - protein, 2115 aa, synthetic construct
MPAAKRVKLDGGDKKYSIGLDIGTNSVGWAVITDEYKVPSKKFKVLGNTDRHSIKKNLIGALLFDSGETAEATRLKRTARRRYTRRKNRICYLQEIFSNEMAKVDDSFFHRLEESFLVEEDKKHERHPIFGNIVDEVAYHEKYPTIYHLRKKLVDSTDKADLRLIYLALAHMIKFRGHFLIEGDLNPDNSDVDKLFIQLVQTYNQLFEENPINASGVDAKAILSARLSKSRRLENLIAQLPGEKKNGLFGNLIALSLGLTPNFKSNFDLAEDAKLQLSKDTYDDDLDNLLAQIGDQYADLFLAAKNLSDAILLSDILRVNTEITKAPLSASMIKRYDEHHQDLTLLKALVRQQLPEKYKEIFFDQSKNGYAGYIDGGASQEEFYKFIKPILEKMDGTEELLVKLNREDLLRKQRTFDNGSIPHQIHLGELHAILRRQEDFYPFLKDNREKIEKILTFRIPYYVGPLARGNSRFAWMTRKSEETITPWNFEEVVDKGASAQSFIERMTNFDKNLPNEKVLPKHSLLYEYFTVYNELTKVKYVTEGMRKPAFLSGEQKKAIVDLLFKTNRKVTVKQLKEDYFKKIECFDSVEISGVEDRFNASLGTYHDLLKIIKDKDFLDNEENEDILEDIVLTLTLFEDREMIEERLKTYAHLFDDKVMKQLKRRRYTGWGRLSRKLINGIRDKQSGKTILDFLKSDGFANRNFMQLIHDDSLTFKEDIQKAQVSGQGDSLHEHIANLAGSPAIKKGILQTVKVVDELVKVMGRHKPENIVIEMARENQTTQKGQKNSRERMKRIEEGIKELGSQILKEHPVENTQLQNEKLYLYYLQNGRDMYVDQELDINRLSDYDVDHIVPQSFLKDDSIDNKVLTRSDKARGKSDNVPSEEVVKKMKNYWRQLLNAKLITQRKFDNLTKAERGGLSELDKAGFIKRQLVETRQITKHVAQILDSRMNTKYDENDKLIREVKVITLKSKLVSDFRKDFQFYKVREINNYHHAHDAYLNAVVGTALIKKYPKLESEFVYGDYKVYDVRKMIAKSEQEIGKATAKYFFYSNIMNFFKTEITLANGEIRKRPLIETNGETGEIVWDKGRDFATVRKVLSMPQVNIVKKTEVQTGGFSKESILPKRNSDKLIARKKDWDPKKYGGFDSPTVAYSVLVVAKVEKGKSKKLKSVKELLGITIMERSSFEKNPIDFLEAKGYKEVKKDLIIKLPKYSLFELENGRKRMLASAGELQKGNELALPSKYVNFLYLASHYEKLKGSPEDNEQKQLFVEQHKHYLDEIIEQISEFSKRVILADANLDKVLSAYNKHRDKPIREQAENIIHLFTLTNLGAPAAFKYFDTTIDRKRYTSTKEVLDATLIHQSITGLYETRIDLSQLGGDGGGGGGSGGGGSGGGGSGGGGSGGGGSGGGGSGGTLNIEDEYRLHETSKEPDVPLGSTWLSDFPQAWAETGGMGLAVRQAPLIIPLKATSTPVSIKQYPMSQEARLGIKPHIQRLLDQGILVPCQSPWNTPLLPVKKPGTNDYRPVQDLREVNKRVEDIHPTVPNPYNLLSGLPPSHQWYTVLDLKDAFFCLRLHPTSQPLFAFEWRDPEMGISGQLTWTRLPQGFKNSPTLFNEALHRDLADFRIQHPDLILLQYVDDLLLAATSEQDCQRGTRALLQTLGNLGYRASAKKAQICQKQVKYLGYLLKEGQRWLTEARKETVMGQPTPKTPRQLREFLGTAGFCRLWIPGFAEMAAPLYPLTKPGTLFNWGPDQQKAYQEIKQALLTAPALGLPDLTKPFELFVDEKQGYAKGVLTQKLGPWRRPVAYLSKKLDPVAAGWPPCLRMVAAIAVLTKDAGKLTMGQPLVILAPHAVEALVKQPPDRWLSNARMTHYQAMLLDTDRVQFGPVVALNPATLLPLPEKEAPHDCLEILAETHGTRPDLTDQPIPDADYTWYTDGSSFLQEGQRRAGAAVTTETEVIWARALPAGTSAQRAELIALTQALKMAEGKKLNVYTDSRYAFATAHVHGEIYRRRGWLTSEGREIKNKNEILALLKALFLPKRLSIIHCPGHQKGNSAEARGNRMADQAAREAAMKAVLETSTLLAGKRTADGSEFEKRTADGSEFESPKKKAKVE

SEQ ID NO: 977 - protein, 2105 aa, synthetic construct
MPAAKRVKLDGGDKKYSIGLDIGTNSVGWAVITDEYKVPSKKFKVLGNTDRHSIKKNLIGALLFDSGETAEATRLKRTARRRYTRRKNRICYLQEIFSNEMAKVDDSFFHRLEESFLVEEDKKHERHPIFGNIVDEVAYHEKYPTIYHLRKKLVDSTDKADLRLIYLALAHMIKFRGHFLIEGDLNPDNSDVDKLFIQLVQTYNQLFEENPINASGVDAKAILSARLSKSRRLENLIAQLPGEKKNGLFGNLIALSLGLTPNFKSNFDLAEDAKLQLSKDTYDDDLDNLLAQIGDQYADLFLAAKNLSDAILLSDILRVNTEITKAPLSASMIKRYDEHHQDLTLLKALVRQQLPEKYKEIFFDQSKNGYAGYIDGGASQEEFYKFIKPILEKMDGTEELLVKLNREDLLRKQRTFDNGSIPHQIHLGELHAILRRQEDFYPFLKDNREKIEKILTFRIPYYVGPLARGNSRFAWMTRKSEETITPWNFEEVVDKGASAQSFIERMTNFDKNLPNEKVLPKHSLLYEYFTVYNELTKVKYVTEGMRKPAFLSGEQKKAIVDLLFKTNRKVTVKQLKEDYFKKIECFDSVEISGVEDRFNASLGTYHDLLKIIKDKDFLDNEENEDILEDIVLTLTLFEDREMIEERLKTYAHLFDDKVMKQLKRRRYTGWGRLSRKLINGIRDKQSGKTILDFLKSDGFANRNFMQLIHDDSLTFKEDIQKAQVSGQGDSLHEHIANLAGSPAIKKGILQTVKVVDELVKVMGRHKPENIVIEMARENQTTQKGQKNSRERMKRIEEGIKELGSQILKEHPVENTQLQNEKLYLYYLQNGRDMYVDQELDINRLSDYDVDHIVPQSFLKDDSIDNKVLTRSDKARGKSDNVPSEEVVKKMKNYWRQLLNAKLITQRKFDNLTKAERGGLSELDKAGFIKRQLVETRQITKHVAQILDSRMNTKYDENDKLIREVKVITLKSKLVSDFRKDFQFYKVREINNYHHAHDAYLNAVVGTALIKKYPKLESEFVYGDYKVYDVRKMIAKSEQEIGKATAKYFFYSNIMNFFKTEITLANGEIRKRPLIETNGETGEIVWDKGRDFATVRKVLSMPQVNIVKKTEVQTGGFSKESILPKRNSDKLIARKKDWDPKKYGGFDSPTVAYSVLVVAKVEKGKSKKLKSVKELLGITIMERSSFEKNPIDFLEAKGYKEVKKDLIIKLPKYSLFELENGRKRMLASAGELQKGNELALPSKYVNFLYLASHYEKLKGSPEDNEQKQLFVEQHKHYLDEIIEQISEFSKRVILADANLDKVLSAYNKHRDKPIREQAENIIHLFTLTNLGAPAAFKYFDTTIDRKRYTSTKEVLDATLIHQSITGLYETRIDLSQLGGDGGGGGGSGGGGSGGGGSGGGGSGGTLNIEDEYRLHETSKEPDVPLGSTWLSDFPQAWAETGGMGLAVRQAPLIIPLKATSTPVSIKQYPMSQEARLGIKPHIQRLLDQGILVPCQSPWNTPLLPVKKPGTNDYRPVQDLREVNKRVEDIHPTVPNPYNLLSGLPPSHQWYTVLDLKDAFFCLRLHPTSQPLFAFEWRDPEMGISGQLTWTRLPQGFKNSPTLFNEALHRDLADFRIQHPDLILLQYVDDLLLAATSEQDCQRGTRALLQTLGNLGYRASAKKAQICQKQVKYLGYLLKEGQRWLTEARKETVMGQPTPKTPRQLREFLGTAGFCRLWIPGFAEMAAPLYPLTKPGTLFNWGPDQQKAYQEIKQALLTAPALGLPDLTKPFELFVDEKQGYAKGVLTQKLGPWRRPVAYLSKKLDPVAAGWPPCLRMVAAIAVLTKDAGKLTMGQPLVILAPHAVEALVKQPPDRWLSNARMTHYQAMLLDTDRVQFGPVVALNPATLLPLPEKEAPHDCLEILAETHGTRPDLTDQPIPDADYTWYTDGSSFLQEGQRRAGAAVTTETEVIWARALPAGTSAQRAELIALTQALKMAEGKKLNVYTDSRYAFATAHVHGEIYRRRGWLTSEGREIKNKNEILALLKALFLPKRLSIIHCPGHQKGNSAEARGNRMADQAAREAAMKAVLETSTLLAGKRTADGSEFEKRTADGSEFESPKKKAKVE

SEQ ID NO: 978 - protein, 2094 aa, synthetic construct
MPAAKRVKLDGGDKKYSIGLDIGTNSVGWAVITDEYKVPSKKFKVLGNTDRHSIKKNLIGALLFDSGETAEATRLKRTARRRYTRRKNRICYLQEIFSNEMAKVDDSFFHRLEESFLVEEDKKHERHPIFGNIVDEVAYHEKYPTIYHLRKKLVDSTDKADLRLIYLALAHMIKFRGHFLIEGDLNPDNSDVDKLFIQLVQTYNQLFEENPINASGVDAKAILSARLSKSRRLENLIAQLPGEKKNGLFGNLIALSLGLTPNFKSNFDLAEDAKLQLSKDTYDDDLDNLLAQIGDQYADLFLAAKNLSDAILLSDILRVNTEITKAPLSASMIKRYDEHHQDLTLLKALVRQQLPEKYKEIFFDQSKNGYAGYIDGGASQEEFYKFIKPILEKMDGTEELLVKLNREDLLRKQRTFDNGSIPHQIHLGELHAILRRQEDFYPFLKDNREKIEKILTFRIPYYVGPLARGNSRFAWMTRKSEETITPWNFEEVVDKGASAQSFIERMTNFDKNLPNEKVLPKHSLLYEYFTVYNELTKVKYVTEGMRKPAFLSGEQKKAIVDLLFKTNRKVTVKQLKEDYFKKIECFDSVEISGVEDRFNASLGTYHDLLKIIKDKDFLDNEENEDILEDIVLTLTLFEDREMIEERLKTYAHLFDDKVMKQLKRRRYTGWGRLSRKLINGIRDKQSGKTILDFLKSDGFANRNFMQLIHDDSLTFKEDIQKAQVSGQGDSLHEHIANLAGSPAIKKGILQTVKVVDELVKVMGRHKPENIVIEMARENQTTQKGQKNSRERMKRIEEGIKELGSQILKEHPVENTQLQNEKLYLYYLQNGRDMYVDQELDINRLSDYDVDHIVPQSFLKDDSIDNKVLTRSDKARGKSDNVPSEEVVKKMKNYWRQLLNAKLITQRKFDNLTKAERGGLSELDKAGFIKRQLVETRQITKHVAQILDSRMNTKYDENDKLIREVKVITLKSKLVSDFRKDFQFYKVREINNYHHAHDAYLNAVVGTALIKKYPKLESEFVYGDYKVYDVRKMIAKSEQEIGKATAKYFFYSNIMNFFKTEITLANGEIRKRPLIETNGETGEIVWDKGRDFATVRKVLSMPQVNIVKKTEVQTGGFSKESILPKRNSDKLIARKKDWDPKKYGGFDSPTVAYSVLVVAKVEKGKSKKLKSVKELLGITIMERSSFEKNPIDFLEAKGYKEVKKDLIIKLPKYSLFELENGRKRMLASAGELQKGNELALPSKYVNFLYLASHYEKLKGSPEDNEQKQLFVEQHKHYLDEIIEQISEFSKRVILADANLDKVLSAYNKHRDKPIREQAENIIHLFTLTNLGAPAAFKYFDTTIDRKRYTSTKEVLDATLIHQSITGLYETRIDLSQLGGDGGPAPAPAPAPGGTLNIEDEYRLHETSKEPDVPLGSTWLSDFPQAWAETGGMGLAVRQAPLIIPLKATSTPVSIKQYPMSQEARLGIKPHIQRLLDQGILVPCQSPWNTPLLPVKKPGTNDYRPVQDLREVNKRVEDIHPTVPNPYNLLSGLPPSHQWYTVLDLKDAFFCLRLHPTSQPLFAFEWRDPEMGISGQLTWTRLPQGFKNSPTLFNEALHRDLADFRIQHPDLILLQYVDDLLLAATSEQDCQRGTRALLQTLGNLGYRASAKKAQICQKQVKYLGYLLKEGQRWLTEARKETVMGQPTPKTPRQLREFLGTAGFCRLWIPGFAEMAAPLYPLTKPGTLFNWGPDQQKAYQEIKQALLTAPALGLPDLTKPFELFVDEKQGYAKGVLTQKLGPWRRPVAYLSKKLDPVAAGWPPCLRMVAAIAVLTKDAGKLTMGQPLVILAPHAVEALVKQPPDRWLSNARMTHYQAMLLDTDRVQFGPVVALNPATLLPLPEKEAPHDCLEILAETHGTRPDLTDQPIPDADYTWYTDGSSFLQEGQRRAGAAVTTETEVIWARALPAGTSAQRAELIALTQALKMAEGKKLNVYTDSRYAFATAHVHGEIYRRRGWLTSEGREIKNKNEILALLKALFLPKRLSIIHCPGHQKGNSAEARGNRMADQAAREAAMKAVLETSTLLAGKRTADGSEFEKRTADGSEFESPKKKAKVE

SEQ ID NO: 979 - protein, 2096 aa, synthetic construct
MPAAKRVKLDGGDKKYSIGLDIGTNSVGWAVITDEYKVPSKKFKVLGNTDRHSIKKNLIGALLFDSGETAEATRLKRTARRRYTRRKNRICYLQEIFSNEMAKVDDSFFHRLEESFLVEEDKKHERHPIFGNIVDEVAYHEKYPTIYHLRKKLVDSTDKADLRLIYLALAHMIKFRGHFLIEGDLNPDNSDVDKLFIQLVQTYNQLFEENPINASGVDAKAILSARLSKSRRLENLIAQLPGEKKNGLFGNLIALSLGLTPNFKSNFDLAEDAKLQLSKDTYDDDLDNLLAQIGDQYADLFLAAKNLSDAILLSDILRVNTEITKAPLSASMIKRYDEHHQDLTLLKALVRQQLPEKYKEIFFDQSKNGYAGYIDGGASQEEFYKFIKPILEKMDGTEELLVKLNREDLLRKQRTFDNGSIPHQIHLGELHAILRRQEDFYPFLKDNREKIEKILTFRIPYYVGPLARGNSRFAWMTRKSEETITPWNFEEVVDKGASAQSFIERMTNFDKNLPNEKVLPKHSLLYEYFTVYNELTKVKYVTEGMRKPAFLSGEQKKAIVDLLFKTNRKVTVKQLKEDYFKKIECFDSVEISGVEDRFNASLGTYHDLLKIIKDKDFLDNEENEDILEDIVLTLTLFEDREMIEERLKTYAHLFDDKVMKQLKRRRYTGWGRLSRKLINGIRDKQSGKTILDFLKSDGFANRNFMQLIHDDSLTFKEDIQKAQVSGQGDSLHEHIANLAGSPAIKKGILQTVKVVDELVKVMGRHKPENIVIEMARENQTTQKGQKNSRERMKRIEEGIKELGSQILKEHPVENTQLQNEKLYLYYLQNGRDMYVDQELDINRLSDYDVDHIVPQSFLKDDSIDNKVLTRSDKARGKSDNVPSEEVVKKMKNYWRQLLNAKLITQRKFDNLTKAERGGLSELDKAGFIKRQLVETRQITKHVAQILDSRMNTKYDENDKLIREVKVITLKSKLVSDFRKDFQFYKVREINNYHHAHDAYLNAVVGTALIKKYPKLESEFVYGDYKVYDVRKMIAKSEQEIGKATAKYFFYSNIMNFFKTEITLANGEIRKRPLIETNGETGEIVWDKGRDFATVRKVLSMPQVNIVKKTEVQTGGFSKESILPKRNSDKLIARKKDWDPKKYGGFDSPTVAYSVLVVAKVEKGKSKKLKSVKELLGITIMERSSFEKNPIDFLEAKGYKEVKKDLIIKLPKYSLFELENGRKRMLASAGELQKGNELALPSKYVNFLYLASHYEKLKGSPEDNEQKQLFVEQHKHYLDEIIEQISEFSKRVILADANLDKVLSAYNKHRDKPIREQAENIIHLFTLTNLGAPAAFKYFDTTIDRKRYTSTKEVLDATLIHQSITGLYETRIDLSQLGGDGGGGGEAAAKGGSGGTLNIEDEYRLHETSKEPDVPLGSTWLSDFPQAWAETGGMGLAVRQAPLIIPLKATSTPVSIKQYPMSQEARLGIKPHIQRLLDQGILVPCQSPWNTPLLPVKKPGTNDYRPVQDLREVNKRVEDIHPTVPNPYNLLSGLPPSHQWYTVLDLKDAFFCLRLHPTSQPLFAFEWRDPEMGISGQLTWTRLPQGFKNSPTLFNEALHRDLADFRIQHPDLILLQYVDDLLLAATSEQDCQRGTRALLQTLGNLGYRASAKKAQICQKQVKYLGYLLKEGQRWLTEARKETVMGQPTPKTPRQLREFLGTAGFCRLWIPGFAEMAAPLYPLTKPGTLFNWGPDQQKAYQEIKQALLTAPALGLPDLTKPFELFVDEKQGYAKGVLTQKLGPWRRPVAYLSKKLDPVAAGWPPCLRMVAAIAVLTKDAGKLTMGQPLVILAPHAVEALVKQPPDRWLSNARMTHYQAMLLDTDRVQFGPVVALNPATLLPLPEKEAPHDCLEILAETHGTRPDLTDQPIPDADYTWYTDGSSFLQEGQRRAGAAVTTETEVIWARALPAGTSAQRAELIALTQALKMAEGKKLNVYTDSRYAFATAHVHGEIYRRRGWLTSEGREIKNKNEILALLKALFLPKRLSIIHCPGHQKGNSAEARGNRMADQAAREAAMKAVLETSTLLAGKRTADGSEFEKRTADGSEFESPKKKAKVE

SEQ ID NO: 980 - protein, 2094 aa, synthetic construct
MPAAKRVKLDGGDKKYSIGLDIGTNSVGWAVITDEYKVPSKKFKVLGNTDRHSIKKNLIGALLFDSGETAEATRLKRTARRRYTRRKNRICYLQEIFSNEMAKVDDSFFHRLEESFLVEEDKKHERHPIFGNIVDEVAYHEKYPTIYHLRKKLVDSTDKADLRLIYLALAHMIKFRGHFLIEGDLNPDNSDVDKLFIQLVQTYNQLFEENPINASGVDAKAILSARLSKSRRLENLIAQLPGEKKNGLFGNLIALSLGLTPNFKSNFDLAEDAKLQLSKDTYDDDLDNLLAQIGDQYADLFLAAKNLSDAILLSDILRVNTEITKAPLSASMIKRYDEHHQDLTLLKALVRQQLPEKYKEIFFDQSKNGYAGYIDGGASQEEFYKFIKPILEKMDGTEELLVKLNREDLLRKQRTFDNGSIPHQIHLGELHAILRRQEDFYPFLKDNREKIEKILTFRIPYYVGPLARGNSRFAWMTRKSEETITPWNFEEVVDKGASAQSFIERMTNFDKNLPNEKVLPKHSLLYEYFTVYNELTKVKYVTEGMRKPAFLSGEQKKAIVDLLFKTNRKVTVKQLKEDYFKKIECFDSVEISGVEDRFNASLGTYHDLLKIIKDKDFLDNEENEDILEDIVLTLTLFEDREMIEERLKTYAHLFDDKVMKQLKRRRYTGWGRLSRKLINGIRDKQSGKTILDFLKSDGFANRNFMQLIHDDSLTFKEDIQKAQVSGQGDSLHEHIANLAGSPAIKKGILQTVKVVDELVKVMGRHKPENIVIEMARENQTTQKGQKNSRERMKRIEEGIKELGSQILKEHPVENTQLQNEKLYLYYLQNGRDMYVDQELDINRLSDYDVDHIVPQSFLKDDSIDNKVLTRSDKARGKSDNVPSEEVVKKMKNYWRQLLNAKLITQRKFDNLTKAERGGLSELDKAGFIKRQLVETRQITKHVAQILDSRMNTKYDENDKLIREVKVITLKSKLVSDFRKDFQFYKVREINNYHHAHDAYLNAVVGTALIKKYPKLESEFVYGDYKVYDVRKMIAKSEQEIGKATAKYFFYSNIMNFFKTEITLANGEIRKRPLIETNGETGEIVWDKGRDFATVRKVLSMPQVNIVKKTEVQTGGFSKESILPKRNSDKLIARKKDWDPKKYGGFDSPTVAYSVLVVAKVEKGKSKKLKSVKELLGITIMERSSFEKNPIDFLEAKGYKEVKKDLIIKLPKYSLFELENGRKRMLASAGELQKGNELALPSKYVNFLYLASHYEKLKGSPEDNEQKQLFVEQHKHYLDEIIEQISEFSKRVILADANLDKVLSAYNKHRDKPIREQAENIIHLFTLTNLGAPAAFKYFDTTIDRKRYTSTKEVLDATLIHQSITGLYETRIDLSQLGGDGGGGSGGSGGSGGTLNIEDEYRLHETSKEPDVPLGSTWLSDFPQAWAETGGMGLAVRQAPLIIPLKATSTPVSIKQYPMSQEARLGIKPHIQRLLDQGILVPCQSPWNTPLLPVKKPGTNDYRPVQDLREVNKRVEDIHPTVPNPYNLLSGLPPSHQWYTVLDLKDAFFCLRLHPTSQPLFAFEWRDPEMGISGQLTWTRLPQGFKNSPTLFNEALHRDLADFRIQHPDLILLQYVDDLLLAATSEQDCQRGTRALLQTLGNLGYRASAKKAQICQKQVKYLGYLLKEGQRWLTEARKETVMGQPTPKTPRQLREFLGTAGFCRLWIPGFAEMAAPLYPLTKPGTLFNWGPDQQKAYQEIKQALLTAPALGLPDLTKPFELFVDEKQGYAKGVLTQKLGPWRRPVAYLSKKLDPVAAGWPPCLRMVAAIAVLTKDAGKLTMGQPLVILAPHAVEALVKQPPDRWLSNARMTHYQAMLLDTDRVQFGPVVALNPATLLPLPEKEAPHDCLEILAETHGTRPDLTDQPIPDADYTWYTDGSSFLQEGQRRAGAAVTTETEVIWARALPAGTSAQRAELIALTQALKMAEGKKLNVYTDSRYAFATAHVHGEIYRRRGWLTSEGREIKNKNEILALLKALFLPKRLSIIHCPGHQKGNSAEARGNRMADQAAREAAMKAVLETSTLLAGKRTADGSEFEKRTADGSEFESPKKKAKVE

SEQ ID NO: 981 - protein, 2100 aa, synthetic construct
MPAAKRVKLDGGDKKYSIGLDIGTNSVGWAVITDEYKVPSKKFKVLGNTDRHSIKKNLIGALLFDSGETAEATRLKRTARRRYTRRKNRICYLQEIFSNEMAKVDDSFFHRLEESFLVEEDKKHERHPIFGNIVDEVAYHEKYPTIYHLRKKLVDSTDKADLRLIYLALAHMIKFRGHFLIEGDLNPDNSDVDKLFIQLVQTYNQLFEENPINASGVDAKAILSARLSKSRRLENLIAQLPGEKKNGLFGNLIALSLGLTPNFKSNFDLAEDAKLQLSKDTYDDDLDNLLAQIGDQYADLFLAAKNLSDAILLSDILRVNTEITKAPLSASMIKRYDEHHQDLTLLKALVRQQLPEKYKEIFFDQSKNGYAGYIDGGASQEEFYKFIKPILEKMDGTEELLVKLNREDLLRKQRTFDNGSIPHQIHLGELHAILRRQEDFYPFLKDNREKIEKILTFRIPYYVGPLARGNSRFAWMTRKSEETITPWNFEEVVDKGASAQSFIERMTNFDKNLPNEKVLPKHSLLYEYFTVYNELTKVKYVTEGMRKPAFLSGEQKKAIVDLLFKTNRKVTVKQLKEDYFKKIECFDSVEISGVEDRFNASLGTYHDLLKIIKDKDFLDNEENEDILEDIVLTLTLFEDREMIEERLKTYAHLFDDKVMKQLKRRRYTGWGRLSRKLINGIRDKQSGKTILDFLKSDGFANRNFMQLIHDDSLTFKEDIQKAQVSGQGDSLHEHIANLAGSPAIKKGILQTVKVVDELVKVMGRHKPENIVIEMARENQTTQKGQKNSRERMKRIEEGIKELGSQILKEHPVENTQLQNEKLYLYYLQNGRDMYVDQELDINRLSDYDVDHIVPQSFLKDDSIDNKVLTRSDKARGKSDNVPSEEVVKKMKNYWRQLLNAKLITQRKFDNLTKAERGGLSELDKAGFIKRQLVETRQITKHVAQILDSRMNTKYDENDKLIREVKVITLKSKLVSDFRKDFQFYKVREINNYHHAHDAYLNAVVGTALIKKYPKLESEFVYGDYKVYDVRKMIAKSEQEIGKATAKYFFYSNIMNFFKTEITLANGEIRKRPLIETNGETGEIVWDKGRDFATVRKVLSMPQVNIVKKTEVQTGGFSKESILPKRNSDKLIARKKDWDPKKYGGFDSPTVAYSVLVVAKVEKGKSKKLKSVKELLGITIMERSSFEKNPIDFLEAKGYKEVKKDLIIKLPKYSLFELENGRKRMLASAGELQKGNELALPSKYVNFLYLASHYEKLKGSPEDNEQKQLFVEQHKHYLDEIIEQISEFSKRVILADANLDKVLSAYNKHRDKPIREQAENIIHLFTLTNLGAPAAFKYFDTTIDRKRYTSTKEVLDATLIHQSITGLYETRIDLSQLGGDGGEAAAKGGGGSEAAAKGGTLNIEDEYRLHETSKEPDVPLGSTWLSDFPQAWAETGGMGLAVRQAPLIIPLKATSTPVSIKQYPMSQEARLGIKPHIQRLLDQGILVPCQSPWNTPLLPVKKPGTNDYRPVQDLREVNKRVEDIHPTVPNPYNLLSGLPPSHQWYTVLDLKDAFFCLRLHPTSQPLFAFEWRDPEMGISGQLTWTRLPQGFKNSPTLFNEALHRDLADFRIQHPDLILLQYVDDLLLAATSEQDCQRGTRALLQTLGNLGYRASAKKAQICQKQVKYLGYLLKEGQRWLTEARKETVMGQPTPKTPRQLREFLGTAGFCRLWIPGFAEMAAPLYPLTKPGTLFNWGPDQQKAYQEIKQALLTAPALGLPDLTKPFELFVDEKQGYAKGVLTQKLGPWRRPVAYLSKKLDPVAAGWPPCLRMVAAIAVLTKDAGKLTMGQPLVILAPHAVEALVKQPPDRWLSNARMTHYQAMLLDTDRVQFGPVVALNPATLLPLPEKEAPHDCLEILAETHGTRPDLTDQPIPDADYTWYTDGSSFLQEGQRRAGAAVTTETEVIWARALPAGTSAQRAELIALTQALKMAEGKKLNVYTDSRYAFATAHVHGEIYRRRGWLTSEGREIKNKNEILALLKALFLPKRLSIIHCPGHQKGNSAEARGNRMADQAAREAAMKAVLETSTLLAGKRTADGSEFEKRTADGSEFESPKKKAKVE

SEQ ID NO: 982 - protein, 2093 aa, synthetic construct
MPAAKRVKLDGGDKKYSIGLDIGTNSVGWAVITDEYKVPSKKFKVLGNTDRHSIKKNLIGALLFDSGETAEATRLKRTARRRYTRRKNRICYLQEIFSNEMAKVDDSFFHRLEESFLVEEDKKHERHPIFGNIVDEVAYHEKYPTIYHLRKKLVDSTDKADLRLIYLALAHMIKFRGHFLIEGDLNPDNSDVDKLFIQLVQTYNQLFEENPINASGVDAKAILSARLSKSRRLENLIAQLPGEKKNGLFGNLIALSLGLTPNFKSNFDLAEDAKLQLSKDTYDDDLDNLLAQIGDQYADLFLAAKNLSDAILLSDILRVNTEITKAPLSASMIKRYDEHHQDLTLLKALVRQQLPEKYKEIFFDQSKNGYAGYIDGGASQEEFYKFIKPILEKMDGTEELLVKLNREDLLRKQRTFDNGSIPHQIHLGELHAILRRQEDFYPFLKDNREKIEKILTFRIPYYVGPLARGNSRFAWMTRKSEETITPWNFEEVVDKGASAQSFIERMTNFDKNLPNEKVLPKHSLLYEYFTVYNELTKVKYVTEGMRKPAFLSGEQKKAIVDLLFKTNRKVTVKQLKEDYFKKIECFDSVEISGVEDRFNASLGTYHDLLKIIKDKDFLDNEENEDILEDIVLTLTLFEDREMIEERLKTYAHLFDDKVMKQLKRRRYTGWGRLSRKLINGIRDKQSGKTILDFLKSDGFANRNFMQLIHDDSLTFKEDIQKAQVSGQGDSLHEHIANLAGSPAIKKGILQTVKVVDELVKVMGRHKPENIVIEMARENQTTQKGQKNSRERMKRIEEGIKELGSQILKEHPVENTQLQNEKLYLYYLQNGRDMYVDQELDINRLSDYDVDHIVPQSFLKDDSIDNKVLTRSDKARGKSDNVPSEEVVKKMKNYWRQLLNAKLITQRKFDNLTKAERGGLSELDKAGFIKRQLVETRQITKHVAQILDSRMNTKYDENDKLIREVKVITLKSKLVSDFRKDFQFYKVREINNYHHAHDAYLNAVVGTALIKKYPKLESEFVYGDYKVYDVRKMIAKSEQEIGKATAKYFFYSNIMNFFKTEITLANGEIRKRPLIETNGETGEIVWDKGRDFATVRKVLSMPQVNIVKKTEVQTGGFSKESILPKRNSDKLIARKKDWDPKKYGGFDSPTVAYSVLVVAKVEKGKSKKLKSVKELLGITIMERSSFEKNPIDFLEAKGYKEVKKDLIIKLPKYSLFELENGRKRMLASAGELQKGNELALPSKYVNFLYLASHYEKLKGSPEDNEQKQLFVEQHKHYLDEIIEQISEFSKRVILADANLDKVLSAYNKHRDKPIREQAENIIHLFTLTNLGAPAAFKYFDTTIDRKRYTSTKEVLDATLIHQSITGLYETRIDLSQLGGDGGEAAAKPAPGGTLNIEDEYRLHETSKEPDVPLGSTWLSDFPQAWAETGGMGLAVRQAPLIIPLKATSTPVSIKQYPMSQEARLGIKPHIQRLLDQGILVPCQSPWNTPLLPVKKPGTNDYRPVQDLREVNKRVEDIHPTVPNPYNLLSGLPPSHQWYTVLDLKDAFFCLRLHPTSQPLFAFEWRDPEMGISGQLTWTRLPQGFKNSPTLFNEALHRDLADFRIQHPDLILLQYVDDLLLAATSEQDCQRGTRALLQTLGNLGYRASAKKAQICQKQVKYLGYLLKEGQRWLTEARKETVMGQPTPKTPRQLREFLGTAGFCRLWIPGFAEMAAPLYPLTKPGTLFNWGPDQQKAYQEIKQALLTAPALGLPDLTKPFELFVDEKQGYAKGVLTQKLGPWRRPVAYLSKKLDPVAAGWPPCLRMVAAIAVLTKDAGKLTMGQPLVILAPHAVEALVKQPPDRWLSNARMTHYQAMLLDTDRVQFGPVVALNPATLLPLPEKEAPHDCLEILAETHGTRPDLTDQPIPDADYTWYTDGSSFLQEGQRRAGAAVTTETEVIWARALPAGTSAQRAELIALTQALKMAEGKKLNVYTDSRYAFATAHVHGEIYRRRGWLTSEGREIKNKNEILALLKALFLPKRLSIIHCPGHQKGNSAEARGNRMADQAAREAAMKAVLETSTLLAGKRTADGSEFEKRTADGSEFESPKKKAKVE

SEQ ID NO: 983 - protein, 2090 aa, synthetic construct
MPAAKRVKLDGGDKKYSIGLDIGTNSVGWAVITDEYKVPSKKFKVLGNTDRHSIKKNLIGALLFDSGETAEATRLKRTARRRYTRRKNRICYLQEIFSNEMAKVDDSFFHRLEESFLVEEDKKHERHPIFGNIVDEVAYHEKYPTIYHLRKKLVDSTDKADLRLIYLALAHMIKFRGHFLIEGDLNPDNSDVDKLFIQLVQTYNQLFEENPINASGVDAKAILSARLSKSRRLENLIAQLPGEKKNGLFGNLIALSLGLTPNFKSNFDLAEDAKLQLSKDTYDDDLDNLLAQIGDQYADLFLAAKNLSDAILLSDILRVNTEITKAPLSASMIKRYDEHHQDLTLLKALVRQQLPEKYKEIFFDQSKNGYAGYIDGGASQEEFYKFIKPILEKMDGTEELLVKLNREDLLRKQRTFDNGSIPHQIHLGELHAILRRQEDFYPFLKDNREKIEKILTFRIPYYVGPLARGNSRFAWMTRKSEETITPWNFEEVVDKGASAQSFIERMTNFDKNLPNEKVLPKHSLLYEYFTVYNELTKVKYVTEGMRKPAFLSGEQKKAIVDLLFKTNRKVTVKQLKEDYFKKIECFDSVEISGVEDRFNASLGTYHDLLKIIKDKDFLDNEENEDILEDIVLTLTLFEDREMIEERLKTYAHLFDDKVMKQLKRRRYTGWGRLSRKLINGIRDKQSGKTILDFLKSDGFANRNFMQLIHDDSLTFKEDIQKAQVSGQGDSLHEHIANLAGSPAIKKGILQTVKVVDELVKVMGRHKPENIVIEMARENQTTQKGQKNSRERMKRIEEGIKELGSQILKEHPVENTQLQNEKLYLYYLQNGRDMYVDQELDINRLSDYDVDHIVPQSFLKDDSIDNKVLTRSDKARGKSDNVPSEEVVKKMKNYWRQLLNAKLITQRKFDNLTKAERGGLSELDKAGFIKRQLVETRQITKHVAQILDSRMNTKYDENDKLIREVKVITLKSKLVSDFRKDFQFYKVREINNYHHAHDAYLNAVVGTALIKKYPKLESEFVYGDYKVYDVRKMIAKSEQEIGKATAKYFFYSNIMNFFKTEITLANGEIRKRPLIETNGETGEIVWDKGRDFATVRKVLSMPQVNIVKKTEVQTGGFSKESILPKRNSDKLIARKKDWDPKKYGGFDSPTVAYSVLVVAKVEKGKSKKLKSVKELLGITIMERSSFEKNPIDFLEAKGYKEVKKDLIIKLPKYSLFELENGRKRMLASAGELQKGNELALPSKYVNFLYLASHYEKLKGSPEDNEQKQLFVEQHKHYLDEIIEQISEFSKRVILADANLDKVLSAYNKHRDKPIREQAENIIHLFTLTNLGAPAAFKYFDTTIDRKRYTSTKEVLDATLIHQSITGLYETRIDLSQLGGDGGPAPAPGGTLNIEDEYRLHETSKEPDVPLGSTWLSDFPQAWAETGGMGLAVRQAPLIIPLKATSTPVSIKQYPMSQEARLGIKPHIQRLLDQGILVPCQSPWNTPLLPVKKPGTNDYRPVQDLREVNKRVEDIHPTVPNPYNLLSGLPPSHQWYTVLDLKDAFFCLRLHPTSQPLFAFEWRDPEMGISGQLTWTRLPQGFKNSPTLFNEALHRDLADFRIQHPDLILLQYVDDLLLAATSEQDCQRGTRALLQTLGNLGYRASAKKAQICQKQVKYLGYLLKEGQRWLTEARKETVMGQPTPKTPRQLREFLGTAGFCRLWIPGFAEMAAPLYPLTKPGTLFNWGPDQQKAYQEIKQALLTAPALGLPDLTKPFELFVDEKQGYAKGVLTQKLGPWRRPVAYLSKKLDPVAAGWPPCLRMVAAIAVLTKDAGKLTMGQPLVILAPHAVEALVKQPPDRWLSNARMTHYQAMLLDTDRVQFGPVVALNPATLLPLPEKEAPHDCLEILAETHGTRPDLTDQPIPDADYTWYTDGSSFLQEGQRRAGAAVTTETEVIWARALPAGTSAQRAELIALTQALKMAEGKKLNVYTDSRYAFATAHVHGEIYRRRGWLTSEGREIKNKNEILALLKALFLPKRLSIIHCPGHQKGNSAEARGNRMADQAAREAAMKAVLETSTLLAGKRTADGSEFEKRTADGSEFESPKKKAKVE

SEQ ID NO: 984 - protein, 2094 aa, synthetic construct
MPAAKRVKLDGGDKKYSIGLDIGTNSVGWAVITDEYKVPSKKFKVLGNTDRHSIKKNLIGALLFDSGETAEATRLKRTARRRYTRRKNRICYLQEIFSNEMAKVDDSFFHRLEESFLVEEDKKHERHPIFGNIVDEVAYHEKYPTIYHLRKKLVDSTDKADLRLIYLALAHMIKFRGHFLIEGDLNPDNSDVDKLFIQLVQTYNQLFEENPINASGVDAKAILSARLSKSRRLENLIAQLPGEKKNGLFGNLIALSLGLTPNFKSNFDLAEDAKLQLSKDTYDDDLDNLLAQIGDQYADLFLAAKNLSDAILLSDILRVNTEITKAPLSASMIKRYDEHHQDLTLLKALVRQQLPEKYKEIFFDQSKNGYAGYIDGGASQEEFYKFIKPILEKMDGTEELLVKLNREDLLRKQRTFDNGSIPHQIHLGELHAILRRQEDFYPFLKDNREKIEKILTFRIPYYVGPLARGNSRFAWMTRKSEETITPWNFEEVVDKGASAQSFIERMTNFDKNLPNEKVLPKHSLLYEYFTVYNELTKVKYVTEGMRKPAFLSGEQKKAIVDLLFKTNRKVTVKQLKEDYFKKIECFDSVEISGVEDRFNASLGTYHDLLKIIKDKDFLDNEENEDILEDIVLTLTLFEDREMIEERLKTYAHLFDDKVMKQLKRRRYTGWGRLSRKLINGIRDKQSGKTILDFLKSDGFANRNFMQLIHDDSLTFKEDIQKAQVSGQGDSLHEHIANLAGSPAIKKGILQTVKVVDELVKVMGRHKPENIVIEMARENQTTQKGQKNSRERMKRIEEGIKELGSQILKEHPVENTQLQNEKLYLYYLQNGRDMYVDQELDINRLSDYDVDHIVPQSFLKDDSIDNKVLTRSDKARGKSDNVPSEEVVKKMKNYWRQLLNAKLITQRKFDNLTKAERGGLSELDKAGFIKRQLVETRQITKHVAQILDSRMNTKYDENDKLIREVKVITLKSKLVSDFRKDFQFYKVREINNYHHAHDAYLNAVVGTALIKKYPKLESEFVYGDYKVYDVRKMIAKSEQEIGKATAKYFFYSNIMNFFKTEITLANGEIRKRPLIETNGETGEIVWDKGRDFATVRKVLSMPQVNIVKKTEVQTGGFSKESILPKRNSDKLIARKKDWDPKKYGGFDSPTVAYSVLVVAKVEKGKSKKLKSVKELLGITIMERSSFEKNPIDFLEAKGYKEVKKDLIIKLPKYSLFELENGRKRMLASAGELQKGNELALPSKYVNFLYLASHYEKLKGSPEDNEQKQLFVEQHKHYLDEIIEQISEFSKRVILADANLDKVLSAYNKHRDKPIREQAENIIHLFTLTNLGAPAAFKYFDTTIDRKRYTSTKEVLDATLIHQSITGLYETRIDLSQLGGDGGGGGPAPGGSGGTLNIEDEYRLHETSKEPDVPLGSTWLSDFPQAWAETGGMGLAVRQAPLIIPLKATSTPVSIKQYPMSQEARLGIKPHIQRLLDQGILVPCQSPWNTPLLPVKKPGTNDYRPVQDLREVNKRVEDIHPTVPNPYNLLSGLPPSHQWYTVLDLKDAFFCLRLHPTSQPLFAFEWRDPEMGISGQLTWTRLPQGFKNSPTLFNEALHRDLADFRIQHPDLILLQYVDDLLLAATSEQDCQRGTRALLQTLGNLGYRASAKKAQICQKQVKYLGYLLKEGQRWLTEARKETVMGQPTPKTPRQLREFLGTAGFCRLWIPGFAEMAAPLYPLTKPGTLFNWGPDQQKAYQEIKQALLTAPALGLPDLTKPFELFVDEKQGYAKGVLTQKLGPWRRPVAYLSKKLDPVAAGWPPCLRMVAAIAVLTKDAGKLTMGQPLVILAPHAVEALVKQPPDRWLSNARMTHYQAMLLDTDRVQFGPVVALNPATLLPLPEKEAPHDCLEILAETHGTRPDLTDQPIPDADYTWYTDGSSFLQEGQRRAGAAVTTETEVIWARALPAGTSAQRAELIALTQALKMAEGKKLNVYTDSRYAFATAHVHGEIYRRRGWLTSEGREIKNKNEILALLKALFLPKRLSIIHCPGHQKGNSAEARGNRMADQAAREAAMKAVLETSTLLAGKRTADGSEFEKRTADGSEFESPKKKAKVE

SEQ ID NO: 985 - protein, 2096 aa, synthetic construct
MPAAKRVKLDGGDKKYSIGLDIGTNSVGWAVITDEYKVPSKKFKVLGNTDRHSIKKNLIGALLFDSGETAEATRLKRTARRRYTRRKNRICYLQEIFSNEMAKVDDSFFHRLEESFLVEEDKKHERHPIFGNIVDEVAYHEKYPTIYHLRKKLVDSTDKADLRLIYLALAHMIKFRGHFLIEGDLNPDNSDVDKLFIQLVQTYNQLFEENPINASGVDAKAILSARLSKSRRLENLIAQLPGEKKNGLFGNLIALSLGLTPNFKSNFDLAEDAKLQLSKDTYDDDLDNLLAQIGDQYADLFLAAKNLSDAILLSDILRVNTEITKAPLSASMIKRYDEHHQDLTLLKALVRQQLPEKYKEIFFDQSKNGYAGYIDGGASQEEFYKFIKPILEKMDGTEELLVKLNREDLLRKQRTFDNGSIPHQIHLGELHAILRRQEDFYPFLKDNREKIEKILTFRIPYYVGPLARGNSRFAWMTRKSEETITPWNFEEVVDKGASAQSFIERMTNFDKNLPNEKVLPKHSLLYEYFTVYNELTKVKYVTEGMRKPAFLSGEQKKAIVDLLFKTNRKVTVKQLKEDYFKKIECFDSVEISGVEDRFNASLGTYHDLLKIIKDKDFLDNEENEDILEDIVLTLTLFEDREMIEERLKTYAHLFDDKVMKQLKRRRYTGWGRLSRKLINGIRDKQSGKTILDFLKSDGFANRNFMQLIHDDSLTFKEDIQKAQVSGQGDSLHEHIANLAGSPAIKKGILQTVKVVDELVKVMGRHKPENIVIEMARENQTTQKGQKNSRERMKRIEEGIKELGSQILKEHPVENTQLQNEKLYLYYLQNGRDMYVDQELDINRLSDYDVDHIVPQSFLKDDSIDNKVLTRSDKARGKSDNVPSEEVVKKMKNYWRQLLNAKLITQRKFDNLTKAERGGLSELDKAGFIKRQLVETRQITKHVAQILDSRMNTKYDENDKLIREVKVITLKSKLVSDFRKDFQFYKVREINNYHHAHDAYLNAVVGTALIKKYPKLESEFVYGDYKVYDVRKMIAKSEQEIGKATAKYFFYSNIMNFFKTEITLANGEIRKRPLIETNGETGEIVWDKGRDFATVRKVLSMPQVNIVKKTEVQTGGFSKESILPKRNSDKLIARKKDWDPKKYGGFDSPTVAYSVLVVAKVEKGKSKKLKSVKELLGITIMERSSFEKNPIDFLEAKGYKEVKKDLIIKLPKYSLFELENGRKRMLASAGELQKGNELALPSKYVNFLYLASHYEKLKGSPEDNEQKQLFVEQHKHYLDEIIEQISEFSKRVILADANLDKVLSAYNKHRDKPIREQAENIIHLFTLTNLGAPAAFKYFDTTIDRKRYTSTKEVLDATLIHQSITGLYETRIDLSQLGGDGGGGGEAAAKPAPGGTLNIEDEYRLHETSKEPDVPLGSTWLSDFPQAWAETGGMGLAVRQAPLIIPLKATSTPVSIKQYPMSQEARLGIKPHIQRLLDQGILVPCQSPWNTPLLPVKKPGTNDYRPVQDLREVNKRVEDIHPTVPNPYNLLSGLPPSHQWYTVLDLKDAFFCLRLHPTSQPLFAFEWRDPEMGISGQLTWTRLPQGFKNSPTLFNEALHRDLADFRIQHPDLILLQYVDDLLLAATSEQDCQRGTRALLQTLGNLGYRASAKKAQICQKQVKYLGYLLKEGQRWLTEARKETVMGQPTPKTPRQLREFLGTAGFCRLWIPGFAEMAAPLYPLTKPGTLFNWGPDQQKAYQEIKQALLTAPALGLPDLTKPFELFVDEKQGYAKGVLTQKLGPWRRPVAYLSKKLDPVAAGWPPCLRMVAAIAVLTKDAGKLTMGQPLVILAPHAVEALVKQPPDRWLSNARMTHYQAMLLDTDRVQFGPVVALNPATLLPLPEKEAPHDCLEILAETHGTRPDLTDQPIPDADYTWYTDGSSFLQEGQRRAGAAVTTETEVIWARALPAGTSAQRAELIALTQALKMAEGKKLNVYTDSRYAFATAHVHGEIYRRRGWLTSEGREIKNKNEILALLKALFLPKRLSIIHCPGHQKGNSAEARGNRMADQAAREAAMKAVLETSTLLAGKRTADGSEFEKRTADGSEFESPKKKAKVE

SEQ ID NO: 986 - protein, 2094 aa, synthetic construct
MPAAKRVKLDGGDKKYSIGLDIGTNSVGWAVITDEYKVPSKKFKVLGNTDRHSIKKNLIGALLFDSGETAEATRLKRTARRRYTRRKNRICYLQEIFSNEMAKVDDSFFHRLEESFLVEEDKKHERHPIFGNIVDEVAYHEKYPTIYHLRKKLVDSTDKADLRLIYLALAHMIKFRGHFLIEGDLNPDNSDVDKLFIQLVQTYNQLFEENPINASGVDAKAILSARLSKSRRLENLIAQLPGEKKNGLFGNLIALSLGLTPNFKSNFDLAEDAKLQLSKDTYDDDLDNLLAQIGDQYADLFLAAKNLSDAILLSDILRVNTEITKAPLSASMIKRYDEHHQDLTLLKALVRQQLPEKYKEIFFDQSKNGYAGYIDGGASQEEFYKFIKPILEKMDGTEELLVKLNREDLLRKQRTFDNGSIPHQIHLGELHAILRRQEDFYPFLKDNREKIEKILTFRIPYYVGPLARGNSRFAWMTRKSEETITPWNFEEVVDKGASAQSFIERMTNFDKNLPNEKVLPKHSLLYEYFTVYNELTKVKYVTEGMRKPAFLSGEQKKAIVDLLFKTNRKVTVKQLKEDYFKKIECFDSVEISGVEDRFNASLGTYHDLLKIIKDKDFLDNEENEDILEDIVLTLTLFEDREMIEERLKTYAHLFDDKVMKQLKRRRYTGWGRLSRKLINGIRDKQSGKTILDFLKSDGFANRNFMQLIHDDSLTFKEDIQKAQVSGQGDSLHEHIANLAGSPAIKKGILQTVKVVDELVKVMGRHKPENIVIEMARENQTTQKGQKNSRERMKRIEEGIKELGSQILKEHPVENTQLQNEKLYLYYLQNGRDMYVDQELDINRLSDYDVDHIVPQSFLKDDSIDNKVLTRSDKARGKSDNVPSEEVVKKMKNYWRQLLNAKLITQRKFDNLTKAERGGLSELDKAGFIKRQLVETRQITKHVAQILDSRMNTKYDENDKLIREVKVITLKSKLVSDFRKDFQFYKVREINNYHHAHDAYLNAVVGTALIKKYPKLESEFVYGDYKVYDVRKMIAKSEQEIGKATAKYFFYSNIMNFFKTEITLANGEIRKRPLIETNGETGEIVWDKGRDFATVRKVLSMPQVNIVKKTEVQTGGFSKESILPKRNSDKLIARKKDWDPKKYGGFDSPTVAYSVLVVAKVEKGKSKKLKSVKELLGITIMERSSFEKNPIDFLEAKGYKEVKKDLIIKLPKYSLFELENGRKRMLASAGELQKGNELALPSKYVNFLYLASHYEKLKGSPEDNEQKQLFVEQHKHYLDEIIEQISEFSKRVILADANLDKVLSAYNKHRDKPIREQAENIIHLFTLTNLGAPAAFKYFDTTIDRKRYTSTKEVLDATLIHQSITGLYETRIDLSQLGGDGGGGSPAPGSSGGTLNIEDEYRLHETSKEPDVPLGSTWLSDFPQAWAETGGMGLAVRQAPLIIPLKATSTPVSIKQYPMSQEARLGIKPHIQRLLDQGILVPCQSPWNTPLLPVKKPGTNDYRPVQDLREVNKRVEDIHPTVPNPYNLLSGLPPSHQWYTVLDLKDAFFCLRLHPTSQPLFAFEWRDPEMGISGQLTWTRLPQGFKNSPTLFNEALHRDLADFRIQHPDLILLQYVDDLLLAATSEQDCQRGTRALLQTLGNLGYRASAKKAQICQKQVKYLGYLLKEGQRWLTEARKETVMGQPTPKTPRQLREFLGTAGFCRLWIPGFAEMAAPLYPLTKPGTLFNWGPDQQKAYQEIKQALLTAPALGLPDLTKPFELFVDEKQGYAKGVLTQKLGPWRRPVAYLSKKLDPVAAGWPPCLRMVAAIAVLTKDAGKLTMGQPLVILAPHAVEALVKQPPDRWLSNARMTHYQAMLLDTDRVQFGPVVALNPATLLPLPEKEAPHDCLEILAETHGTRPDLTDQPIPDADYTWYTDGSSFLQEGQRRAGAAVTTETEVIWARALPAGTSAQRAELIALTQALKMAEGKKLNVYTDSRYAFATAHVHGEIYRRRGWLTSEGREIKNKNEILALLKALFLPKRLSIIHCPGHQKGNSAEARGNRMADQAAREAAMKAVLETSTLLAGKRTADGSEFEKRTADGSEFESPKKKAKVE

SEQ ID NO: 987 - protein, 2094 aa, synthetic construct
MPAAKRVKLDGGDKKYSIGLDIGTNSVGWAVITDEYKVPSKKFKVLGNTDRHSIKKNLIGALLFDSGETAEATRLKRTARRRYTRRKNRICYLQEIFSNEMAKVDDSFFHRLEESFLVEEDKKHERHPIFGNIVDEVAYHEKYPTIYHLRKKLVDSTDKADLRLIYLALAHMIKFRGHFLIEGDLNPDNSDVDKLFIQLVQTYNQLFEENPINASGVDAKAILSARLSKSRRLENLIAQLPGEKKNGLFGNLIALSLGLTPNFKSNFDLAEDAKLQLSKDTYDDDLDNLLAQIGDQYADLFLAAKNLSDAILLSDILRVNTEITKAPLSASMIKRYDEHHQDLTLLKALVRQQLPEKYKEIFFDQSKNGYAGYIDGGASQEEFYKFIKPILEKMDGTEELLVKLNREDLLRKQRTFDNGSIPHQIHLGELHAILRRQEDFYPFLKDNREKIEKILTFRIPYYVGPLARGNSRFAWMTRKSEETITPWNFEEVVDKGASAQSFIERMTNFDKNLPNEKVLPKHSLLYEYFTVYNELTKVKYVTEGMRKPAFLSGEQKKAIVDLLFKTNRKVTVKQLKEDYFKKIECFDSVEISGVEDRFNASLGTYHDLLKIIKDKDFLDNEENEDILEDIVLTLTLFEDREMIEERLKTYAHLFDDKVMKQLKRRRYTGWGRLSRKLINGIRDKQSGKTILDFLKSDGFANRNFMQLIHDDSLTFKEDIQKAQVSGQGDSLHEHIANLAGSPAIKKGILQTVKVVDELVKVMGRHKPENIVIEMARENQTTQKGQKNSRERMKRIEEGIKELGSQILKEHPVENTQLQNEKLYLYYLQNGRDMYVDQELDINRLSDYDVDHIVPQSFLKDDSIDNKVLTRSDKARGKSDNVPSEEVVKKMKNYWRQLLNAKLITQRKFDNLTKAERGGLSELDKAGFIKRQLVETRQITKHVAQILDSRMNTKYDENDKLIREVKVITLKSKLVSDFRKDFQFYKVREINNYHHAHDAYLNAVVGTALIKKYPKLESEFVYGDYKVYDVRKMIAKSEQEIGKATAKYFFYSNIMNFFKTEITLANGEIRKRPLIETNGETGEIVWDKGRDFATVRKVLSMPQVNIVKKTEVQTGGFSKESILPKRNSDKLIARKKDWDPKKYGGFDSPTVAYSVLVVAKVEKGKSKKLKSVKELLGITIMERSSFEKNPIDFLEAKGYKEVKKDLIIKLPKYSLFELENGRKRMLASAGELQKGNELALPSKYVNFLYLASHYEKLKGSPEDNEQKQLFVEQHKHYLDEIIEQISEFSKRVILADANLDKVLSAYNKHRDKPIREQAENIIHLFTLTNLGAPAAFKYFDTTIDRKRYTSTKEVLDATLIHQSITGLYETRIDLSQLGGDGGGSSPAPGGSGGTLNIEDEYRLHETSKEPDVPLGSTWLSDFPQAWAETGGMGLAVRQAPLIIPLKATSTPVSIKQYPMSQEARLGIKPHIQRLLDQGILVPCQSPWNTPLLPVKKPGTNDYRPVQDLREVNKRVEDIHPTVPNPYNLLSGLPPSHQWYTVLDLKDAFFCLRLHPTSQPLFAFEWRDPEMGISGQLTWTRLPQGFKNSPTLFNEALHRDLADFRIQHPDLILLQYVDDLLLAATSEQDCQRGTRALLQTLGNLGYRASAKKAQICQKQVKYLGYLLKEGQRWLTEARKETVMGQPTPKTPRQLREFLGTAGFCRLWIPGFAEMAAPLYPLTKPGTLFNWGPDQQKAYQEIKQALLTAPALGLPDLTKPFELFVDEKQGYAKGVLTQKLGPWRRPVAYLSKKLDPVAAGWPPCLRMVAAIAVLTKDAGKLTMGQPLVILAPHAVEALVKQPPDRWLSNARMTHYQAMLLDTDRVQFGPVVALNPATLLPLPEKEAPHDCLEILAETHGTRPDLTDQPIPDADYTWYTDGSSFLQEGQRRAGAAVTTETEVIWARALPAGTSAQRAELIALTQALKMAEGKKLNVYTDSRYAFATAHVHGEIYRRRGWLTSEGREIKNKNEILALLKALFLPKRLSIIHCPGHQKGNSAEARGNRMADQAAREAAMKAVLETSTLLAGKRTADGSEFEKRTADGSEFESPKKKAKVE

SEQ ID NO: 988 - protein, 2090 aa, synthetic construct
MPAAKRVKLDGGDKKYSIGLDIGTNSVGWAVITDEYKVPSKKFKVLGNTDRHSIKKNLIGALLFDSGETAEATRLKRTARRRYTRRKNRICYLQEIFSNEMAKVDDSFFHRLEESFLVEEDKKHERHPIFGNIVDEVAYHEKYPTIYHLRKKLVDSTDKADLRLIYLALAHMIKFRGHFLIEGDLNPDNSDVDKLFIQLVQTYNQLFEENPINASGVDAKAILSARLSKSRRLENLIAQLPGEKKNGLFGNLIALSLGLTPNFKSNFDLAEDAKLQLSKDTYDDDLDNLLAQIGDQYADLFLAAKNLSDAILLSDILRVNTEITKAPLSASMIKRYDEHHQDLTLLKALVRQQLPEKYKEIFFDQSKNGYAGYIDGGASQEEFYKFIKPILEKMDGTEELLVKLNREDLLRKQRTFDNGSIPHQIHLGELHAILRRQEDFYPFLKDNREKIEKILTFRIPYYVGPLARGNSRFAWMTRKSEETITPWNFEEVVDKGASAQSFIERMTNFDKNLPNEKVLPKHSLLYEYFTVYNELTKVKYVTEGMRKPAFLSGEQKKAIVDLLFKTNRKVTVKQLKEDYFKKIECFDSVEISGVEDRFNASLGTYHDLLKIIKDKDFLDNEENEDILEDIVLTLTLFEDREMIEERLKTYAHLFDDKVMKQLKRRRYTGWGRLSRKLINGIRDKQSGKTILDFLKSDGFANRNFMQLIHDDSLTFKEDIQKAQVSGQGDSLHEHIANLAGSPAIKKGILQTVKVVDELVKVMGRHKPENIVIEMARENQTTQKGQKNSRERMKRIEEGIKELGSQILKEHPVENTQLQNEKLYLYYLQNGRDMYVDQELDINRLSDYDVDHIVPQSFLKDDSIDNKVLTRSDKARGKSDNVPSEEVVKKMKNYWRQLLNAKLITQRKFDNLTKAERGGLSELDKAGFIKRQLVETRQITKHVAQILDSRMNTKYDENDKLIREVKVITLKSKLVSDFRKDFQFYKVREINNYHHAHDAYLNAVVGTALIKKYPKLESEFVYGDYKVYDVRKMIAKSEQEIGKATAKYFFYSNIMNFFKTEITLANGEIRKRPLIETNGETGEIVWDKGRDFATVRKVLSMPQVNIVKKTEVQTGGFSKESILPKRNSDKLIARKKDWDPKKYGGFDSPTVAYSVLVVAKVEKGKSKKLKSVKELLGITIMERSSFEKNPIDFLEAKGYKEVKKDLIIKLPKYSLFELENGRKRMLASAGELQKGNELALPSKYVNFLYLASHYEKLKGSPEDNEQKQLFVEQHKHYLDEIIEQISEFSKRVILADANLDKVLSAYNKHRDKPIREQAENIIHLFTLTNLGAPAAFKYFDTTIDRKRYTSTKEVLDATLIHQSITGLYETRIDLSQLGGDGGEAAAKGGTLNIEDEYRLHETSKEPDVPLGSTWLSDFPQAWAETGGMGLAVRQAPLIIPLKATSTPVSIKQYPMSQEARLGIKPHIQRLLDQGILVPCQSPWNTPLLPVKKPGTNDYRPVQDLREVNKRVEDIHPTVPNPYNLLSGLPPSHQWYTVLDLKDAFFCLRLHPTSQPLFAFEWRDPEMGISGQLTWTRLPQGFKNSPTLFNEALHRDLADFRIQHPDLILLQYVDDLLLAATSEQDCQRGTRALLQTLGNLGYRASAKKAQICQKQVKYLGYLLKEGQRWLTEARKETVMGQPTPKTPRQLREFLGTAGFCRLWIPGFAEMAAPLYPLTKPGTLFNWGPDQQKAYQEIKQALLTAPALGLPDLTKPFELFVDEKQGYAKGVLTQKLGPWRRPVAYLSKKLDPVAAGWPPCLRMVAAIAVLTKDAGKLTMGQPLVILAPHAVEALVKQPPDRWLSNARMTHYQAMLLDTDRVQFGPVVALNPATLLPLPEKEAPHDCLEILAETHGTRPDLTDQPIPDADYTWYTDGSSFLQEGQRRAGAAVTTETEVIWARALPAGTSAQRAELIALTQALKMAEGKKLNVYTDSRYAFATAHVHGEIYRRRGWLTSEGREIKNKNEILALLKALFLPKRLSIIHCPGHQKGNSAEARGNRMADQAAREAAMKAVLETSTLLAGKRTADGSEFEKRTADGSEFESPKKKAKVE

SEQ ID NO: 989 - protein, 2094 aa, synthetic construct
MPAAKRVKLDGGDKKYSIGLDIGTNSVGWAVITDEYKVPSKKFKVLGNTDRHSIKKNLIGALLFDSGETAEATRLKRTARRRYTRRKNRICYLQEIFSNEMAKVDDSFFHRLEESFLVEEDKKHERHPIFGNIVDEVAYHEKYPTIYHLRKKLVDSTDKADLRLIYLALAHMIKFRGHFLIEGDLNPDNSDVDKLFIQLVQTYNQLFEENPINASGVDAKAILSARLSKSRRLENLIAQLPGEKKNGLFGNLIALSLGLTPNFKSNFDLAEDAKLQLSKDTYDDDLDNLLAQIGDQYADLFLAAKNLSDAILLSDILRVNTEITKAPLSASMIKRYDEHHQDLTLLKALVRQQLPEKYKEIFFDQSKNGYAGYIDGGASQEEFYKFIKPILEKMDGTEELLVKLNREDLLRKQRTFDNGSIPHQIHLGELHAILRRQEDFYPFLKDNREKIEKILTFRIPYYVGPLARGNSRFAWMTRKSEETITPWNFEEVVDKGASAQSFIERMTNFDKNLPNEKVLPKHSLLYEYFTVYNELTKVKYVTEGMRKPAFLSGEQKKAIVDLLFKTNRKVTVKQLKEDYFKKIECFDSVEISGVEDRFNASLGTYHDLLKIIKDKDFLDNEENEDILEDIVLTLTLFEDREMIEERLKTYAHLFDDKVMKQLKRRRYTGWGRLSRKLINGIRDKQSGKTILDFLKSDGFANRNFMQLIHDDSLTFKEDIQKAQVSGQGDSLHEHIANLAGSPAIKKGILQTVKVVDELVKVMGRHKPENIVIEMARENQTTQKGQKNSRERMKRIEEGIKELGSQILKEHPVENTQLQNEKLYLYYLQNGRDMYVDQELDINRLSDYDVDHIVPQSFLKDDSIDNKVLTRSDKARGKSDNVPSEEVVKKMKNYWRQLLNAKLITQRKFDNLTKAERGGLSELDKAGFIKRQLVETRQITKHVAQILDSRMNTKYDENDKLIREVKVITLKSKLVSDFRKDFQFYKVREINNYHHAHDAYLNAVVGTALIKKYPKLESEFVYGDYKVYDVRKMIAKSEQEIGKATAKYFFYSNIMNFFKTEITLANGEIRKRPLIETNGETGEIVWDKGRDFATVRKVLSMPQVNIVKKTEVQTGGFSKESILPKRNSDKLIARKKDWDPKKYGGFDSPTVAYSVLVVAKVEKGKSKKLKSVKELLGITIMERSSFEKNPIDFLEAKGYKEVKKDLIIKLPKYSLFELENGRKRMLASAGELQKGNELALPSKYVNFLYLASHYEKLKGSPEDNEQKQLFVEQHKHYLDEIIEQISEFSKRVILADANLDKVLSAYNKHRDKPIREQAENIIHLFTLTNLGAPAAFKYFDTTIDRKRYTSTKEVLDATLIHQSITGLYETRIDLSQLGGDGGGGGGGSGSSGGTLNIEDEYRLHETSKEPDVPLGSTWLSDFPQAWAETGGMGLAVRQAPLIIPLKATSTPVSIKQYPMSQEARLGIKPHIQRLLDQGILVPCQSPWNTPLLPVKKPGTNDYRPVQDLREVNKRVEDIHPTVPNPYNLLSGLPPSHQWYTVLDLKDAFFCLRLHPTSQPLFAFEWRDPEMGISGQLTWTRLPQGFKNSPTLFNEALHRDLADFRIQHPDLILLQYVDDLLLAATSEQDCQRGTRALLQTLGNLGYRASAKKAQICQKQVKYLGYLLKEGQRWLTEARKETVMGQPTPKTPRQLREFLGTAGFCRLWIPGFAEMAAPLYPLTKPGTLFNWGPDQQKAYQEIKQALLTAPALGLPDLTKPFELFVDEKQGYAKGVLTQKLGPWRRPVAYLSKKLDPVAAGWPPCLRMVAAIAVLTKDAGKLTMGQPLVILAPHAVEALVKQPPDRWLSNARMTHYQAMLLDTDRVQFGPVVALNPATLLPLPEKEAPHDCLEILAETHGTRPDLTDQPIPDADYTWYTDGSSFLQEGQRRAGAAVTTETEVIWARALPAGTSAQRAELIALTQALKMAEGKKLNVYTDSRYAFATAHVHGEIYRRRGWLTSEGREIKNKNEILALLKALFLPKRLSIIHCPGHQKGNSAEARGNRMADQAAREAAMKAVLETSTLLAGKRTADGSEFEKRTADGSEFESPKKKAKVE

SEQ ID NO: 990 - protein, 2091 aa, synthetic construct
MPAAKRVKLDGGDKKYSIGLDIGTNSVGWAVITDEYKVPSKKFKVLGNTDRHSIKKNLIGALLFDSGETAEATRLKRTARRRYTRRKNRICYLQEIFSNEMAKVDDSFFHRLEESFLVEEDKKHERHPIFGNIVDEVAYHEKYPTIYHLRKKLVDSTDKADLRLIYLALAHMIKFRGHFLIEGDLNPDNSDVDKLFIQLVQTYNQLFEENPINASGVDAKAILSARLSKSRRLENLIAQLPGEKKNGLFGNLIALSLGLTPNFKSNFDLAEDAKLQLSKDTYDDDLDNLLAQIGDQYADLFLAAKNLSDAILLSDILRVNTEITKAPLSASMIKRYDEHHQDLTLLKALVRQQLPEKYKEIFFDQSKNGYAGYIDGGASQEEFYKFIKPILEKMDGTEELLVKLNREDLLRKQRTFDNGSIPHQIHLGELHAILRRQEDFYPFLKDNREKIEKILTFRIPYYVGPLARGNSRFAWMTRKSEETITPWNFEEVVDKGASAQSFIERMTNFDKNLPNEKVLPKHSLLYEYFTVYNELTKVKYVTEGMRKPAFLSGEQKKAIVDLLFKTNRKVTVKQLKEDYFKKIECFDSVEISGVEDRFNASLGTYHDLLKIIKDKDFLDNEENEDILEDIVLTLTLFEDREMIEERLKTYAHLFDDKVMKQLKRRRYTGWGRLSRKLINGIRDKQSGKTILDFLKSDGFANRNFMQLIHDDSLTFKEDIQKAQVSGQGDSLHEHIANLAGSPAIKKGILQTVKVVDELVKVMGRHKPENIVIEMARENQTTQKGQKNSRERMKRIEEGIKELGSQILKEHPVENTQLQNEKLYLYYLQNGRDMYVDQELDINRLSDYDVDHIVPQSFLKDDSIDNKVLTRSDKARGKSDNVPSEEVVKKMKNYWRQLLNAKLITQRKFDNLTKAERGGLSELDKAGFIKRQLVETRQITKHVAQILDSRMNTKYDENDKLIREVKVITLKSKLVSDFRKDFQFYKVREINNYHHAHDAYLNAVVGTALIKKYPKLESEFVYGDYKVYDVRKMIAKSEQEIGKATAKYFFYSNIMNFFKTEITLANGEIRKRPLIETNGETGEIVWDKGRDFATVRKVLSMPQVNIVKKTEVQTGGFSKESILPKRNSDKLIARKKDWDPKKYGGFDSPTVAYSVLVVAKVEKGKSKKLKSVKELLGITIMERSSFEKNPIDFLEAKGYKEVKKDLIIKLPKYSLFELENGRKRMLASAGELQKGNELALPSKYVNFLYLASHYEKLKGSPEDNEQKQLFVEQHKHYLDEIIEQISEFSKRVILADANLDKVLSAYNKHRDKPIREQAENIIHLFTLTNLGAPAAFKYFDTTIDRKRYTSTKEVLDATLIHQSITGLYETRIDLSQLGGDGGPAPGSSGGTLNIEDEYRLHETSKEPDVPLGSTWLSDFPQAWAETGGMGLAVRQAPLIIPLKATSTPVSIKQYPMSQEARLGIKPHIQRLLDQGILVPCQSPWNTPLLPVKKPGTNDYRPVQDLREVNKRVEDIHPTVPNPYNLLSGLPPSHQWYTVLDLKDAFFCLRLHPTSQPLFAFEWRDPEMGISGQLTWTRLPQGFKNSPTLFNEALHRDLADFRIQHPDLILLQYVDDLLLAATSEQDCQRGTRALLQTLGNLGYRASAKKAQICQKQVKYLGYLLKEGQRWLTEARKETVMGQPTPKTPRQLREFLGTAGFCRLWIPGFAEMAAPLYPLTKPGTLFNWGPDQQKAYQEIKQALLTAPALGLPDLTKPFELFVDEKQGYAKGVLTQKLGPWRRPVAYLSKKLDPVAAGWPPCLRMVAAIAVLTKDAGKLTMGQPLVILAPHAVEALVKQPPDRWLSNARMTHYQAMLLDTDRVQFGPVVALNPATLLPLPEKEAPHDCLEILAETHGTRPDLTDQPIPDADYTWYTDGSSFLQEGQRRAGAAVTTETEVIWARALPAGTSAQRAELIALTQALKMAEGKKLNVYTDSRYAFATAHVHGEIYRRRGWLTSEGREIKNKNEILALLKALFLPKRLSIIHCPGHQKGNSAEARGNRMADQAAREAAMKAVLETSTLLAGKRTADGSEFEKRTADGSEFESPKKKAKVE

SEQ ID NO: 991 - protein, 2095 aa, synthetic construct
MPAAKRVKLDGGDKKYSIGLDIGTNSVGWAVITDEYKVPSKKFKVLGNTDRHSIKKNLIGALLFDSGETAEATRLKRTARRRYTRRKNRICYLQEIFSNEMAKVDDSFFHRLEESFLVEEDKKHERHPIFGNIVDEVAYHEKYPTIYHLRKKLVDSTDKADLRLIYLALAHMIKFRGHFLIEGDLNPDNSDVDKLFIQLVQTYNQLFEENPINASGVDAKAILSARLSKSRRLENLIAQLPGEKKNGLFGNLIALSLGLTPNFKSNFDLAEDAKLQLSKDTYDDDLDNLLAQIGDQYADLFLAAKNLSDAILLSDILRVNTEITKAPLSASMIKRYDEHHQDLTLLKALVRQQLPEKYKEIFFDQSKNGYAGYIDGGASQEEFYKFIKPILEKMDGTEELLVKLNREDLLRKQRTFDNGSIPHQIHLGELHAILRRQEDFYPFLKDNREKIEKILTFRIPYYVGPLARGNSRFAWMTRKSEETITPWNFEEVVDKGASAQSFIERMTNFDKNLPNEKVLPKHSLLYEYFTVYNELTKVKYVTEGMRKPAFLSGEQKKAIVDLLFKTNRKVTVKQLKEDYFKKIECFDSVEISGVEDRFNASLGTYHDLLKIIKDKDFLDNEENEDILEDIVLTLTLFEDREMIEERLKTYAHLFDDKVMKQLKRRRYTGWGRLSRKLINGIRDKQSGKTILDFLKSDGFANRNFMQLIHDDSLTFKEDIQKAQVSGQGDSLHEHIANLAGSPAIKKGILQTVKVVDELVKVMGRHKPENIVIEMARENQTTQKGQKNSRERMKRIEEGIKELGSQILKEHPVENTQLQNEKLYLYYLQNGRDMYVDQELDINRLSDYDVDHIVPQSFLKDDSIDNKVLTRSDKARGKSDNVPSEEVVKKMKNYWRQLLNAKLITQRKFDNLTKAERGGLSELDKAGFIKRQLVETRQITKHVAQILDSRMNTKYDENDKLIREVKVITLKSKLVSDFRKDFQFYKVREINNYHHAHDAYLNAVVGTALIKKYPKLESEFVYGDYKVYDVRKMIAKSEQEIGKATAKYFFYSNIMNFFKTEITLANGEIRKRPLIETNGETGEIVWDKGRDFATVRKVLSMPQVNIVKKTEVQTGGFSKESILPKRNSDKLIARKKDWDPKKYGGFDSPTVAYSVLVVAKVEKGKSKKLKSVKELLGITIMERSSFEKNPIDFLEAKGYKEVKKDLIIKLPKYSLFELENGRKRMLASAGELQKGNELALPSKYVNFLYLASHYEKLKGSPEDNEQKQLFVEQHKHYLDEIIEQISEFSKRVILADANLDKVLSAYNKHRDKPIREQAENIIHLFTLTNLGAPAAFKYFDTTIDRKRYTSTKEVLDATLIHQSITGLYETRIDLSQLGGDGGEAAAKEAAAKGGTLNIEDEYRLHETSKEPDVPLGSTWLSDFPQAWAETGGMGLAVRQAPLIIPLKATSTPVSIKQYPMSQEARLGIKPHIQRLLDQGILVPCQSPWNTPLLPVKKPGTNDYRPVQDLREVNKRVEDIHPTVPNPYNLLSGLPPSHQWYTVLDLKDAFFCLRLHPTSQPLFAFEWRDPEMGISGQLTWTRLPQGFKNSPTLFNEALHRDLADFRIQHPDLILLQYVDDLLLAATSEQDCQRGTRALLQTLGNLGYRASAKKAQICQKQVKYLGYLLKEGQRWLTEARKETVMGQPTPKTPRQLREFLGTAGFCRLWIPGFAEMAAPLYPLTKPGTLFNWGPDQQKAYQEIKQALLTAPALGLPDLTKPFELFVDEKQGYAKGVLTQKLGPWRRPVAYLSKKLDPVAAGWPPCLRMVAAIAVLTKDAGKLTMGQPLVILAPHAVEALVKQPPDRWLSNARMTHYQAMLLDTDRVQFGPVVALNPATLLPLPEKEAPHDCLEILAETHGTRPDLTDQPIPDADYTWYTDGSSFLQEGQRRAGAAVTTETEVIWARALPAGTSAQRAELIALTQALKMAEGKKLNVYTDSRYAFATAHVHGEIYRRRGWLTSEGREIKNKNEILALLKALFLPKRLSIIHCPGHQKGNSAEARGNRMADQAAREAAMKAVLETSTLLAGKRTADGSEFEKRTADGSEFESPKKKAKVE

SEQ ID NO: 992 - protein, 2091 aa, synthetic construct
MPAAKRVKLDGGDKKYSIGLDIGTNSVGWAVITDEYKVPSKKFKVLGNTDRHSIKKNLIGALLFDSGETAEATRLKRTARRRYTRRKNRICYLQEIFSNEMAKVDDSFFHRLEESFLVEEDKKHERHPIFGNIVDEVAYHEKYPTIYHLRKKLVDSTDKADLRLIYLALAHMIKFRGHFLIEGDLNPDNSDVDKLFIQLVQTYNQLFEENPINASGVDAKAILSARLSKSRRLENLIAQLPGEKKNGLFGNLIALSLGLTPNFKSNFDLAEDAKLQLSKDTYDDDLDNLLAQIGDQYADLFLAAKNLSDAILLSDILRVNTEITKAPLSASMIKRYDEHHQDLTLLKALVRQQLPEKYKEIFFDQSKNGYAGYIDGGASQEEFYKFIKPILEKMDGTEELLVKLNREDLLRKQRTFDNGSIPHQIHLGELHAILRRQEDFYPFLKDNREKIEKILTFRIPYYVGPLARGNSRFAWMTRKSEETITPWNFEEVVDKGASAQSFIERMTNFDKNLPNEKVLPKHSLLYEYFTVYNELTKVKYVTEGMRKPAFLSGEQKKAIVDLLFKTNRKVTVKQLKEDYFKKIECFDSVEISGVEDRFNASLGTYHDLLKIIKDKDFLDNEENEDILEDIVLTLTLFEDREMIEERLKTYAHLFDDKVMKQLKRRRYTGWGRLSRKLINGIRDKQSGKTILDFLKSDGFANRNFMQLIHDDSLTFKEDIQKAQVSGQGDSLHEHIANLAGSPAIKKGILQTVKVVDELVKVMGRHKPENIVIEMARENQTTQKGQKNSRERMKRIEEGIKELGSQILKEHPVENTQLQNEKLYLYYLQNGRDMYVDQELDINRLSDYDVDHIVPQSFLKDDSIDNKVLTRSDKARGKSDNVPSEEVVKKMKNYWRQLLNAKLITQRKFDNLTKAERGGLSELDKAGFIKRQLVETRQITKHVAQILDSRMNTKYDENDKLIREVKVITLKSKLVSDFRKDFQFYKVREINNYHHAHDAYLNAVVGTALIKKYPKLESEFVYGDYKVYDVRKMIAKSEQEIGKATAKYFFYSNIMNFFKTEITLANGEIRKRPLIETNGETGEIVWDKGRDFATVRKVLSMPQVNIVKKTEVQTGGFSKESILPKRNSDKLIARKKDWDPKKYGGFDSPTVAYSVLVVAKVEKGKSKKLKSVKELLGITIMERSSFEKNPIDFLEAKGYKEVKKDLIIKLPKYSLFELENGRKRMLASAGELQKGNELALPSKYVNFLYLASHYEKLKGSPEDNEQKQLFVEQHKHYLDEIIEQISEFSKRVILADANLDKVLSAYNKHRDKPIREQAENIIHLFTLTNLGAPAAFKYFDTTIDRKRYTSTKEVLDATLIHQSITGLYETRIDLSQLGGDGGGSSGGGGGTLNIEDEYRLHETSKEPDVPLGSTWLSDFPQAWAETGGMGLAVRQAPLIIPLKATSTPVSIKQYPMSQEARLGIKPHIQRLLDQGILVPCQSPWNTPLLPVKKPGTNDYRPVQDLREVNKRVEDIHPTVPNPYNLLSGLPPSHQWYTVLDLKDAFFCLRLHPTSQPLFAFEWRDPEMGISGQLTWTRLPQGFKNSPTLFNEALHRDLADFRIQHPDLILLQYVDDLLLAATSEQDCQRGTRALLQTLGNLGYRASAKKAQICQKQVKYLGYLLKEGQRWLTEARKETVMGQPTPKTPRQLREFLGTAGFCRLWIPGFAEMAAPLYPLTKPGTLFNWGPDQQKAYQEIKQALLTAPALGLPDLTKPFELFVDEKQGYAKGVLTQKLGPWRRPVAYLSKKLDPVAAGWPPCLRMVAAIAVLTKDAGKLTMGQPLVILAPHAVEALVKQPPDRWLSNARMTHYQAMLLDTDRVQFGPVVALNPATLLPLPEKEAPHDCLEILAETHGTRPDLTDQPIPDADYTWYTDGSSFLQEGQRRAGAAVTTETEVIWARALPAGTSAQRAELIALTQALKMAEGKKLNVYTDSRYAFATAHVHGEIYRRRGWLTSEGREIKNKNEILALLKALFLPKRLSIIHCPGHQKGNSAEARGNRMADQAAREAAMKAVLETSTLLAGKRTADGSEFEKRTADGSEFESPKKKAKVE

SEQ ID NO: 993 - protein, 2093 aa, synthetic construct
MPAAKRVKLDGGDKKYSIGLDIGTNSVGWAVITDEYKVPSKKFKVLGNTDRHSIKKNLIGALLFDSGETAEATRLKRTARRRYTRRKNRICYLQEIFSNEMAKVDDSFFHRLEESFLVEEDKKHERHPIFGNIVDEVAYHEKYPTIYHLRKKLVDSTDKADLRLIYLALAHMIKFRGHFLIEGDLNPDNSDVDKLFIQLVQTYNQLFEENPINASGVDAKAILSARLSKSRRLENLIAQLPGEKKNGLFGNLIALSLGLTPNFKSNFDLAEDAKLQLSKDTYDDDLDNLLAQIGDQYADLFLAAKNLSDAILLSDILRVNTEITKAPLSASMIKRYDEHHQDLTLLKALVRQQLPEKYKEIFFDQSKNGYAGYIDGGASQEEFYKFIKPILEKMDGTEELLVKLNREDLLRKQRTFDNGSIPHQIHLGELHAILRRQEDFYPFLKDNREKIEKILTFRIPYYVGPLARGNSRFAWMTRKSEETITPWNFEEVVDKGASAQSFIERMTNFDKNLPNEKVLPKHSLLYEYFTVYNELTKVKYVTEGMRKPAFLSGEQKKAIVDLLFKTNRKVTVKQLKEDYFKKIECFDSVEISGVEDRFNASLGTYHDLLKIIKDKDFLDNEENEDILEDIVLTLTLFEDREMIEERLKTYAHLFDDKVMKQLKRRRYTGWGRLSRKLINGIRDKQSGKTILDFLKSDGFANRNFMQLIHDDSLTFKEDIQKAQVSGQGDSLHEHIANLAGSPAIKKGILQTVKVVDELVKVMGRHKPENIVIEMARENQTTQKGQKNSRERMKRIEEGIKELGSQILKEHPVENTQLQNEKLYLYYLQNGRDMYVDQELDINRLSDYDVDHIVPQSFLKDDSIDNKVLTRSDKARGKSDNVPSEEVVKKMKNYWRQLLNAKLITQRKFDNLTKAERGGLSELDKAGFIKRQLVETRQITKHVAQILDSRMNTKYDENDKLIREVKVITLKSKLVSDFRKDFQFYKVREINNYHHAHDAYLNAVVGTALIKKYPKLESEFVYGDYKVYDVRKMIAKSEQEIGKATAKYFFYSNIMNFFKTEITLANGEIRKRPLIETNGETGEIVWDKGRDFATVRKVLSMPQVNIVKKTEVQTGGFSKESILPKRNSDKLIARKKDWDPKKYGGFDSPTVAYSVLVVAKVEKGKSKKLKSVKELLGITIMERSSFEKNPIDFLEAKGYKEVKKDLIIKLPKYSLFELENGRKRMLASAGELQKGNELALPSKYVNFLYLASHYEKLKGSPEDNEQKQLFVEQHKHYLDEIIEQISEFSKRVILADANLDKVLSAYNKHRDKPIREQAENIIHLFTLTNLGAPAAFKYFDTTIDRKRYTSTKEVLDATLIHQSITGLYETRIDLSQLGGDGGGGSEAAAKGGTLNIEDEYRLHETSKEPDVPLGSTWLSDFPQAWAETGGMGLAVRQAPLIIPLKATSTPVSIKQYPMSQEARLGIKPHIQRLLDQGILVPCQSPWNTPLLPVKKPGTNDYRPVQDLREVNKRVEDIHPTVPNPYNLLSGLPPSHQWYTVLDLKDAFFCLRLHPTSQPLFAFEWRDPEMGISGQLTWTRLPQGFKNSPTLFNEALHRDLADFRIQHPDLILLQYVDDLLLAATSEQDCQRGTRALLQTLGNLGYRASAKKAQICQKQVKYLGYLLKEGQRWLTEARKETVMGQPTPKTPRQLREFLGTAGFCRLWIPGFAEMAAPLYPLTKPGTLFNWGPDQQKAYQEIKQALLTAPALGLPDLTKPFELFVDEKQGYAKGVLTQKLGPWRRPVAYLSKKLDPVAAGWPPCLRMVAAIAVLTKDAGKLTMGQPLVILAPHAVEALVKQPPDRWLSNARMTHYQAMLLDTDRVQFGPVVALNPATLLPLPEKEAPHDCLEILAETHGTRPDLTDQPIPDADYTWYTDGSSFLQEGQRRAGAAVTTETEVIWARALPAGTSAQRAELIALTQALKMAEGKKLNVYTDSRYAFATAHVHGEIYRRRGWLTSEGREIKNKNEILALLKALFLPKRLSIIHCPGHQKGNSAEARGNRMADQAAREAAMKAVLETSTLLAGKRTADGSEFEKRTADGSEFESPKKKAKVE

SEQ ID NO: 994 - protein, 2100 aa, synthetic construct
MPAAKRVKLDGGDKKYSIGLDIGTNSVGWAVITDEYKVPSKKFKVLGNTDRHSIKKNLIGALLFDSGETAEATRLKRTARRRYTRRKNRICYLQEIFSNEMAKVDDSFFHRLEESFLVEEDKKHERHPIFGNIVDEVAYHEKYPTIYHLRKKLVDSTDKADLRLIYLALAHMIKFRGHFLIEGDLNPDNSDVDKLFIQLVQTYNQLFEENPINASGVDAKAILSARLSKSRRLENLIAQLPGEKKNGLFGNLIALSLGLTPNFKSNFDLAEDAKLQLSKDTYDDDLDNLLAQIGDQYADLFLAAKNLSDAILLSDILRVNTEITKAPLSASMIKRYDEHHQDLTLLKALVRQQLPEKYKEIFFDQSKNGYAGYIDGGASQEEFYKFIKPILEKMDGTEELLVKLNREDLLRKQRTFDNGSIPHQIHLGELHAILRRQEDFYPFLKDNREKIEKILTFRIPYYVGPLARGNSRFAWMTRKSEETITPWNFEEVVDKGASAQSFIERMTNFDKNLPNEKVLPKHSLLYEYFTVYNELTKVKYVTEGMRKPAFLSGEQKKAIVDLLFKTNRKVTVKQLKEDYFKKIECFDSVEISGVEDRFNASLGTYHDLLKIIKDKDFLDNEENEDILEDIVLTLTLFEDREMIEERLKTYAHLFDDKVMKQLKRRRYTGWGRLSRKLINGIRDKQSGKTILDFLKSDGFANRNFMQLIHDDSLTFKEDIQKAQVSGQGDSLHEHIANLAGSPAIKKGILQTVKVVDELVKVMGRHKPENIVIEMARENQTTQKGQKNSRERMKRIEEGIKELGSQILKEHPVENTQLQNEKLYLYYLQNGRDMYVDQELDINRLSDYDVDHIVPQSFLKDDSIDNKVLTRSDKARGKSDNVPSEEVVKKMKNYWRQLLNAKLITQRKFDNLTKAERGGLSELDKAGFIKRQLVETRQITKHVAQILDSRMNTKYDENDKLIREVKVITLKSKLVSDFRKDFQFYKVREINNYHHAHDAYLNAVVGTALIKKYPKLESEFVYGDYKVYDVRKMIAKSEQEIGKATAKYFFYSNIMNFFKTEITLANGEIRKRPLIETNGETGEIVWDKGRDFATVRKVLSMPQVNIVKKTEVQTGGFSKESILPKRNSDKLIARKKDWDPKKYGGFDSPTVAYSVLVVAKVEKGKSKKLKSVKELLGITIMERSSFEKNPIDFLEAKGYKEVKKDLIIKLPKYSLFELENGRKRMLASAGELQKGNELALPSKYVNFLYLASHYEKLKGSPEDNEQKQLFVEQHKHYLDEIIEQISEFSKRVILADANLDKVLSAYNKHRDKPIREQAENIIHLFTLTNLGAPAAFKYFDTTIDRKRYTSTKEVLDATLIHQSITGLYETRIDLSQLGGDGGGGSGGSGGSGGSGGSGGTLNIEDEYRLHETSKEPDVPLGSTWLSDFPQAWAETGGMGLAVRQAPLIIPLKATSTPVSIKQYPMSQEARLGIKPHIQRLLDQGILVPCQSPWNTPLLPVKKPGTNDYRPVQDLREVNKRVEDIHPTVPNPYNLLSGLPPSHQWYTVLDLKDAFFCLRLHPTSQPLFAFEWRDPEMGISGQLTWTRLPQGFKNSPTLFNEALHRDLADFRIQHPDLILLQYVDDLLLAATSEQDCQRGTRALLQTLGNLGYRASAKKAQICQKQVKYLGYLLKEGQRWLTEARKETVMGQPTPKTPRQLREFLGTAGFCRLWIPGFAEMAAPLYPLTKPGTLFNWGPDQQKAYQEIKQALLTAPALGLPDLTKPFELFVDEKQGYAKGVLTQKLGPWRRPVAYLSKKLDPVAAGWPPCLRMVAAIAVLTKDAGKLTMGQPLVILAPHAVEALVKQPPDRWLSNARMTHYQAMLLDTDRVQFGPVVALNPATLLPLPEKEAPHDCLEILAETHGTRPDLTDQPIPDADYTWYTDGSSFLQEGQRRAGAAVTTETEVIWARALPAGTSAQRAELIALTQALKMAEGKKLNVYTDSRYAFATAHVHGEIYRRRGWLTSEGREIKNKNEILALLKALFLPKRLSIIHCPGHQKGNSAEARGNRMADQAAREAAMKAVLETSTLLAGKRTADGSEFEKRTADGSEFESPKKKAKVE

SEQ ID NO: 995 - protein, 2094 aa, synthetic construct
MPAAKRVKLDGGDKKYSIGLDIGTNSVGWAVITDEYKVPSKKFKVLGNTDRHSIKKNLIGALLFDSGETAEATRLKRTARRRYTRRKNRICYLQEIFSNEMAKVDDSFFHRLEESFLVEEDKKHERHPIFGNIVDEVAYHEKYPTIYHLRKKLVDSTDKADLRLIYLALAHMIKFRGHFLIEGDLNPDNSDVDKLFIQLVQTYNQLFEENPINASGVDAKAILSARLSKSRRLENLIAQLPGEKKNGLFGNLIALSLGLTPNFKSNFDLAEDAKLQLSKDTYDDDLDNLLAQIGDQYADLFLAAKNLSDAILLSDILRVNTEITKAPLSASMIKRYDEHHQDLTLLKALVRQQLPEKYKEIFFDQSKNGYAGYIDGGASQEEFYKFIKPILEKMDGTEELLVKLNREDLLRKQRTFDNGSIPHQIHLGELHAILRRQEDFYPFLKDNREKIEKILTFRIPYYVGPLARGNSRFAWMTRKSEETITPWNFEEVVDKGASAQSFIERMTNFDKNLPNEKVLPKHSLLYEYFTVYNELTKVKYVTEGMRKPAFLSGEQKKAIVDLLFKTNRKVTVKQLKEDYFKKIECFDSVEISGVEDRFNASLGTYHDLLKIIKDKDFLDNEENEDILEDIVLTLTLFEDREMIEERLKTYAHLFDDKVMKQLKRRRYTGWGRLSRKLINGIRDKQSGKTILDFLKSDGFANRNFMQLIHDDSLTFKEDIQKAQVSGQGDSLHEHIANLAGSPAIKKGILQTVKVVDELVKVMGRHKPENIVIEMARENQTTQKGQKNSRERMKRIEEGIKELGSQILKEHPVENTQLQNEKLYLYYLQNGRDMYVDQELDINRLSDYDVDHIVPQSFLKDDSIDNKVLTRSDKARGKSDNVPSEEVVKKMKNYWRQLLNAKLITQRKFDNLTKAERGGLSELDKAGFIKRQLVETRQITKHVAQILDSRMNTKYDENDKLIREVKVITLKSKLVSDFRKDFQFYKVREINNYHHAHDAYLNAVVGTALIKKYPKLESEFVYGDYKVYDVRKMIAKSEQEIGKATAKYFFYSNIMNFFKTEITLANGEIRKRPLIETNGETGEIVWDKGRDFATVRKVLSMPQVNIVKKTEVQTGGFSKESILPKRNSDKLIARKKDWDPKKYGGFDSPTVAYSVLVVAKVEKGKSKKLKSVKELLGITIMERSSFEKNPIDFLEAKGYKEVKKDLIIKLPKYSLFELENGRKRMLASAGELQKGNELALPSKYVNFLYLASHYEKLKGSPEDNEQKQLFVEQHKHYLDEIIEQISEFSKRVILADANLDKVLSAYNKHRDKPIREQAENIIHLFTLTNLGAPAAFKYFDTTIDRKRYTSTKEVLDATLIHQSITGLYETRIDLSQLGGDGGGGSGSSGGGGGTLNIEDEYRLHETSKEPDVPLGSTWLSDFPQAWAETGGMGLAVRQAPLIIPLKATSTPVSIKQYPMSQEARLGIKPHIQRLLDQGILVPCQSPWNTPLLPVKKPGTNDYRPVQDLREVNKRVEDIHPTVPNPYNLLSGLPPSHQWYTVLDLKDAFFCLRLHPTSQPLFAFEWRDPEMGISGQLTWTRLPQGFKNSPTLFNEALHRDLADFRIQHPDLILLQYVDDLLLAATSEQDCQRGTRALLQTLGNLGYRASAKKAQICQKQVKYLGYLLKEGQRWLTEARKETVMGQPTPKTPRQLREFLGTAGFCRLWIPGFAEMAAPLYPLTKPGTLFNWGPDQQKAYQEIKQALLTAPALGLPDLTKPFELFVDEKQGYAKGVLTQKLGPWRRPVAYLSKKLDPVAAGWPPCLRMVAAIAVLTKDAGKLTMGQPLVILAPHAVEALVKQPPDRWLSNARMTHYQAMLLDTDRVQFGPVVALNPATLLPLPEKEAPHDCLEILAETHGTRPDLTDQPIPDADYTWYTDGSSFLQEGQRRAGAAVTTETEVIWARALPAGTSAQRAELIALTQALKMAEGKKLNVYTDSRYAFATAHVHGEIYRRRGWLTSEGREIKNKNEILALLKALFLPKRLSIIHCPGHQKGNSAEARGNRMADQAAREAAMKAVLETSTLLAGKRTADGSEFEKRTADGSEFESPKKKAKVE

SEQ ID NO: 996 - protein, 2100 aa, synthetic construct
MPAAKRVKLDGGDKKYSIGLDIGTNSVGWAVITDEYKVPSKKFKVLGNTDRHSIKKNLIGALLFDSGETAEATRLKRTARRRYTRRKNRICYLQEIFSNEMAKVDDSFFHRLEESFLVEEDKKHERHPIFGNIVDEVAYHEKYPTIYHLRKKLVDSTDKADLRLIYLALAHMIKFRGHFLIEGDLNPDNSDVDKLFIQLVQTYNQLFEENPINASGVDAKAILSARLSKSRRLENLIAQLPGEKKNGLFGNLIALSLGLTPNFKSNFDLAEDAKLQLSKDTYDDDLDNLLAQIGDQYADLFLAAKNLSDAILLSDILRVNTEITKAPLSASMIKRYDEHHQDLTLLKALVRQQLPEKYKEIFFDQSKNGYAGYIDGGASQEEFYKFIKPILEKMDGTEELLVKLNREDLLRKQRTFDNGSIPHQIHLGELHAILRRQEDFYPFLKDNREKIEKILTFRIPYYVGPLARGNSRFAWMTRKSEETITPWNFEEVVDKGASAQSFIERMTNFDKNLPNEKVLPKHSLLYEYFTVYNELTKVKYVTEGMRKPAFLSGEQKKAIVDLLFKTNRKVTVKQLKEDYFKKIECFDSVEISGVEDRFNASLGTYHDLLKIIKDKDFLDNEENEDILEDIVLTLTLFEDREMIEERLKTYAHLFDDKVMKQLKRRRYTGWGRLSRKLINGIRDKQSGKTILDFLKSDGFANRNFMQLIHDDSLTFKEDIQKAQVSGQGDSLHEHIANLAGSPAIKKGILQTVKVVDELVKVMGRHKPENIVIEMARENQTTQKGQKNSRERMKRIEEGIKELGSQILKEHPVENTQLQNEKLYLYYLQNGRDMYVDQELDINRLSDYDVDHIVPQSFLKDDSIDNKVLTRSDKARGKSDNVPSEEVVKKMKNYWRQLLNAKLITQRKFDNLTKAERGGLSELDKAGFIKRQLVETRQITKHVAQILDSRMNTKYDENDKLIREVKVITLKSKLVSDFRKDFQFYKVREINNYHHAHDAYLNAVVGTALIKKYPKLESEFVYGDYKVYDVRKMIAKSEQEIGKATAKYFFYSNIMNFFKTEITLANGEIRKRPLIETNGETGEIVWDKGRDFATVRKVLSMPQVNIVKKTEVQTGGFSKESILPKRNSDKLIARKKDWDPKKYGGFDSPTVAYSVLVVAKVEKGKSKKLKSVKELLGITIMERSSFEKNPIDFLEAKGYKEVKKDLIIKLPKYSLFELENGRKRMLASAGELQKGNELALPSKYVNFLYLASHYEKLKGSPEDNEQKQLFVEQHKHYLDEIIEQISEFSKRVILADANLDKVLSAYNKHRDKPIREQAENIIHLFTLTNLGAPAAFKYFDTTIDRKRYTSTKEVLDATLIHQSITGLYETRIDLSQLGGDGGEAAAKEAAAKEAAAKGGTLNIEDEYRLHETSKEPDVPLGSTWLSDFPQAWAETGGMGLAVRQAPLIIPLKATSTPVSIKQYPMSQEARLGIKPHIQRLLDQGILVPCQSPWNTPLLPVKKPGTNDYRPVQDLREVNKRVEDIHPTVPNPYNLLSGLPPSHQWYTVLDLKDAFFCLRLHPTSQPLFAFEWRDPEMGISGQLTWTRLPQGFKNSPTLFNEALHRDLADFRIQHPDLILLQYVDDLLLAATSEQDCQRGTRALLQTLGNLGYRASAKKAQICQKQVKYLGYLLKEGQRWLTEARKETVMGQPTPKTPRQLREFLGTAGFCRLWIPGFAEMAAPLYPLTKPGTLFNWGPDQQKAYQEIKQALLTAPALGLPDLTKPFELFVDEKQGYAKGVLTQKLGPWRRPVAYLSKKLDPVAAGWPPCLRMVAAIAVLTKDAGKLTMGQPLVILAPHAVEALVKQPPDRWLSNARMTHYQAMLLDTDRVQFGPVVALNPATLLPLPEKEAPHDCLEILAETHGTRPDLTDQPIPDADYTWYTDGSSFLQEGQRRAGAAVTTETEVIWARALPAGTSAQRAELIALTQALKMAEGKKLNVYTDSRYAFATAHVHGEIYRRRGWLTSEGREIKNKNEILALLKALFLPKRLSIIHCPGHQKGNSAEARGNRMADQAAREAAMKAVLETSTLLAGKRTADGSEFEKRTADGSEFESPKKKAKVE

SEQ ID NO: 997 - protein, 2088 aa, synthetic construct
MPAAKRVKLDGGDKKYSIGLDIGTNSVGWAVITDEYKVPSKKFKVLGNTDRHSIKKNLIGALLFDSGETAEATRLKRTARRRYTRRKNRICYLQEIFSNEMAKVDDSFFHRLEESFLVEEDKKHERHPIFGNIVDEVAYHEKYPTIYHLRKKLVDSTDKADLRLIYLALAHMIKFRGHFLIEGDLNPDNSDVDKLFIQLVQTYNQLFEENPINASGVDAKAILSARLSKSRRLENLIAQLPGEKKNGLFGNLIALSLGLTPNFKSNFDLAEDAKLQLSKDTYDDDLDNLLAQIGDQYADLFLAAKNLSDAILLSDILRVNTEITKAPLSASMIKRYDEHHQDLTLLKALVRQQLPEKYKEIFFDQSKNGYAGYIDGGASQEEFYKFIKPILEKMDGTEELLVKLNREDLLRKQRTFDNGSIPHQIHLGELHAILRRQEDFYPFLKDNREKIEKILTFRIPYYVGPLARGNSRFAWMTRKSEETITPWNFEEVVDKGASAQSFIERMTNFDKNLPNEKVLPKHSLLYEYFTVYNELTKVKYVTEGMRKPAFLSGEQKKAIVDLLFKTNRKVTVKQLKEDYFKKIECFDSVEISGVEDRFNASLGTYHDLLKIIKDKDFLDNEENEDILEDIVLTLTLFEDREMIEERLKTYAHLFDDKVMKQLKRRRYTGWGRLSRKLINGIRDKQSGKTILDFLKSDGFANRNFMQLIHDDSLTFKEDIQKAQVSGQGDSLHEHIANLAGSPAIKKGILQTVKVVDELVKVMGRHKPENIVIEMARENQTTQKGQKNSRERMKRIEEGIKELGSQILKEHPVENTQLQNEKLYLYYLQNGRDMYVDQELDINRLSDYDVDHIVPQSFLKDDSIDNKVLTRSDKARGKSDNVPSEEVVKKMKNYWRQLLNAKLITQRKFDNLTKAERGGLSELDKAGFIKRQLVETRQITKHVAQILDSRMNTKYDENDKLIREVKVITLKSKLVSDFRKDFQFYKVREINNYHHAHDAYLNAVVGTALIKKYPKLESEFVYGDYKVYDVRKMIAKSEQEIGKATAKYFFYSNIMNFFKTEITLANGEIRKRPLIETNGETGEIVWDKGRDFATVRKVLSMPQVNIVKKTEVQTGGFSKESILPKRNSDKLIARKKDWDPKKYGGFDSPTVAYSVLVVAKVEKGKSKKLKSVKELLGITIMERSSFEKNPIDFLEAKGYKEVKKDLIIKLPKYSLFELENGRKRMLASAGELQKGNELALPSKYVNFLYLASHYEKLKGSPEDNEQKQLFVEQHKHYLDEIIEQISEFSKRVILADANLDKVLSAYNKHRDKPIREQAENIIHLFTLTNLGAPAAFKYFDTTIDRKRYTSTKEVLDATLIHQSITGLYETRIDLSQLGGDGGGGGGGTLNIEDEYRLHETSKEPDVPLGSTWLSDFPQAWAETGGMGLAVRQAPLIIPLKATSTPVSIKQYPMSQEARLGIKPHIQRLLDQGILVPCQSPWNTPLLPVKKPGTNDYRPVQDLREVNKRVEDIHPTVPNPYNLLSGLPPSHQWYTVLDLKDAFFCLRLHPTSQPLFAFEWRDPEMGISGQLTWTRLPQGFKNSPTLFNEALHRDLADFRIQHPDLILLQYVDDLLLAATSEQDCQRGTRALLQTLGNLGYRASAKKAQICQKQVKYLGYLLKEGQRWLTEARKETVMGQPTPKTPRQLREFLGTAGFCRLWIPGFAEMAAPLYPLTKPGTLFNWGPDQQKAYQEIKQALLTAPALGLPDLTKPFELFVDEKQGYAKGVLTQKLGPWRRPVAYLSKKLDPVAAGWPPCLRMVAAIAVLTKDAGKLTMGQPLVILAPHAVEALVKQPPDRWLSNARMTHYQAMLLDTDRVQFGPVVALNPATLLPLPEKEAPHDCLEILAETHGTRPDLTDQPIPDADYTWYTDGSSFLQEGQRRAGAAVTTETEVIWARALPAGTSAQRAELIALTQALKMAEGKKLNVYTDSRYAFATAHVHGEIYRRRGWLTSEGREIKNKNEILALLKALFLPKRLSIIHCPGHQKGNSAEARGNRMADQAAREAAMKAVLETSTLLAGKRTADGSEFEKRTADGSEFESPKKKAKVE

SEQ ID NO: 998 - protein, 2090 aa, synthetic construct
MPAAKRVKLDGGDKKYSIGLDIGTNSVGWAVITDEYKVPSKKFKVLGNTDRHSIKKNLIGALLFDSGETAEATRLKRTARRRYTRRKNRICYLQEIFSNEMAKVDDSFFHRLEESFLVEEDKKHERHPIFGNIVDEVAYHEKYPTIYHLRKKLVDSTDKADLRLIYLALAHMIKFRGHFLIEGDLNPDNSDVDKLFIQLVQTYNQLFEENPINASGVDAKAILSARLSKSRRLENLIAQLPGEKKNGLFGNLIALSLGLTPNFKSNFDLAEDAKLQLSKDTYDDDLDNLLAQIGDQYADLFLAAKNLSDAILLSDILRVNTEITKAPLSASMIKRYDEHHQDLTLLKALVRQQLPEKYKEIFFDQSKNGYAGYIDGGASQEEFYKFIKPILEKMDGTEELLVKLNREDLLRKQRTFDNGSIPHQIHLGELHAILRRQEDFYPFLKDNREKIEKILTFRIPYYVGPLARGNSRFAWMTRKSEETITPWNFEEVVDKGASAQSFIERMTNFDKNLPNEKVLPKHSLLYEYFTVYNELTKVKYVTEGMRKPAFLSGEQKKAIVDLLFKTNRKVTVKQLKEDYFKKIECFDSVEISGVEDRFNASLGTYHDLLKIIKDKDFLDNEENEDILEDIVLTLTLFEDREMIEERLKTYAHLFDDKVMKQLKRRRYTGWGRLSRKLINGIRDKQSGKTILDFLKSDGFANRNFMQLIHDDSLTFKEDIQKAQVSGQGDSLHEHIANLAGSPAIKKGILQTVKVVDELVKVMGRHKPENIVIEMARENQTTQKGQKNSRERMKRIEEGIKELGSQILKEHPVENTQLQNEKLYLYYLQNGRDMYVDQELDINRLSDYDVDHIVPQSFLKDDSIDNKVLTRSDKARGKSDNVPSEEVVKKMKNYWRQLLNAKLITQRKFDNLTKAERGGLSELDKAGFIKRQLVETRQITKHVAQILDSRMNTKYDENDKLIREVKVITLKSKLVSDFRKDFQFYKVREINNYHHAHDAYLNAVVGTALIKKYPKLESEFVYGDYKVYDVRKMIAKSEQEIGKATAKYFFYSNIMNFFKTEITLANGEIRKRPLIETNGETGEIVWDKGRDFATVRKVLSMPQVNIVKKTEVQTGGFSKESILPKRNSDKLIARKKDWDPKKYGGFDSPTVAYSVLVVAKVEKGKSKKLKSVKELLGITIMERSSFEKNPIDFLEAKGYKEVKKDLIIKLPKYSLFELENGRKRMLASAGELQKGNELALPSKYVNFLYLASHYEKLKGSPEDNEQKQLFVEQHKHYLDEIIEQISEFSKRVILADANLDKVLSAYNKHRDKPIREQAENIIHLFTLTNLGAPAAFKYFDTTIDRKRYTSTKEVLDATLIHQSITGLYETRIDLSQLGGDGGGGGGSGGTLNIEDEYRLHETSKEPDVPLGSTWLSDFPQAWAETGGMGLAVRQAPLIIPLKATSTPVSIKQYPMSQEARLGIKPHIQRLLDQGILVPCQSPWNTPLLPVKKPGTNDYRPVQDLREVNKRVEDIHPTVPNPYNLLSGLPPSHQWYTVLDLKDAFFCLRLHPTSQPLFAFEWRDPEMGISGQLTWTRLPQGFKNSPTLFNEALHRDLADFRIQHPDLILLQYVDDLLLAATSEQDCQRGTRALLQTLGNLGYRASAKKAQICQKQVKYLGYLLKEGQRWLTEARKETVMGQPTPKTPRQLREFLGTAGFCRLWIPGFAEMAAPLYPLTKPGTLFNWGPDQQKAYQEIKQALLTAPALGLPDLTKPFELFVDEKQGYAKGVLTQKLGPWRRPVAYLSKKLDPVAAGWPPCLRMVAAIAVLTKDAGKLTMGQPLVILAPHAVEALVKQPPDRWLSNARMTHYQAMLLDTDRVQFGPVVALNPATLLPLPEKEAPHDCLEILAETHGTRPDLTDQPIPDADYTWYTDGSSFLQEGQRRAGAAVTTETEVIWARALPAGTSAQRAELIALTQALKMAEGKKLNVYTDSRYAFATAHVHGEIYRRRGWLTSEGREIKNKNEILALLKALFLPKRLSIIHCPGHQKGNSAEARGNRMADQAAREAAMKAVLETSTLLAGKRTADGSEFEKRTADGSEFESPKKKAKVE

SEQ ID NO: 999 - protein, 2094 aa, synthetic construct
MPAAKRVKLDGGDKKYSIGLDIGTNSVGWAVITDEYKVPSKKFKVLGNTDRHSIKKNLIGALLFDSGETAEATRLKRTARRRYTRRKNRICYLQEIFSNEMAKVDDSFFHRLEESFLVEEDKKHERHPIFGNIVDEVAYHEKYPTIYHLRKKLVDSTDKADLRLIYLALAHMIKFRGHFLIEGDLNPDNSDVDKLFIQLVQTYNQLFEENPINASGVDAKAILSARLSKSRRLENLIAQLPGEKKNGLFGNLIALSLGLTPNFKSNFDLAEDAKLQLSKDTYDDDLDNLLAQIGDQYADLFLAAKNLSDAILLSDILRVNTEITKAPLSASMIKRYDEHHQDLTLLKALVRQQLPEKYKEIFFDQSKNGYAGYIDGGASQEEFYKFIKPILEKMDGTEELLVKLNREDLLRKQRTFDNGSIPHQIHLGELHAILRRQEDFYPFLKDNREKIEKILTFRIPYYVGPLARGNSRFAWMTRKSEETITPWNFEEVVDKGASAQSFIERMTNFDKNLPNEKVLPKHSLLYEYFTVYNELTKVKYVTEGMRKPAFLSGEQKKAIVDLLFKTNRKVTVKQLKEDYFKKIECFDSVEISGVEDRFNASLGTYHDLLKIIKDKDFLDNEENEDILEDIVLTLTLFEDREMIEERLKTYAHLFDDKVMKQLKRRRYTGWGRLSRKLINGIRDKQSGKTILDFLKSDGFANRNFMQLIHDDSLTFKEDIQKAQVSGQGDSLHEHIANLAGSPAIKKGILQTVKVVDELVKVMGRHKPENIVIEMARENQTTQKGQKNSRERMKRIEEGIKELGSQILKEHPVENTQLQNEKLYLYYLQNGRDMYVDQELDINRLSDYDVDHIVPQSFLKDDSIDNKVLTRSDKARGKSDNVPSEEVVKKMKNYWRQLLNAKLITQRKFDNLTKAERGGLSELDKAGFIKRQLVETRQITKHVAQILDSRMNTKYDENDKLIREVKVITLKSKLVSDFRKDFQFYKVREINNYHHAHDAYLNAVVGTALIKKYPKLESEFVYGDYKVYDVRKMIAKSEQEIGKATAKYFFYSNIMNFFKTEITLANGEIRKRPLIETNGETGEIVWDKGRDFATVRKVLSMPQVNIVKKTEVQTGGFSKESILPKRNSDKLIARKKDWDPKKYGGFDSPTVAYSVLVVAKVEKGKSKKLKSVKELLGITIMERSSFEKNPIDFLEAKGYKEVKKDLIIKLPKYSLFELENGRKRMLASAGELQKGNELALPSKYVNFLYLASHYEKLKGSPEDNEQKQLFVEQHKHYLDEIIEQISEFSKRVILADANLDKVLSAYNKHRDKPIREQAENIIHLFTLTNLGAPAAFKYFDTTIDRKRYTSTKEVLDATLIHQSITGLYETRIDLSQLGGDGGGGGGGSPAPGGTLNIEDEYRLHETSKEPDVPLGSTWLSDFPQAWAETGGMGLAVRQAPLIIPLKATSTPVSIKQYPMSQEARLGIKPHIQRLLDQGILVPCQSPWNTPLLPVKKPGTNDYRPVQDLREVNKRVEDIHPTVPNPYNLLSGLPPSHQWYTVLDLKDAFFCLRLHPTSQPLFAFEWRDPEMGISGQLTWTRLPQGFKNSPTLFNEALHRDLADFRIQHPDLILLQYVDDLLLAATSEQDCQRGTRALLQTLGNLGYRASAKKAQICQKQVKYLGYLLKEGQRWLTEARKETVMGQPTPKTPRQLREFLGTAGFCRLWIPGFAEMAAPLYPLTKPGTLFNWGPDQQKAYQEIKQALLTAPALGLPDLTKPFELFVDEKQGYAKGVLTQKLGPWRRPVAYLSKKLDPVAAGWPPCLRMVAAIAVLTKDAGKLTMGQPLVILAPHAVEALVKQPPDRWLSNARMTHYQAMLLDTDRVQFGPVVALNPATLLPLPEKEAPHDCLEILAETHGTRPDLTDQPIPDADYTWYTDGSSFLQEGQRRAGAAVTTETEVIWARALPAGTSAQRAELIALTQALKMAEGKKLNVYTDSRYAFATAHVHGEIYRRRGWLTSEGREIKNKNEILALLKALFLPKRLSIIHCPGHQKGNSAEARGNRMADQAAREAAMKAVLETSTLLAGKRTADGSEFEKRTADGSEFESPKKKAKVE

SEQ ID NO: 1000 - protein, 2094 aa, synthetic construct
MPAAKRVKLDGGDKKYSIGLDIGTNSVGWAVITDEYKVPSKKFKVLGNTDRHSIKKNLIGALLFDSGETAEATRLKRTARRRYTRRKNRICYLQEIFSNEMAKVDDSFFHRLEESFLVEEDKKHERHPIFGNIVDEVAYHEKYPTIYHLRKKLVDSTDKADLRLIYLALAHMIKFRGHFLIEGDLNPDNSDVDKLFIQLVQTYNQLFEENPINASGVDAKAILSARLSKSRRLENLIAQLPGEKKNGLFGNLIALSLGLTPNFKSNFDLAEDAKLQLSKDTYDDDLDNLLAQIGDQYADLFLAAKNLSDAILLSDILRVNTEITKAPLSASMIKRYDEHHQDLTLLKALVRQQLPEKYKEIFFDQSKNGYAGYIDGGASQEEFYKFIKPILEKMDGTEELLVKLNREDLLRKQRTFDNGSIPHQIHLGELHAILRRQEDFYPFLKDNREKIEKILTFRIPYYVGPLARGNSRFAWMTRKSEETITPWNFEEVVDKGASAQSFIERMTNFDKNLPNEKVLPKHSLLYEYFTVYNELTKVKYVTEGMRKPAFLSGEQKKAIVDLLFKTNRKVTVKQLKEDYFKKIECFDSVEISGVEDRFNASLGTYHDLLKIIKDKDFLDNEENEDILEDIVLTLTLFEDREMIEERLKTYAHLFDDKVMKQLKRRRYTGWGRLSRKLINGIRDKQSGKTILDFLKSDGFANRNFMQLIHDDSLTFKEDIQKAQVSGQGDSLHEHIANLAGSPAIKKGILQTVKVVDELVKVMGRHKPENIVIEMARENQTTQKGQKNSRERMKRIEEGIKELGSQILKEHPVENTQLQNEKLYLYYLQNGRDMYVDQELDINRLSDYDVDHIVPQSFLKDDSIDNKVLTRSDKARGKSDNVPSEEVVKKMKNYWRQLLNAKLITQRKFDNLTKAERGGLSELDKAGFIKRQLVETRQITKHVAQILDSRMNTKYDENDKLIREVKVITLKSKLVSDFRKDFQFYKVREINNYHHAHDAYLNAVVGTALIKKYPKLESEFVYGDYKVYDVRKMIAKSEQEIGKATAKYFFYSNIMNFFKTEITLANGEIRKRPLIETNGETGEIVWDKGRDFATVRKVLSMPQVNIVKKTEVQTGGFSKESILPKRNSDKLIARKKDWDPKKYGGFDSPTVAYSVLVVAKVEKGKSKKLKSVKELLGITIMERSSFEKNPIDFLEAKGYKEVKKDLIIKLPKYSLFELENGRKRMLASAGELQKGNELALPSKYVNFLYLASHYEKLKGSPEDNEQKQLFVEQHKHYLDEIIEQISEFSKRVILADANLDKVLSAYNKHRDKPIREQAENIIHLFTLTNLGAPAAFKYFDTTIDRKRYTSTKEVLDATLIHQSITGLYETRIDLSQLGGDGGGSSPAPGGGGGTLNIEDEYRLHETSKEPDVPLGSTWLSDFPQAWAETGGMGLAVRQAPLIIPLKATSTPVSIKQYPMSQEARLGIKPHIQRLLDQGILVPCQSPWNTPLLPVKKPGTNDYRPVQDLREVNKRVEDIHPTVPNPYNLLSGLPPSHQWYTVLDLKDAFFCLRLHPTSQPLFAFEWRDPEMGISGQLTWTRLPQGFKNSPTLFNEALHRDLADFRIQHPDLILLQYVDDLLLAATSEQDCQRGTRALLQTLGNLGYRASAKKAQICQKQVKYLGYLLKEGQRWLTEARKETVMGQPTPKTPRQLREFLGTAGFCRLWIPGFAEMAAPLYPLTKPGTLFNWGPDQQKAYQEIKQALLTAPALGLPDLTKPFELFVDEKQGYAKGVLTQKLGPWRRPVAYLSKKLDPVAAGWPPCLRMVAAIAVLTKDAGKLTMGQPLVILAPHAVEALVKQPPDRWLSNARMTHYQAMLLDTDRVQFGPVVALNPATLLPLPEKEAPHDCLEILAETHGTRPDLTDQPIPDADYTWYTDGSSFLQEGQRRAGAAVTTETEVIWARALPAGTSAQRAELIALTQALKMAEGKKLNVYTDSRYAFATAHVHGEIYRRRGWLTSEGREIKNKNEILALLKALFLPKRLSIIHCPGHQKGNSAEARGNRMADQAAREAAMKAVLETSTLLAGKRTADGSEFEKRTADGSEFESPKKKAKVE

SEQ ID NO: 1001 - protein, 2094 aa, synthetic construct
MPAAKRVKLDGGDKKYSIGLDIGTNSVGWAVITDEYKVPSKKFKVLGNTDRHSIKKNLIGALLFDSGETAEATRLKRTARRRYTRRKNRICYLQEIFSNEMAKVDDSFFHRLEESFLVEEDKKHERHPIFGNIVDEVAYHEKYPTIYHLRKKLVDSTDKADLRLIYLALAHMIKFRGHFLIEGDLNPDNSDVDKLFIQLVQTYNQLFEENPINASGVDAKAILSARLSKSRRLENLIAQLPGEKKNGLFGNLIALSLGLTPNFKSNFDLAEDAKLQLSKDTYDDDLDNLLAQIGDQYADLFLAAKNLSDAILLSDILRVNTEITKAPLSASMIKRYDEHHQDLTLLKALVRQQLPEKYKEIFFDQSKNGYAGYIDGGASQEEFYKFIKPILEKMDGTEELLVKLNREDLLRKQRTFDNGSIPHQIHLGELHAILRRQEDFYPFLKDNREKIEKILTFRIPYYVGPLARGNSRFAWMTRKSEETITPWNFEEVVDKGASAQSFIERMTNFDKNLPNEKVLPKHSLLYEYFTVYNELTKVKYVTEGMRKPAFLSGEQKKAIVDLLFKTNRKVTVKQLKEDYFKKIECFDSVEISGVEDRFNASLGTYHDLLKIIKDKDFLDNEENEDILEDIVLTLTLFEDREMIEERLKTYAHLFDDKVMKQLKRRRYTGWGRLSRKLINGIRDKQSGKTILDFLKSDGFANRNFMQLIHDDSLTFKEDIQKAQVSGQGDSLHEHIANLAGSPAIKKGILQTVKVVDELVKVMGRHKPENIVIEMARENQTTQKGQKNSRERMKRIEEGIKELGSQILKEHPVENTQLQNEKLYLYYLQNGRDMYVDQELDINRLSDYDVDHIVPQSFLKDDSIDNKVLTRSDKARGKSDNVPSEEVVKKMKNYWRQLLNAKLITQRKFDNLTKAERGGLSELDKAGFIKRQLVETRQITKHVAQILDSRMNTKYDENDKLIREVKVITLKSKLVSDFRKDFQFYKVREINNYHHAHDAYLNAVVGTALIKKYPKLESEFVYGDYKVYDVRKMIAKSEQEIGKATAKYFFYSNIMNFFKTEITLANGEIRKRPLIETNGETGEIVWDKGRDFATVRKVLSMPQVNIVKKTEVQTGGFSKESILPKRNSDKLIARKKDWDPKKYGGFDSPTVAYSVLVVAKVEKGKSKKLKSVKELLGITIMERSSFEKNPIDFLEAKGYKEVKKDLIIKLPKYSLFELENGRKRMLASAGELQKGNELALPSKYVNFLYLASHYEKLKGSPEDNEQKQLFVEQHKHYLDEIIEQISEFSKRVILADANLDKVLSAYNKHRDKPIREQAENIIHLFTLTNLGAPAAFKYFDTTIDRKRYTSTKEVLDATLIHQSITGLYETRIDLSQLGGDGGGGSPAPGGGGGTLNIEDEYRLHETSKEPDVPLGSTWLSDFPQAWAETGGMGLAVRQAPLIIPLKATSTPVSIKQYPMSQEARLGIKPHIQRLLDQGILVPCQSPWNTPLLPVKKPGTNDYRPVQDLREVNKRVEDIHPTVPNPYNLLSGLPPSHQWYTVLDLKDAFFCLRLHPTSQPLFAFEWRDPEMGISGQLTWTRLPQGFKNSPTLFNEALHRDLADFRIQHPDLILLQYVDDLLLAATSEQDCQRGTRALLQTLGNLGYRASAKKAQICQKQVKYLGYLLKEGQRWLTEARKETVMGQPTPKTPRQLREFLGTAGFCRLWIPGFAEMAAPLYPLTKPGTLFNWGPDQQKAYQEIKQALLTAPALGLPDLTKPFELFVDEKQGYAKGVLTQKLGPWRRPVAYLSKKLDPVAAGWPPCLRMVAAIAVLTKDAGKLTMGQPLVILAPHAVEALVKQPPDRWLSNARMTHYQAMLLDTDRVQFGPVVALNPATLLPLPEKEAPHDCLEILAETHGTRPDLTDQPIPDADYTWYTDGSSFLQEGQRRAGAAVTTETEVIWARALPAGTSAQRAELIALTQALKMAEGKKLNVYTDSRYAFATAHVHGEIYRRRGWLTSEGREIKNKNEILALLKALFLPKRLSIIHCPGHQKGNSAEARGNRMADQAAREAAMKAVLETSTLLAGKRTADGSEFEKRTADGSEFESPKKKAKVE

SEQ ID NO: 1002 - protein, 2095 aa, synthetic construct
MPAAKRVKLDGGDKKYSIGLDIGTNSVGWAVITDEYKVPSKKFKVLGNTDRHSIKKNLIGALLFDSGETAEATRLKRTARRRYTRRKNRICYLQEIFSNEMAKVDDSFFHRLEESFLVEEDKKHERHPIFGNIVDEVAYHEKYPTIYHLRKKLVDSTDKADLRLIYLALAHMIKFRGHFLIEGDLNPDNSDVDKLFIQLVQTYNQLFEENPINASGVDAKAILSARLSKSRRLENLIAQLPGEKKNGLFGNLIALSLGLTPNFKSNFDLAEDAKLQLSKDTYDDDLDNLLAQIGDQYADLFLAAKNLSDAILLSDILRVNTEITKAPLSASMIKRYDEHHQDLTLLKALVRQQLPEKYKEIFFDQSKNGYAGYIDGGASQEEFYKFIKPILEKMDGTEELLVKLNREDLLRKQRTFDNGSIPHQIHLGELHAILRRQEDFYPFLKDNREKIEKILTFRIPYYVGPLARGNSRFAWMTRKSEETITPWNFEEVVDKGASAQSFIERMTNFDKNLPNEKVLPKHSLLYEYFTVYNELTKVKYVTEGMRKPAFLSGEQKKAIVDLLFKTNRKVTVKQLKEDYFKKIECFDSVEISGVEDRFNASLGTYHDLLKIIKDKDFLDNEENEDILEDIVLTLTLFEDREMIEERLKTYAHLFDDKVMKQLKRRRYTGWGRLSRKLINGIRDKQSGKTILDFLKSDGFANRNFMQLIHDDSLTFKEDIQKAQVSGQGDSLHEHIANLAGSPAIKKGILQTVKVVDELVKVMGRHKPENIVIEMARENQTTQKGQKNSRERMKRIEEGIKELGSQILKEHPVENTQLQNEKLYLYYLQNGRDMYVDQELDINRLSDYDVDHIVPQSFLKDDSIDNKVLTRSDKARGKSDNVPSEEVVKKMKNYWRQLLNAKLITQRKFDNLTKAERGGLSELDKAGFIKRQLVETRQITKHVAQILDSRMNTKYDENDKLIREVKVITLKSKLVSDFRKDFQFYKVREINNYHHAHDAYLNAVVGTALIKKYPKLESEFVYGDYKVYDVRKMIAKSEQEIGKATAKYFFYSNIMNFFKTEITLANGEIRKRPLIETNGETGEIVWDKGRDFATVRKVLSMPQVNIVKKTEVQTGGFSKESILPKRNSDKLIARKKDWDPKKYGGFDSPTVAYSVLVVAKVEKGKSKKLKSVKELLGITIMERSSFEKNPIDFLEAKGYKEVKKDLIIKLPKYSLFELENGRKRMLASAGELQKGNELALPSKYVNFLYLASHYEKLKGSPEDNEQKQLFVEQHKHYLDEIIEQISEFSKRVILADANLDKVLSAYNKHRDKPIREQAENIIHLFTLTNLGAPAAFKYFDTTIDRKRYTSTKEVLDATLIHQSITGLYETRIDLSQLGGDGGGGGGSGGGGSGGTLNIEDEYRLHETSKEPDVPLGSTWLSDFPQAWAETGGMGLAVRQAPLIIPLKATSTPVSIKQYPMSQEARLGIKPHIQRLLDQGILVPCQSPWNTPLLPVKKPGTNDYRPVQDLREVNKRVEDIHPTVPNPYNLLSGLPPSHQWYTVLDLKDAFFCLRLHPTSQPLFAFEWRDPEMGISGQLTWTRLPQGFKNSPTLFNEALHRDLADFRIQHPDLILLQYVDDLLLAATSEQDCQRGTRALLQTLGNLGYRASAKKAQICQKQVKYLGYLLKEGQRWLTEARKETVMGQPTPKTPRQLREFLGTAGFCRLWIPGFAEMAAPLYPLTKPGTLFNWGPDQQKAYQEIKQALLTAPALGLPDLTKPFELFVDEKQGYAKGVLTQKLGPWRRPVAYLSKKLDPVAAGWPPCLRMVAAIAVLTKDAGKLTMGQPLVILAPHAVEALVKQPPDRWLSNARMTHYQAMLLDTDRVQFGPVVALNPATLLPLPEKEAPHDCLEILAETHGTRPDLTDQPIPDADYTWYTDGSSFLQEGQRRAGAAVTTETEVIWARALPAGTSAQRAELIALTQALKMAEGKKLNVYTDSRYAFATAHVHGEIYRRRGWLTSEGREIKNKNEILALLKALFLPKRLSIIHCPGHQKGNSAEARGNRMADQAAREAAMKAVLETSTLLAGKRTADGSEFEKRTADGSEFESPKKKAKVE

SEQ ID NO: 1003 - protein, 2088 aa, synthetic construct
MPAAKRVKLDGGDKKYSIGLDIGTNSVGWAVITDEYKVPSKKFKVLGNTDRHSIKKNLIGALLFDSGETAEATRLKRTARRRYTRRKNRICYLQEIFSNEMAKVDDSFFHRLEESFLVEEDKKHERHPIFGNIVDEVAYHEKYPTIYHLRKKLVDSTDKADLRLIYLALAHMIKFRGHFLIEGDLNPDNSDVDKLFIQLVQTYNQLFEENPINASGVDAKAILSARLSKSRRLENLIAQLPGEKKNGLFGNLIALSLGLTPNFKSNFDLAEDAKLQLSKDTYDDDLDNLLAQIGDQYADLFLAAKNLSDAILLSDILRVNTEITKAPLSASMIKRYDEHHQDLTLLKALVRQQLPEKYKEIFFDQSKNGYAGYIDGGASQEEFYKFIKPILEKMDGTEELLVKLNREDLLRKQRTFDNGSIPHQIHLGELHAILRRQEDFYPFLKDNREKIEKILTFRIPYYVGPLARGNSRFAWMTRKSEETITPWNFEEVVDKGASAQSFIERMTNFDKNLPNEKVLPKHSLLYEYFTVYNELTKVKYVTEGMRKPAFLSGEQKKAIVDLLFKTNRKVTVKQLKEDYFKKIECFDSVEISGVEDRFNASLGTYHDLLKIIKDKDFLDNEENEDILEDIVLTLTLFEDREMIEERLKTYAHLFDDKVMKQLKRRRYTGWGRLSRKLINGIRDKQSGKTILDFLKSDGFANRNFMQLIHDDSLTFKEDIQKAQVSGQGDSLHEHIANLAGSPAIKKGILQTVKVVDELVKVMGRHKPENIVIEMARENQTTQKGQKNSRERMKRIEEGIKELGSQILKEHPVENTQLQNEKLYLYYLQNGRDMYVDQELDINRLSDYDVDHIVPQSFLKDDSIDNKVLTRSDKARGKSDNVPSEEVVKKMKNYWRQLLNAKLITQRKFDNLTKAERGGLSELDKAGFIKRQLVETRQITKHVAQILDSRMNTKYDENDKLIREVKVITLKSKLVSDFRKDFQFYKVREINNYHHAHDAYLNAVVGTALIKKYPKLESEFVYGDYKVYDVRKMIAKSEQEIGKATAKYFFYSNIMNFFKTEITLANGEIRKRPLIETNGETGEIVWDKGRDFATVRKVLSMPQVNIVKKTEVQTGGFSKESILPKRNSDKLIARKKDWDPKKYGGFDSPTVAYSVLVVAKVEKGKSKKLKSVKELLGITIMERSSFEKNPIDFLEAKGYKEVKKDLIIKLPKYSLFELENGRKRMLASAGELQKGNELALPSKYVNFLYLASHYEKLKGSPEDNEQKQLFVEQHKHYLDEIIEQISEFSKRVILADANLDKVLSAYNKHRDKPIREQAENIIHLFTLTNLGAPAAFKYFDTTIDRKRYTSTKEVLDATLIHQSITGLYETRIDLSQLGGDGGGGSGGTLNIEDEYRLHETSKEPDVPLGSTWLSDFPQAWAETGGMGLAVRQAPLIIPLKATSTPVSIKQYPMSQEARLGIKPHIQRLLDQGILVPCQSPWNTPLLPVKKPGTNDYRPVQDLREVNKRVEDIHPTVPNPYNLLSGLPPSHQWYTVLDLKDAFFCLRLHPTSQPLFAFEWRDPEMGISGQLTWTRLPQGFKNSPTLFNEALHRDLADFRIQHPDLILLQYVDDLLLAATSEQDCQRGTRALLQTLGNLGYRASAKKAQICQKQVKYLGYLLKEGQRWLTEARKETVMGQPTPKTPRQLREFLGTAGFCRLWIPGFAEMAAPLYPLTKPGTLFNWGPDQQKAYQEIKQALLTAPALGLPDLTKPFELFVDEKQGYAKGVLTQKLGPWRRPVAYLSKKLDPVAAGWPPCLRMVAAIAVLTKDAGKLTMGQPLVILAPHAVEALVKQPPDRWLSNARMTHYQAMLLDTDRVQFGPVVALNPATLLPLPEKEAPHDCLEILAETHGTRPDLTDQPIPDADYTWYTDGSSFLQEGQRRAGAAVTTETEVIWARALPAGTSAQRAELIALTQALKMAEGKKLNVYTDSRYAFATAHVHGEIYRRRGWLTSEGREIKNKNEILALLKALFLPKRLSIIHCPGHQKGNSAEARGNRMADQAAREAAMKAVLETSTLLAGKRTADGSEFEKRTADGSEFESPKKKAKVE

SEQ ID NO: 1004 - protein, 2094 aa, synthetic construct
MPAAKRVKLDGGDKKYSIGLDIGTNSVGWAVITDEYKVPSKKFKVLGNTDRHSIKKNLIGALLFDSGETAEATRLKRTARRRYTRRKNRICYLQEIFSNEMAKVDDSFFHRLEESFLVEEDKKHERHPIFGNIVDEVAYHEKYPTIYHLRKKLVDSTDKADLRLIYLALAHMIKFRGHFLIEGDLNPDNSDVDKLFIQLVQTYNQLFEENPINASGVDAKAILSARLSKSRRLENLIAQLPGEKKNGLFGNLIALSLGLTPNFKSNFDLAEDAKLQLSKDTYDDDLDNLLAQIGDQYADLFLAAKNLSDAILLSDILRVNTEITKAPLSASMIKRYDEHHQDLTLLKALVRQQLPEKYKEIFFDQSKNGYAGYIDGGASQEEFYKFIKPILEKMDGTEELLVKLNREDLLRKQRTFDNGSIPHQIHLGELHAILRRQEDFYPFLKDNREKIEKILTFRIPYYVGPLARGNSRFAWMTRKSEETITPWNFEEVVDKGASAQSFIERMTNFDKNLPNEKVLPKHSLLYEYFTVYNELTKVKYVTEGMRKPAFLSGEQKKAIVDLLFKTNRKVTVKQLKEDYFKKIECFDSVEISGVEDRFNASLGTYHDLLKIIKDKDFLDNEENEDILEDIVLTLTLFEDREMIEERLKTYAHLFDDKVMKQLKRRRYTGWGRLSRKLINGIRDKQSGKTILDFLKSDGFANRNFMQLIHDDSLTFKEDIQKAQVSGQGDSLHEHIANLAGSPAIKKGILQTVKVVDELVKVMGRHKPENIVIEMARENQTTQKGQKNSRERMKRIEEGIKELGSQILKEHPVENTQLQNEKLYLYYLQNGRDMYVDQELDINRLSDYDVDHIVPQSFLKDDSIDNKVLTRSDKARGKSDNVPSEEVVKKMKNYWRQLLNAKLITQRKFDNLTKAERGGLSELDKAGFIKRQLVETRQITKHVAQILDSRMNTKYDENDKLIREVKVITLKSKLVSDFRKDFQFYKVREINNYHHAHDAYLNAVVGTALIKKYPKLESEFVYGDYKVYDVRKMIAKSEQEIGKATAKYFFYSNIMNFFKTEITLANGEIRKRPLIETNGETGEIVWDKGRDFATVRKVLSMPQVNIVKKTEVQTGGFSKESILPKRNSDKLIARKKDWDPKKYGGFDSPTVAYSVLVVAKVEKGKSKKLKSVKELLGITIMERSSFEKNPIDFLEAKGYKEVKKDLIIKLPKYSLFELENGRKRMLASAGELQKGNELALPSKYVNFLYLASHYEKLKGSPEDNEQKQLFVEQHKHYLDEIIEQISEFSKRVILADANLDKVLSAYNKHRDKPIREQAENIIHLFTLTNLGAPAAFKYFDTTIDRKRYTSTKEVLDATLIHQSITGLYETRIDLSQLGGDGGGSSGGSGGGGGTLNIEDEYRLHETSKEPDVPLGSTWLSDFPQAWAETGGMGLAVRQAPLIIPLKATSTPVSIKQYPMSQEARLGIKPHIQRLLDQGILVPCQSPWNTPLLPVKKPGTNDYRPVQDLREVNKRVEDIHPTVPNPYNLLSGLPPSHQWYTVLDLKDAFFCLRLHPTSQPLFAFEWRDPEMGISGQLTWTRLPQGFKNSPTLFNEALHRDLADFRIQHPDLILLQYVDDLLLAATSEQDCQRGTRALLQTLGNLGYRASAKKAQICQKQVKYLGYLLKEGQRWLTEARKETVMGQPTPKTPRQLREFLGTAGFCRLWIPGFAEMAAPLYPLTKPGTLFNWGPDQQKAYQEIKQALLTAPALGLPDLTKPFELFVDEKQGYAKGVLTQKLGPWRRPVAYLSKKLDPVAAGWPPCLRMVAAIAVLTKDAGKLTMGQPLVILAPHAVEALVKQPPDRWLSNARMTHYQAMLLDTDRVQFGPVVALNPATLLPLPEKEAPHDCLEILAETHGTRPDLTDQPIPDADYTWYTDGSSFLQEGQRRAGAAVTTETEVIWARALPAGTSAQRAELIALTQALKMAEGKKLNVYTDSRYAFATAHVHGEIYRRRGWLTSEGREIKNKNEILALLKALFLPKRLSIIHCPGHQKGNSAEARGNRMADQAAREAAMKAVLETSTLLAGKRTADGSEFEKRTADGSEFESPKKKAKVE

SEQ ID NO: 1005 - protein, 2096 aa, synthetic construct
MPAAKRVKLDGGDKKYSIGLDIGTNSVGWAVITDEYKVPSKKFKVLGNTDRHSIKKNLIGALLFDSGETAEATRLKRTARRRYTRRKNRICYLQEIFSNEMAKVDDSFFHRLEESFLVEEDKKHERHPIFGNIVDEVAYHEKYPTIYHLRKKLVDSTDKADLRLIYLALAHMIKFRGHFLIEGDLNPDNSDVDKLFIQLVQTYNQLFEENPINASGVDAKAILSARLSKSRRLENLIAQLPGEKKNGLFGNLIALSLGLTPNFKSNFDLAEDAKLQLSKDTYDDDLDNLLAQIGDQYADLFLAAKNLSDAILLSDILRVNTEITKAPLSASMIKRYDEHHQDLTLLKALVRQQLPEKYKEIFFDQSKNGYAGYIDGGASQEEFYKFIKPILEKMDGTEELLVKLNREDLLRKQRTFDNGSIPHQIHLGELHAILRRQEDFYPFLKDNREKIEKILTFRIPYYVGPLARGNSRFAWMTRKSEETITPWNFEEVVDKGASAQSFIERMTNFDKNLPNEKVLPKHSLLYEYFTVYNELTKVKYVTEGMRKPAFLSGEQKKAIVDLLFKTNRKVTVKQLKEDYFKKIECFDSVEISGVEDRFNASLGTYHDLLKIIKDKDFLDNEENEDILEDIVLTLTLFEDREMIEERLKTYAHLFDDKVMKQLKRRRYTGWGRLSRKLINGIRDKQSGKTILDFLKSDGFANRNFMQLIHDDSLTFKEDIQKAQVSGQGDSLHEHIANLAGSPAIKKGILQTVKVVDELVKVMGRHKPENIVIEMARENQTTQKGQKNSRERMKRIEEGIKELGSQILKEHPVENTQLQNEKLYLYYLQNGRDMYVDQELDINRLSDYDVDHIVPQSFLKDDSIDNKVLTRSDKARGKSDNVPSEEVVKKMKNYWRQLLNAKLITQRKFDNLTKAERGGLSELDKAGFIKRQLVETRQITKHVAQILDSRMNTKYDENDKLIREVKVITLKSKLVSDFRKDFQFYKVREINNYHHAHDAYLNAVVGTALIKKYPKLESEFVYGDYKVYDVRKMIAKSEQEIGKATAKYFFYSNIMNFFKTEITLANGEIRKRPLIETNGETGEIVWDKGRDFATVRKVLSMPQVNIVKKTEVQTGGFSKESILPKRNSDKLIARKKDWDPKKYGGFDSPTVAYSVLVVAKVEKGKSKKLKSVKELLGITIMERSSFEKNPIDFLEAKGYKEVKKDLIIKLPKYSLFELENGRKRMLASAGELQKGNELALPSKYVNFLYLASHYEKLKGSPEDNEQKQLFVEQHKHYLDEIIEQISEFSKRVILADANLDKVLSAYNKHRDKPIREQAENIIHLFTLTNLGAPAAFKYFDTTIDRKRYTSTKEVLDATLIHQSITGLYETRIDLSQLGGDGGGGSGSSEAAAKGGTLNIEDEYRLHETSKEPDVPLGSTWLSDFPQAWAETGGMGLAVRQAPLIIPLKATSTPVSIKQYPMSQEARLGIKPHIQRLLDQGILVPCQSPWNTPLLPVKKPGTNDYRPVQDLREVNKRVEDIHPTVPNPYNLLSGLPPSHQWYTVLDLKDAFFCLRLHPTSQPLFAFEWRDPEMGISGQLTWTRLPQGFKNSPTLFNEALHRDLADFRIQHPDLILLQYVDDLLLAATSEQDCQRGTRALLQTLGNLGYRASAKKAQICQKQVKYLGYLLKEGQRWLTEARKETVMGQPTPKTPRQLREFLGTAGFCRLWIPGFAEMAAPLYPLTKPGTLFNWGPDQQKAYQEIKQALLTAPALGLPDLTKPFELFVDEKQGYAKGVLTQKLGPWRRPVAYLSKKLDPVAAGWPPCLRMVAAIAVLTKDAGKLTMGQPLVILAPHAVEALVKQPPDRWLSNARMTHYQAMLLDTDRVQFGPVVALNPATLLPLPEKEAPHDCLEILAETHGTRPDLTDQPIPDADYTWYTDGSSFLQEGQRRAGAAVTTETEVIWARALPAGTSAQRAELIALTQALKMAEGKKLNVYTDSRYAFATAHVHGEIYRRRGWLTSEGREIKNKNEILALLKALFLPKRLSIIHCPGHQKGNSAEARGNRMADQAAREAAMKAVLETSTLLAGKRTADGSEFEKRTADGSEFESPKKKAKVE

SEQ ID NO: 1006 - protein, 2131 aa, synthetic construct
MPAAKRVKLDGGDKKYSIGLDIGTNSVGWAVITDEYKVPSKKFKVLGNTDRHSIKKNLIGALLFDSGETAEATRLKRTARRRYTRRKNRICYLQEIFSNEMAKVDDSFFHRLEESFLVEEDKKHERHPIFGNIVDEVAYHEKYPTIYHLRKKLVDSTDKADLRLIYLALAHMIKFRGHFLIEGDLNPDNSDVDKLFIQLVQTYNQLFEENPINASGVDAKAILSARLSKSRRLENLIAQLPGEKKNGLFGNLIALSLGLTPNFKSNFDLAEDAKLQLSKDTYDDDLDNLLAQIGDQYADLFLAAKNLSDAILLSDILRVNTEITKAPLSASMIKRYDEHHQDLTLLKALVRQQLPEKYKEIFFDQSKNGYAGYIDGGASQEEFYKFIKPILEKMDGTEELLVKLNREDLLRKQRTFDNGSIPHQIHLGELHAILRRQEDFYPFLKDNREKIEKILTFRIPYYVGPLARGNSRFAWMTRKSEETITPWNFEEVVDKGASAQSFIERMTNFDKNLPNEKVLPKHSLLYEYFTVYNELTKVKYVTEGMRKPAFLSGEQKKAIVDLLFKTNRKVTVKQLKEDYFKKIECFDSVEISGVEDRFNASLGTYHDLLKIIKDKDFLDNEENEDILEDIVLTLTLFEDREMIEERLKTYAHLFDDKVMKQLKRRRYTGWGRLSRKLINGIRDKQSGKTILDFLKSDGFANRNFMQLIHDDSLTFKEDIQKAQVSGQGDSLHEHIANLAGSPAIKKGILQTVKVVDELVKVMGRHKPENIVIEMARENQTTQKGQKNSRERMKRIEEGIKELGSQILKEHPVENTQLQNEKLYLYYLQNGRDMYVDQELDINRLSDYDVDHIVPQSFLKDDSIDNKVLTRSDKARGKSDNVPSEEVVKKMKNYWRQLLNAKLITQRKFDNLTKAERGGLSELDKAGFIKRQLVETRQITKHVAQILDSRMNTKYDENDKLIREVKVITLKSKLVSDFRKDFQFYKVREINNYHHAHDAYLNAVVGTALIKKYPKLESEFVYGDYKVYDVRKMIAKSEQEIGKATAKYFFYSNIMNFFKTEITLANGEIRKRPLIETNGETGEIVWDKGRDFATVRKVLSMPQVNIVKKTEVQTGGFSKESILPKRNSDKLIARKKDWDPKKYGGFDSPTVAYSVLVVAKVEKGKSKKLKSVKELLGITIMERSSFEKNPIDFLEAKGYKEVKKDLIIKLPKYSLFELENGRKRMLASAGELQKGNELALPSKYVNFLYLASHYEKLKGSPEDNEQKQLFVEQHKHYLDEIIEQISEFSKRVILADANLDKVLSAYNKHRDKPIREQAENIIHLFTLTNLGAPAAFKYFDTTIDRKRYTSTKEVLDATLIHQSITGLYETRIDLSQLGGDGGAEAAAKEAAAKEAAAKEAAAKALEAEAAAKEAAAKEAAAKEAAAKAGGTLNIEDEYRLHETSKEPDVPLGSTWLSDFPQAWAETGGMGLAVRQAPLIIPLKATSTPVSIKQYPMSQEARLGIKPHIQRLLDQGILVPCQSPWNTPLLPVKKPGTNDYRPVQDLREVNKRVEDIHPTVPNPYNLLSGLPPSHQWYTVLDLKDAFFCLRLHPTSQPLFAFEWRDPEMGISGQLTWTRLPQGFKNSPTLFNEALHRDLADFRIQHPDLILLQYVDDLLLAATSEQDCQRGTRALLQTLGNLGYRASAKKAQICQKQVKYLGYLLKEGQRWLTEARKETVMGQPTPKTPRQLREFLGKAGFCRLFIPGFAEMAAPLYPLTKPGTLFNWGPDQQKAYQEIKQALLTAPALGLPDLTKPFELFVDEKQGYAKGVLTQKLGPWRRPVAYLSKKLDPVAAGWPPCLRMVAAIAVLTKDAGKLTMGQPLVILAPHAVEALVKQPPDRWLSNARMTHYQAMLLDTDRVQFGPVVALNPATLLPLPEKEAPHDCLEILAETHGTRPDLTDQPIPDADYTWYTDGSSFLQEGQRRAGAAVTTETEVIWARALPAGTSAQRAELIALTQALKMAEGKKLNVYTDSRYAFATAHVHGEIYRRRGWLTSEGREIKNKNEILALLKALFLPKRLSIIHCPGHQKGNSAEARGNRMADQAAREAAMKAVLETSTLLAGKRTADGSEFEKRTADGSEFESPKKKAKVE

SEQ ID NO: 1007 - protein, 2096 aa, synthetic construct
MPAAKRVKLDGGDKKYSIGLDIGTNSVGWAVITDEYKVPSKKFKVLGNTDRHSIKKNLIGALLFDSGETAEATRLKRTARRRYTRRKNRICYLQEIFSNEMAKVDDSFFHRLEESFLVEEDKKHERHPIFGNIVDEVAYHEKYPTIYHLRKKLVDSTDKADLRLIYLALAHMIKFRGHFLIEGDLNPDNSDVDKLFIQLVQTYNQLFEENPINASGVDAKAILSARLSKSRRLENLIAQLPGEKKNGLFGNLIALSLGLTPNFKSNFDLAEDAKLQLSKDTYDDDLDNLLAQIGDQYADLFLAAKNLSDAILLSDILRVNTEITKAPLSASMIKRYDEHHQDLTLLKALVRQQLPEKYKEIFFDQSKNGYAGYIDGGASQEEFYKFIKPILEKMDGTEELLVKLNREDLLRKQRTFDNGSIPHQIHLGELHAILRRQEDFYPFLKDNREKIEKILTFRIPYYVGPLARGNSRFAWMTRKSEETITPWNFEEVVDKGASAQSFIERMTNFDKNLPNEKVLPKHSLLYEYFTVYNELTKVKYVTEGMRKPAFLSGEQKKAIVDLLFKTNRKVTVKQLKEDYFKKIECFDSVEISGVEDRFNASLGTYHDLLKIIKDKDFLDNEENEDILEDIVLTLTLFEDREMIEERLKTYAHLFDDKVMKQLKRRRYTGWGRLSRKLINGIRDKQSGKTILDFLKSDGFANRNFMQLIHDDSLTFKEDIQKAQVSGQGDSLHEHIANLAGSPAIKKGILQTVKVVDELVKVMGRHKPENIVIEMARENQTTQKGQKNSRERMKRIEEGIKELGSQILKEHPVENTQLQNEKLYLYYLQNGRDMYVDQELDINRLSDYDVDHIVPQSFLKDDSIDNKVLTRSDKARGKSDNVPSEEVVKKMKNYWRQLLNAKLITQRKFDNLTKAERGGLSELDKAGFIKRQLVETRQITKHVAQILDSRMNTKYDENDKLIREVKVITLKSKLVSDFRKDFQFYKVREINNYHHAHDAYLNAVVGTALIKKYPKLESEFVYGDYKVYDVRKMIAKSEQEIGKATAKYFFYSNIMNFFKTEITLANGEIRKRPLIETNGETGEIVWDKGRDFATVRKVLSMPQVNIVKKTEVQTGGFSKESILPKRNSDKLIARKKDWDPKKYGGFDSPTVAYSVLVVAKVEKGKSKKLKSVKELLGITIMERSSFEKNPIDFLEAKGYKEVKKDLIIKLPKYSLFELENGRKRMLASAGELQKGNELALPSKYVNFLYLASHYEKLKGSPEDNEQKQLFVEQHKHYLDEIIEQISEFSKRVILADANLDKVLSAYNKHRDKPIREQAENIIHLFTLTNLGAPAAFKYFDTTIDRKRYTSTKEVLDATLIHQSITGLYETRIDLSQLGGDGGPAPEAAAKGSSGGTLNIEDEYRLHETSKEPDVPLGSTWLSDFPQAWAETGGMGLAVRQAPLIIPLKATSTPVSIKQYPMSQEARLGIKPHIQRLLDQGILVPCQSPWNTPLLPVKKPGTNDYRPVQDLREVNKRVEDIHPTVPNPYNLLSGLPPSHQWYTVLDLKDAFFCLRLHPTSQPLFAFEWRDPEMGISGQLTWTRLPQGFKNSPTLFNEALHRDLADFRIQHPDLILLQYVDDLLLAATSEQDCQRGTRALLQTLGNLGYRASAKKAQICQKQVKYLGYLLKEGQRWLTEARKETVMGQPTPKTPRQLREFLGKAGFCRLFIPGFAEMAAPLYPLTKPGTLFNWGPDQQKAYQEIKQALLTAPALGLPDLTKPFELFVDEKQGYAKGVLTQKLGPWRRPVAYLSKKLDPVAAGWPPCLRMVAAIAVLTKDAGKLTMGQPLVILAPHAVEALVKQPPDRWLSNARMTHYQAMLLDTDRVQFGPVVALNPATLLPLPEKEAPHDCLEILAETHGTRPDLTDQPIPDADYTWYTDGSSFLQEGQRRAGAAVTTETEVIWARALPAGTSAQRAELIALTQALKMAEGKKLNVYTDSRYAFATAHVHGEIYRRRGWLTSEGREIKNKNEILALLKALFLPKRLSIIHCPGHQKGNSAEARGNRMADQAAREAAMKAVLETSTLLAGKRTADGSEFEKRTADGSEFESPKKKAKVE

SEQ ID NO: 1008 - protein, 2105 aa, synthetic construct
MPAAKRVKLDGGDKKYSIGLDIGTNSVGWAVITDEYKVPSKKFKVLGNTDRHSIKKNLIGALLFDSGETAEATRLKRTARRRYTRRKNRICYLQEIFSNEMAKVDDSFFHRLEESFLVEEDKKHERHPIFGNIVDEVAYHEKYPTIYHLRKKLVDSTDKADLRLIYLALAHMIKFRGHFLIEGDLNPDNSDVDKLFIQLVQTYNQLFEENPINASGVDAKAILSARLSKSRRLENLIAQLPGEKKNGLFGNLIALSLGLTPNFKSNFDLAEDAKLQLSKDTYDDDLDNLLAQIGDQYADLFLAAKNLSDAILLSDILRVNTEITKAPLSASMIKRYDEHHQDLTLLKALVRQQLPEKYKEIFFDQSKNGYAGYIDGGASQEEFYKFIKPILEKMDGTEELLVKLNREDLLRKQRTFDNGSIPHQIHLGELHAILRRQEDFYPFLKDNREKIEKILTFRIPYYVGPLARGNSRFAWMTRKSEETITPWNFEEVVDKGASAQSFIERMTNFDKNLPNEKVLPKHSLLYEYFTVYNELTKVKYVTEGMRKPAFLSGEQKKAIVDLLFKTNRKVTVKQLKEDYFKKIECFDSVEISGVEDRFNASLGTYHDLLKIIKDKDFLDNEENEDILEDIVLTLTLFEDREMIEERLKTYAHLFDDKVMKQLKRRRYTGWGRLSRKLINGIRDKQSGKTILDFLKSDGFANRNFMQLIHDDSLTFKEDIQKAQVSGQGDSLHEHIANLAGSPAIKKGILQTVKVVDELVKVMGRHKPENIVIEMARENQTTQKGQKNSRERMKRIEEGIKELGSQILKEHPVENTQLQNEKLYLYYLQNGRDMYVDQELDINRLSDYDVDHIVPQSFLKDDSIDNKVLTRSDKARGKSDNVPSEEVVKKMKNYWRQLLNAKLITQRKFDNLTKAERGGLSELDKAGFIKRQLVETRQITKHVAQILDSRMNTKYDENDKLIREVKVITLKSKLVSDFRKDFQFYKVREINNYHHAHDAYLNAVVGTALIKKYPKLESEFVYGDYKVYDVRKMIAKSEQEIGKATAKYFFYSNIMNFFKTEITLANGEIRKRPLIETNGETGEIVWDKGRDFATVRKVLSMPQVNIVKKTEVQTGGFSKESILPKRNSDKLIARKKDWDPKKYGGFDSPTVAYSVLVVAKVEKGKSKKLKSVKELLGITIMERSSFEKNPIDFLEAKGYKEVKKDLIIKLPKYSLFELENGRKRMLASAGELQKGNELALPSKYVNFLYLASHYEKLKGSPEDNEQKQLFVEQHKHYLDEIIEQISEFSKRVILADANLDKVLSAYNKHRDKPIREQAENIIHLFTLTNLGAPAAFKYFDTTIDRKRYTSTKEVLDATLIHQSITGLYETRIDLSQLGGDGGEAAAKEAAAKEAAAKEAAAKGGTLNIEDEYRLHETSKEPDVPLGSTWLSDFPQAWAETGGMGLAVRQAPLIIPLKATSTPVSIKQYPMSQEARLGIKPHIQRLLDQGILVPCQSPWNTPLLPVKKPGTNDYRPVQDLREVNKRVEDIHPTVPNPYNLLSGLPPSHQWYTVLDLKDAFFCLRLHPTSQPLFAFEWRDPEMGISGQLTWTRLPQGFKNSPTLFNEALHRDLADFRIQHPDLILLQYVDDLLLAATSEQDCQRGTRALLQTLGNLGYRASAKKAQICQKQVKYLGYLLKEGQRWLTEARKETVMGQPTPKTPRQLREFLGKAGFCRLFIPGFAEMAAPLYPLTKPGTLFNWGPDQQKAYQEIKQALLTAPALGLPDLTKPFELFVDEKQGYAKGVLTQKLGPWRRPVAYLSKKLDPVAAGWPPCLRMVAAIAVLTKDAGKLTMGQPLVILAPHAVEALVKQPPDRWLSNARMTHYQAMLLDTDRVQFGPVVALNPATLLPLPEKEAPHDCLEILAETHGTRPDLTDQPIPDADYTWYTDGSSFLQEGQRRAGAAVTTETEVIWARALPAGTSAQRAELIALTQALKMAEGKKLNVYTDSRYAFATAHVHGEIYRRRGWLTSEGREIKNKNEILALLKALFLPKRLSIIHCPGHQKGNSAEARGNRMADQAAREAAMKAVLETSTLLAGKRTADGSEFEKRTADGSEFESPKKKAKVE

SEQ ID NO: 1009 - protein, 2090 aa, synthetic construct
MPAAKRVKLDGGDKKYSIGLDIGTNSVGWAVITDEYKVPSKKFKVLGNTDRHSIKKNLIGALLFDSGETAEATRLKRTARRRYTRRKNRICYLQEIFSNEMAKVDDSFFHRLEESFLVEEDKKHERHPIFGNIVDEVAYHEKYPTIYHLRKKLVDSTDKADLRLIYLALAHMIKFRGHFLIEGDLNPDNSDVDKLFIQLVQTYNQLFEENPINASGVDAKAILSARLSKSRRLENLIAQLPGEKKNGLFGNLIALSLGLTPNFKSNFDLAEDAKLQLSKDTYDDDLDNLLAQIGDQYADLFLAAKNLSDAILLSDILRVNTEITKAPLSASMIKRYDEHHQDLTLLKALVRQQLPEKYKEIFFDQSKNGYAGYIDGGASQEEFYKFIKPILEKMDGTEELLVKLNREDLLRKQRTFDNGSIPHQIHLGELHAILRRQEDFYPFLKDNREKIEKILTFRIPYYVGPLARGNSRFAWMTRKSEETITPWNFEEVVDKGASAQSFIERMTNFDKNLPNEKVLPKHSLLYEYFTVYNELTKVKYVTEGMRKPAFLSGEQKKAIVDLLFKTNRKVTVKQLKEDYFKKIECFDSVEISGVEDRFNASLGTYHDLLKIIKDKDFLDNEENEDILEDIVLTLTLFEDREMIEERLKTYAHLFDDKVMKQLKRRRYTGWGRLSRKLINGIRDKQSGKTILDFLKSDGFANRNFMQLIHDDSLTFKEDIQKAQVSGQGDSLHEHIANLAGSPAIKKGILQTVKVVDELVKVMGRHKPENIVIEMARENQTTQKGQKNSRERMKRIEEGIKELGSQILKEHPVENTQLQNEKLYLYYLQNGRDMYVDQELDINRLSDYDVDHIVPQSFLKDDSIDNKVLTRSDKARGKSDNVPSEEVVKKMKNYWRQLLNAKLITQRKFDNLTKAERGGLSELDKAGFIKRQLVETRQITKHVAQILDSRMNTKYDENDKLIREVKVITLKSKLVSDFRKDFQFYKVREINNYHHAHDAYLNAVVGTALIKKYPKLESEFVYGDYKVYDVRKMIAKSEQEIGKATAKYFFYSNIMNFFKTEITLANGEIRKRPLIETNGETGEIVWDKGRDFATVRKVLSMPQVNIVKKTEVQTGGFSKESILPKRNSDKLIARKKDWDPKKYGGFDSPTVAYSVLVVAKVEKGKSKKLKSVKELLGITIMERSSFEKNPIDFLEAKGYKEVKKDLIIKLPKYSLFELENGRKRMLASAGELQKGNELALPSKYVNFLYLASHYEKLKGSPEDNEQKQLFVEQHKHYLDEIIEQISEFSKRVILADANLDKVLSAYNKHRDKPIREQAENIIHLFTLTNLGAPAAFKYFDTTIDRKRYTSTKEVLDATLIHQSITGLYETRIDLSQLGGDGGEAAAKGGTLNIEDEYRLHETSKEPDVPLGSTWLSDFPQAWAETGGMGLAVRQAPLIIPLKATSTPVSIKQYPMSQEARLGIKPHIQRLLDQGILVPCQSPWNTPLLPVKKPGTNDYRPVQDLREVNKRVEDIHPTVPNPYNLLSGLPPSHQWYTVLDLKDAFFCLRLHPTSQPLFAFEWRDPEMGISGQLTWTRLPQGFKNSPTLFNEALHRDLADFRIQHPDLILLQYVDDLLLAATSEQDCQRGTRALLQTLGNLGYRASAKKAQICQKQVKYLGYLLKEGQRWLTEARKETVMGQPTPKTPRQLREFLGKAGFCRLFIPGFAEMAAPLYPLTKPGTLFNWGPDQQKAYQEIKQALLTAPALGLPDLTKPFELFVDEKQGYAKGVLTQKLGPWRRPVAYLSKKLDPVAAGWPPCLRMVAAIAVLTKDAGKLTMGQPLVILAPHAVEALVKQPPDRWLSNARMTHYQAMLLDTDRVQFGPVVALNPATLLPLPEKEAPHDCLEILAETHGTRPDLTDQPIPDADYTWYTDGSSFLQEGQRRAGAAVTTETEVIWARALPAGTSAQRAELIALTQALKMAEGKKLNVYTDSRYAFATAHVHGEIYRRRGWLTSEGREIKNKNEILALLKALFLPKRLSIIHCPGHQKGNSAEARGNRMADQAAREAAMKAVLETSTLLAGKRTADGSEFEKRTADGSEFESPKKKAKVE

SEQ ID NO: 1010 - protein, 2096 aa, synthetic construct
MPAAKRVKLDGGDKKYSIGLDIGTNSVGWAVITDEYKVPSKKFKVLGNTDRHSIKKNLIGALLFDSGETAEATRLKRTARRRYTRRKNRICYLQEIFSNEMAKVDDSFFHRLEESFLVEEDKKHERHPIFGNIVDEVAYHEKYPTIYHLRKKLVDSTDKADLRLIYLALAHMIKFRGHFLIEGDLNPDNSDVDKLFIQLVQTYNQLFEENPINASGVDAKAILSARLSKSRRLENLIAQLPGEKKNGLFGNLIALSLGLTPNFKSNFDLAEDAKLQLSKDTYDDDLDNLLAQIGDQYADLFLAAKNLSDAILLSDILRVNTEITKAPLSASMIKRYDEHHQDLTLLKALVRQQLPEKYKEIFFDQSKNGYAGYIDGGASQEEFYKFIKPILEKMDGTEELLVKLNREDLLRKQRTFDNGSIPHQIHLGELHAILRRQEDFYPFLKDNREKIEKILTFRIPYYVGPLARGNSRFAWMTRKSEETITPWNFEEVVDKGASAQSFIERMTNFDKNLPNEKVLPKHSLLYEYFTVYNELTKVKYVTEGMRKPAFLSGEQKKAIVDLLFKTNRKVTVKQLKEDYFKKIECFDSVEISGVEDRFNASLGTYHDLLKIIKDKDFLDNEENEDILEDIVLTLTLFEDREMIEERLKTYAHLFDDKVMKQLKRRRYTGWGRLSRKLINGIRDKQSGKTILDFLKSDGFANRNFMQLIHDDSLTFKEDIQKAQVSGQGDSLHEHIANLAGSPAIKKGILQTVKVVDELVKVMGRHKPENIVIEMARENQTTQKGQKNSRERMKRIEEGIKELGSQILKEHPVENTQLQNEKLYLYYLQNGRDMYVDQELDINRLSDYDVDHIVPQSFLKDDSIDNKVLTRSDKARGKSDNVPSEEVVKKMKNYWRQLLNAKLITQRKFDNLTKAERGGLSELDKAGFIKRQLVETRQITKHVAQILDSRMNTKYDENDKLIREVKVITLKSKLVSDFRKDFQFYKVREINNYHHAHDAYLNAVVGTALIKKYPKLESEFVYGDYKVYDVRKMIAKSEQEIGKATAKYFFYSNIMNFFKTEITLANGEIRKRPLIETNGETGEIVWDKGRDFATVRKVLSMPQVNIVKKTEVQTGGFSKESILPKRNSDKLIARKKDWDPKKYGGFDSPTVAYSVLVVAKVEKGKSKKLKSVKELLGITIMERSSFEKNPIDFLEAKGYKEVKKDLIIKLPKYSLFELENGRKRMLASAGELQKGNELALPSKYVNFLYLASHYEKLKGSPEDNEQKQLFVEQHKHYLDEIIEQISEFSKRVILADANLDKVLSAYNKHRDKPIREQAENIIHLFTLTNLGAPAAFKYFDTTIDRKRYTSTKEVLDATLIHQSITGLYETRIDLSQLGGDGGGSSPAPEAAAKGGTLNIEDEYRLHETSKEPDVPLGSTWLSDFPQAWAETGGMGLAVRQAPLIIPLKATSTPVSIKQYPMSQEARLGIKPHIQRLLDQGILVPCQSPWNTPLLPVKKPGTNDYRPVQDLREVNKRVEDIHPTVPNPYNLLSGLPPSHQWYTVLDLKDAFFCLRLHPTSQPLFAFEWRDPEMGISGQLTWTRLPQGFKNSPTLFNEALHRDLADFRIQHPDLILLQYVDDLLLAATSEQDCQRGTRALLQTLGNLGYRASAKKAQICQKQVKYLGYLLKEGQRWLTEARKETVMGQPTPKTPRQLREFLGKAGFCRLFIPGFAEMAAPLYPLTKPGTLFNWGPDQQKAYQEIKQALLTAPALGLPDLTKPFELFVDEKQGYAKGVLTQKLGPWRRPVAYLSKKLDPVAAGWPPCLRMVAAIAVLTKDAGKLTMGQPLVILAPHAVEALVKQPPDRWLSNARMTHYQAMLLDTDRVQFGPVVALNPATLLPLPEKEAPHDCLEILAETHGTRPDLTDQPIPDADYTWYTDGSSFLQEGQRRAGAAVTTETEVIWARALPAGTSAQRAELIALTQALKMAEGKKLNVYTDSRYAFATAHVHGEIYRRRGWLTSEGREIKNKNEILALLKALFLPKRLSIIHCPGHQKGNSAEARGNRMADQAAREAAMKAVLETSTLLAGKRTADGSEFEKRTADGSEFESPKKKAKVE

SEQ ID NO: 1011 - protein, 2088 aa, synthetic construct
MPAAKRVKLDGGDKKYSIGLDIGTNSVGWAVITDEYKVPSKKFKVLGNTDRHSIKKNLIGALLFDSGETAEATRLKRTARRRYTRRKNRICYLQEIFSNEMAKVDDSFFHRLEESFLVEEDKKHERHPIFGNIVDEVAYHEKYPTIYHLRKKLVDSTDKADLRLIYLALAHMIKFRGHFLIEGDLNPDNSDVDKLFIQLVQTYNQLFEENPINASGVDAKAILSARLSKSRRLENLIAQLPGEKKNGLFGNLIALSLGLTPNFKSNFDLAEDAKLQLSKDTYDDDLDNLLAQIGDQYADLFLAAKNLSDAILLSDILRVNTEITKAPLSASMIKRYDEHHQDLTLLKALVRQQLPEKYKEIFFDQSKNGYAGYIDGGASQEEFYKFIKPILEKMDGTEELLVKLNREDLLRKQRTFDNGSIPHQIHLGELHAILRRQEDFYPFLKDNREKIEKILTFRIPYYVGPLARGNSRFAWMTRKSEETITPWNFEEVVDKGASAQSFIERMTNFDKNLPNEKVLPKHSLLYEYFTVYNELTKVKYVTEGMRKPAFLSGEQKKAIVDLLFKTNRKVTVKQLKEDYFKKIECFDSVEISGVEDRFNASLGTYHDLLKIIKDKDFLDNEENEDILEDIVLTLTLFEDREMIEERLKTYAHLFDDKVMKQLKRRRYTGWGRLSRKLINGIRDKQSGKTILDFLKSDGFANRNFMQLIHDDSLTFKEDIQKAQVSGQGDSLHEHIANLAGSPAIKKGILQTVKVVDELVKVMGRHKPENIVIEMARENQTTQKGQKNSRERMKRIEEGIKELGSQILKEHPVENTQLQNEKLYLYYLQNGRDMYVDQELDINRLSDYDVDHIVPQSFLKDDSIDNKVLTRSDKARGKSDNVPSEEVVKKMKNYWRQLLNAKLITQRKFDNLTKAERGGLSELDKAGFIKRQLVETRQITKHVAQILDSRMNTKYDENDKLIREVKVITLKSKLVSDFRKDFQFYKVREINNYHHAHDAYLNAVVGTALIKKYPKLESEFVYGDYKVYDVRKMIAKSEQEIGKATAKYFFYSNIMNFFKTEITLANGEIRKRPLIETNGETGEIVWDKGRDFATVRKVLSMPQVNIVKKTEVQTGGFSKESILPKRNSDKLIARKKDWDPKKYGGFDSPTVAYSVLVVAKVEKGKSKKLKSVKELLGITIMERSSFEKNPIDFLEAKGYKEVKKDLIIKLPKYSLFELENGRKRMLASAGELQKGNELALPSKYVNFLYLASHYEKLKGSPEDNEQKQLFVEQHKHYLDEIIEQISEFSKRVILADANLDKVLSAYNKHRDKPIREQAENIIHLFTLTNLGAPAAFKYFDTTIDRKRYTSTKEVLDATLIHQSITGLYETRIDLSQLGGDGGGSSGGTLNIEDEYRLHETSKEPDVPLGSTWLSDFPQAWAETGGMGLAVRQAPLIIPLKATSTPVSIKQYPMSQEARLGIKPHIQRLLDQGILVPCQSPWNTPLLPVKKPGTNDYRPVQDLREVNKRVEDIHPTVPNPYNLLSGLPPSHQWYTVLDLKDAFFCLRLHPTSQPLFAFEWRDPEMGISGQLTWTRLPQGFKNSPTLFNEALHRDLADFRIQHPDLILLQYVDDLLLAATSEQDCQRGTRALLQTLGNLGYRASAKKAQICQKQVKYLGYLLKEGQRWLTEARKETVMGQPTPKTPRQLREFLGKAGFCRLFIPGFAEMAAPLYPLTKPGTLFNWGPDQQKAYQEIKQALLTAPALGLPDLTKPFELFVDEKQGYAKGVLTQKLGPWRRPVAYLSKKLDPVAAGWPPCLRMVAAIAVLTKDAGKLTMGQPLVILAPHAVEALVKQPPDRWLSNARMTHYQAMLLDTDRVQFGPVVALNPATLLPLPEKEAPHDCLEILAETHGTRPDLTDQPIPDADYTWYTDGSSFLQEGQRRAGAAVTTETEVIWARALPAGTSAQRAELIALTQALKMAEGKKLNVYTDSRYAFATAHVHGEIYRRRGWLTSEGREIKNKNEILALLKALFLPKRLSIIHCPGHQKGNSAEARGNRMADQAAREAAMKAVLETSTLLAGKRTADGSEFEKRTADGSEFESPKKKAKVE

SEQ ID NO: 1012 - protein, 2096 aa, synthetic construct
MPAAKRVKLDGGDKKYSIGLDIGTNSVGWAVITDEYKVPSKKFKVLGNTDRHSIKKNLIGALLFDSGETAEATRLKRTARRRYTRRKNRICYLQEIFSNEMAKVDDSFFHRLEESFLVEEDKKHERHPIFGNIVDEVAYHEKYPTIYHLRKKLVDSTDKADLRLIYLALAHMIKFRGHFLIEGDLNPDNSDVDKLFIQLVQTYNQLFEENPINASGVDAKAILSARLSKSRRLENLIAQLPGEKKNGLFGNLIALSLGLTPNFKSNFDLAEDAKLQLSKDTYDDDLDNLLAQIGDQYADLFLAAKNLSDAILLSDILRVNTEITKAPLSASMIKRYDEHHQDLTLLKALVRQQLPEKYKEIFFDQSKNGYAGYIDGGASQEEFYKFIKPILEKMDGTEELLVKLNREDLLRKQRTFDNGSIPHQIHLGELHAILRRQEDFYPFLKDNREKIEKILTFRIPYYVGPLARGNSRFAWMTRKSEETITPWNFEEVVDKGASAQSFIERMTNFDKNLPNEKVLPKHSLLYEYFTVYNELTKVKYVTEGMRKPAFLSGEQKKAIVDLLFKTNRKVTVKQLKEDYFKKIECFDSVEISGVEDRFNASLGTYHDLLKIIKDKDFLDNEENEDILEDIVLTLTLFEDREMIEERLKTYAHLFDDKVMKQLKRRRYTGWGRLSRKLINGIRDKQSGKTILDFLKSDGFANRNFMQLIHDDSLTFKEDIQKAQVSGQGDSLHEHIANLAGSPAIKKGILQTVKVVDELVKVMGRHKPENIVIEMARENQTTQKGQKNSRERMKRIEEGIKELGSQILKEHPVENTQLQNEKLYLYYLQNGRDMYVDQELDINRLSDYDVDHIVPQSFLKDDSIDNKVLTRSDKARGKSDNVPSEEVVKKMKNYWRQLLNAKLITQRKFDNLTKAERGGLSELDKAGFIKRQLVETRQITKHVAQILDSRMNTKYDENDKLIREVKVITLKSKLVSDFRKDFQFYKVREINNYHHAHDAYLNAVVGTALIKKYPKLESEFVYGDYKVYDVRKMIAKSEQEIGKATAKYFFYSNIMNFFKTEITLANGEIRKRPLIETNGETGEIVWDKGRDFATVRKVLSMPQVNIVKKTEVQTGGFSKESILPKRNSDKLIARKKDWDPKKYGGFDSPTVAYSVLVVAKVEKGKSKKLKSVKELLGITIMERSSFEKNPIDFLEAKGYKEVKKDLIIKLPKYSLFELENGRKRMLASAGELQKGNELALPSKYVNFLYLASHYEKLKGSPEDNEQKQLFVEQHKHYLDEIIEQISEFSKRVILADANLDKVLSAYNKHRDKPIREQAENIIHLFTLTNLGAPAAFKYFDTTIDRKRYTSTKEVLDATLIHQSITGLYETRIDLSQLGGDGGEAAAKGSSGGGGGTLNIEDEYRLHETSKEPDVPLGSTWLSDFPQAWAETGGMGLAVRQAPLIIPLKATSTPVSIKQYPMSQEARLGIKPHIQRLLDQGILVPCQSPWNTPLLPVKKPGTNDYRPVQDLREVNKRVEDIHPTVPNPYNLLSGLPPSHQWYTVLDLKDAFFCLRLHPTSQPLFAFEWRDPEMGISGQLTWTRLPQGFKNSPTLFNEALHRDLADFRIQHPDLILLQYVDDLLLAATSEQDCQRGTRALLQTLGNLGYRASAKKAQICQKQVKYLGYLLKEGQRWLTEARKETVMGQPTPKTPRQLREFLGKAGFCRLFIPGFAEMAAPLYPLTKPGTLFNWGPDQQKAYQEIKQALLTAPALGLPDLTKPFELFVDEKQGYAKGVLTQKLGPWRRPVAYLSKKLDPVAAGWPPCLRMVAAIAVLTKDAGKLTMGQPLVILAPHAVEALVKQPPDRWLSNARMTHYQAMLLDTDRVQFGPVVALNPATLLPLPEKEAPHDCLEILAETHGTRPDLTDQPIPDADYTWYTDGSSFLQEGQRRAGAAVTTETEVIWARALPAGTSAQRAELIALTQALKMAEGKKLNVYTDSRYAFATAHVHGEIYRRRGWLTSEGREIKNKNEILALLKALFLPKRLSIIHCPGHQKGNSAEARGNRMADQAAREAAMKAVLETSTLLAGKRTADGSEFEKRTADGSEFESPKKKAKVE

SEQ ID NO: 1013 - protein, 2094 aa, synthetic construct
MPAAKRVKLDGGDKKYSIGLDIGTNSVGWAVITDEYKVPSKKFKVLGNTDRHSIKKNLIGALLFDSGETAEATRLKRTARRRYTRRKNRICYLQEIFSNEMAKVDDSFFHRLEESFLVEEDKKHERHPIFGNIVDEVAYHEKYPTIYHLRKKLVDSTDKADLRLIYLALAHMIKFRGHFLIEGDLNPDNSDVDKLFIQLVQTYNQLFEENPINASGVDAKAILSARLSKSRRLENLIAQLPGEKKNGLFGNLIALSLGLTPNFKSNFDLAEDAKLQLSKDTYDDDLDNLLAQIGDQYADLFLAAKNLSDAILLSDILRVNTEITKAPLSASMIKRYDEHHQDLTLLKALVRQQLPEKYKEIFFDQSKNGYAGYIDGGASQEEFYKFIKPILEKMDGTEELLVKLNREDLLRKQRTFDNGSIPHQIHLGELHAILRRQEDFYPFLKDNREKIEKILTFRIPYYVGPLARGNSRFAWMTRKSEETITPWNFEEVVDKGASAQSFIERMTNFDKNLPNEKVLPKHSLLYEYFTVYNELTKVKYVTEGMRKPAFLSGEQKKAIVDLLFKTNRKVTVKQLKEDYFKKIECFDSVEISGVEDRFNASLGTYHDLLKIIKDKDFLDNEENEDILEDIVLTLTLFEDREMIEERLKTYAHLFDDKVMKQLKRRRYTGWGRLSRKLINGIRDKQSGKTILDFLKSDGFANRNFMQLIHDDSLTFKEDIQKAQVSGQGDSLHEHIANLAGSPAIKKGILQTVKVVDELVKVMGRHKPENIVIEMARENQTTQKGQKNSRERMKRIEEGIKELGSQILKEHPVENTQLQNEKLYLYYLQNGRDMYVDQELDINRLSDYDVDHIVPQSFLKDDSIDNKVLTRSDKARGKSDNVPSEEVVKKMKNYWRQLLNAKLITQRKFDNLTKAERGGLSELDKAGFIKRQLVETRQITKHVAQILDSRMNTKYDENDKLIREVKVITLKSKLVSDFRKDFQFYKVREINNYHHAHDAYLNAVVGTALIKKYPKLESEFVYGDYKVYDVRKMIAKSEQEIGKATAKYFFYSNIMNFFKTEITLANGEIRKRPLIETNGETGEIVWDKGRDFATVRKVLSMPQVNIVKKTEVQTGGFSKESILPKRNSDKLIARKKDWDPKKYGGFDSPTVAYSVLVVAKVEKGKSKKLKSVKELLGITIMERSSFEKNPIDFLEAKGYKEVKKDLIIKLPKYSLFELENGRKRMLASAGELQKGNELALPSKYVNFLYLASHYEKLKGSPEDNEQKQLFVEQHKHYLDEIIEQISEFSKRVILADANLDKVLSAYNKHRDKPIREQAENIIHLFTLTNLGAPAAFKYFDTTIDRKRYTSTKEVLDATLIHQSITGLYETRIDLSQLGGDGGGGGPAPGSSGGTLNIEDEYRLHETSKEPDVPLGSTWLSDFPQAWAETGGMGLAVRQAPLIIPLKATSTPVSIKQYPMSQEARLGIKPHIQRLLDQGILVPCQSPWNTPLLPVKKPGTNDYRPVQDLREVNKRVEDIHPTVPNPYNLLSGLPPSHQWYTVLDLKDAFFCLRLHPTSQPLFAFEWRDPEMGISGQLTWTRLPQGFKNSPTLFNEALHRDLADFRIQHPDLILLQYVDDLLLAATSEQDCQRGTRALLQTLGNLGYRASAKKAQICQKQVKYLGYLLKEGQRWLTEARKETVMGQPTPKTPRQLREFLGKAGFCRLFIPGFAEMAAPLYPLTKPGTLFNWGPDQQKAYQEIKQALLTAPALGLPDLTKPFELFVDEKQGYAKGVLTQKLGPWRRPVAYLSKKLDPVAAGWPPCLRMVAAIAVLTKDAGKLTMGQPLVILAPHAVEALVKQPPDRWLSNARMTHYQAMLLDTDRVQFGPVVALNPATLLPLPEKEAPHDCLEILAETHGTRPDLTDQPIPDADYTWYTDGSSFLQEGQRRAGAAVTTETEVIWARALPAGTSAQRAELIALTQALKMAEGKKLNVYTDSRYAFATAHVHGEIYRRRGWLTSEGREIKNKNEILALLKALFLPKRLSIIHCPGHQKGNSAEARGNRMADQAAREAAMKAVLETSTLLAGKRTADGSEFEKRTADGSEFESPKKKAKVE

SEQ ID NO: 1014 - protein, 2094 aa, synthetic construct
MPAAKRVKLDGGDKKYSIGLDIGTNSVGWAVITDEYKVPSKKFKVLGNTDRHSIKKNLIGALLFDSGETAEATRLKRTARRRYTRRKNRICYLQEIFSNEMAKVDDSFFHRLEESFLVEEDKKHERHPIFGNIVDEVAYHEKYPTIYHLRKKLVDSTDKADLRLIYLALAHMIKFRGHFLIEGDLNPDNSDVDKLFIQLVQTYNQLFEENPINASGVDAKAILSARLSKSRRLENLIAQLPGEKKNGLFGNLIALSLGLTPNFKSNFDLAEDAKLQLSKDTYDDDLDNLLAQIGDQYADLFLAAKNLSDAILLSDILRVNTEITKAPLSASMIKRYDEHHQDLTLLKALVRQQLPEKYKEIFFDQSKNGYAGYIDGGASQEEFYKFIKPILEKMDGTEELLVKLNREDLLRKQRTFDNGSIPHQIHLGELHAILRRQEDFYPFLKDNREKIEKILTFRIPYYVGPLARGNSRFAWMTRKSEETITPWNFEEVVDKGASAQSFIERMTNFDKNLPNEKVLPKHSLLYEYFTVYNELTKVKYVTEGMRKPAFLSGEQKKAIVDLLFKTNRKVTVKQLKEDYFKKIECFDSVEISGVEDRFNASLGTYHDLLKIIKDKDFLDNEENEDILEDIVLTLTLFEDREMIEERLKTYAHLFDDKVMKQLKRRRYTGWGRLSRKLINGIRDKQSGKTILDFLKSDGFANRNFMQLIHDDSLTFKEDIQKAQVSGQGDSLHEHIANLAGSPAIKKGILQTVKVVDELVKVMGRHKPENIVIEMARENQTTQKGQKNSRERMKRIEEGIKELGSQILKEHPVENTQLQNEKLYLYYLQNGRDMYVDQELDINRLSDYDVDHIVPQSFLKDDSIDNKVLTRSDKARGKSDNVPSEEVVKKMKNYWRQLLNAKLITQRKFDNLTKAERGGLSELDKAGFIKRQLVETRQITKHVAQILDSRMNTKYDENDKLIREVKVITLKSKLVSDFRKDFQFYKVREINNYHHAHDAYLNAVVGTALIKKYPKLESEFVYGDYKVYDVRKMIAKSEQEIGKATAKYFFYSNIMNFFKTEITLANGEIRKRPLIETNGETGEIVWDKGRDFATVRKVLSMPQVNIVKKTEVQTGGFSKESILPKRNSDKLIARKKDWDPKKYGGFDSPTVAYSVLVVAKVEKGKSKKLKSVKELLGITIMERSSFEKNPIDFLEAKGYKEVKKDLIIKLPKYSLFELENGRKRMLASAGELQKGNELALPSKYVNFLYLASHYEKLKGSPEDNEQKQLFVEQHKHYLDEIIEQISEFSKRVILADANLDKVLSAYNKHRDKPIREQAENIIHLFTLTNLGAPAAFKYFDTTIDRKRYTSTKEVLDATLIHQSITGLYETRIDLSQLGGDGGGSSPAPGGSGGTLNIEDEYRLHETSKEPDVPLGSTWLSDFPQAWAETGGMGLAVRQAPLIIPLKATSTPVSIKQYPMSQEARLGIKPHIQRLLDQGILVPCQSPWNTPLLPVKKPGTNDYRPVQDLREVNKRVEDIHPTVPNPYNLLSGLPPSHQWYTVLDLKDAFFCLRLHPTSQPLFAFEWRDPEMGISGQLTWTRLPQGFKNSPTLFNEALHRDLADFRIQHPDLILLQYVDDLLLAATSEQDCQRGTRALLQTLGNLGYRASAKKAQICQKQVKYLGYLLKEGQRWLTEARKETVMGQPTPKTPRQLREFLGKAGFCRLFIPGFAEMAAPLYPLTKPGTLFNWGPDQQKAYQEIKQALLTAPALGLPDLTKPFELFVDEKQGYAKGVLTQKLGPWRRPVAYLSKKLDPVAAGWPPCLRMVAAIAVLTKDAGKLTMGQPLVILAPHAVEALVKQPPDRWLSNARMTHYQAMLLDTDRVQFGPVVALNPATLLPLPEKEAPHDCLEILAETHGTRPDLTDQPIPDADYTWYTDGSSFLQEGQRRAGAAVTTETEVIWARALPAGTSAQRAELIALTQALKMAEGKKLNVYTDSRYAFATAHVHGEIYRRRGWLTSEGREIKNKNEILALLKALFLPKRLSIIHCPGHQKGNSAEARGNRMADQAAREAAMKAVLETSTLLAGKRTADGSEFEKRTADGSEFESPKKKAKVE

SEQ ID NO: 1015 - protein, 2094 aa, synthetic construct
MPAAKRVKLDGGDKKYSIGLDIGTNSVGWAVITDEYKVPSKKFKVLGNTDRHSIKKNLIGALLFDSGETAEATRLKRTARRRYTRRKNRICYLQEIFSNEMAKVDDSFFHRLEESFLVEEDKKHERHPIFGNIVDEVAYHEKYPTIYHLRKKLVDSTDKADLRLIYLALAHMIKFRGHFLIEGDLNPDNSDVDKLFIQLVQTYNQLFEENPINASGVDAKAILSARLSKSRRLENLIAQLPGEKKNGLFGNLIALSLGLTPNFKSNFDLAEDAKLQLSKDTYDDDLDNLLAQIGDQYADLFLAAKNLSDAILLSDILRVNTEITKAPLSASMIKRYDEHHQDLTLLKALVRQQLPEKYKEIFFDQSKNGYAGYIDGGASQEEFYKFIKPILEKMDGTEELLVKLNREDLLRKQRTFDNGSIPHQIHLGELHAILRRQEDFYPFLKDNREKIEKILTFRIPYYVGPLARGNSRFAWMTRKSEETITPWNFEEVVDKGASAQSFIERMTNFDKNLPNEKVLPKHSLLYEYFTVYNELTKVKYVTEGMRKPAFLSGEQKKAIVDLLFKTNRKVTVKQLKEDYFKKIECFDSVEISGVEDRFNASLGTYHDLLKIIKDKDFLDNEENEDILEDIVLTLTLFEDREMIEERLKTYAHLFDDKVMKQLKRRRYTGWGRLSRKLINGIRDKQSGKTILDFLKSDGFANRNFMQLIHDDSLTFKEDIQKAQVSGQGDSLHEHIANLAGSPAIKKGILQTVKVVDELVKVMGRHKPENIVIEMARENQTTQKGQKNSRERMKRIEEGIKELGSQILKEHPVENTQLQNEKLYLYYLQNGRDMYVDQELDINRLSDYDVDHIVPQSFLKDDSIDNKVLTRSDKARGKSDNVPSEEVVKKMKNYWRQLLNAKLITQRKFDNLTKAERGGLSELDKAGFIKRQLVETRQITKHVAQILDSRMNTKYDENDKLIREVKVITLKSKLVSDFRKDFQFYKVREINNYHHAHDAYLNAVVGTALIKKYPKLESEFVYGDYKVYDVRKMIAKSEQEIGKATAKYFFYSNIMNFFKTEITLANGEIRKRPLIETNGETGEIVWDKGRDFATVRKVLSMPQVNIVKKTEVQTGGFSKESILPKRNSDKLIARKKDWDPKKYGGFDSPTVAYSVLVVAKVEKGKSKKLKSVKELLGITIMERSSFEKNPIDFLEAKGYKEVKKDLIIKLPKYSLFELENGRKRMLASAGELQKGNELALPSKYVNFLYLASHYEKLKGSPEDNEQKQLFVEQHKHYLDEIIEQISEFSKRVILADANLDKVLSAYNKHRDKPIREQAENIIHLFTLTNLGAPAAFKYFDTTIDRKRYTSTKEVLDATLIHQSITGLYETRIDLSQLGGDGGGGGGGSPAPGGTLNIEDEYRLHETSKEPDVPLGSTWLSDFPQAWAETGGMGLAVRQAPLIIPLKATSTPVSIKQYPMSQEARLGIKPHIQRLLDQGILVPCQSPWNTPLLPVKKPGTNDYRPVQDLREVNKRVEDIHPTVPNPYNLLSGLPPSHQWYTVLDLKDAFFCLRLHPTSQPLFAFEWRDPEMGISGQLTWTRLPQGFKNSPTLFNEALHRDLADFRIQHPDLILLQYVDDLLLAATSEQDCQRGTRALLQTLGNLGYRASAKKAQICQKQVKYLGYLLKEGQRWLTEARKETVMGQPTPKTPRQLREFLGKAGFCRLFIPGFAEMAAPLYPLTKPGTLFNWGPDQQKAYQEIKQALLTAPALGLPDLTKPFELFVDEKQGYAKGVLTQKLGPWRRPVAYLSKKLDPVAAGWPPCLRMVAAIAVLTKDAGKLTMGQPLVILAPHAVEALVKQPPDRWLSNARMTHYQAMLLDTDRVQFGPVVALNPATLLPLPEKEAPHDCLEILAETHGTRPDLTDQPIPDADYTWYTDGSSFLQEGQRRAGAAVTTETEVIWARALPAGTSAQRAELIALTQALKMAEGKKLNVYTDSRYAFATAHVHGEIYRRRGWLTSEGREIKNKNEILALLKALFLPKRLSIIHCPGHQKGNSAEARGNRMADQAAREAAMKAVLETSTLLAGKRTADGSEFEKRTADGSEFESPKKKAKVE

SEQ ID NO: 1016 - protein, 2091 aa, synthetic construct
MPAAKRVKLDGGDKKYSIGLDIGTNSVGWAVITDEYKVPSKKFKVLGNTDRHSIKKNLIGALLFDSGETAEATRLKRTARRRYTRRKNRICYLQEIFSNEMAKVDDSFFHRLEESFLVEEDKKHERHPIFGNIVDEVAYHEKYPTIYHLRKKLVDSTDKADLRLIYLALAHMIKFRGHFLIEGDLNPDNSDVDKLFIQLVQTYNQLFEENPINASGVDAKAILSARLSKSRRLENLIAQLPGEKKNGLFGNLIALSLGLTPNFKSNFDLAEDAKLQLSKDTYDDDLDNLLAQIGDQYADLFLAAKNLSDAILLSDILRVNTEITKAPLSASMIKRYDEHHQDLTLLKALVRQQLPEKYKEIFFDQSKNGYAGYIDGGASQEEFYKFIKPILEKMDGTEELLVKLNREDLLRKQRTFDNGSIPHQIHLGELHAILRRQEDFYPFLKDNREKIEKILTFRIPYYVGPLARGNSRFAWMTRKSEETITPWNFEEVVDKGASAQSFIERMTNFDKNLPNEKVLPKHSLLYEYFTVYNELTKVKYVTEGMRKPAFLSGEQKKAIVDLLFKTNRKVTVKQLKEDYFKKIECFDSVEISGVEDRFNASLGTYHDLLKIIKDKDFLDNEENEDILEDIVLTLTLFEDREMIEERLKTYAHLFDDKVMKQLKRRRYTGWGRLSRKLINGIRDKQSGKTILDFLKSDGFANRNFMQLIHDDSLTFKEDIQKAQVSGQGDSLHEHIANLAGSPAIKKGILQTVKVVDELVKVMGRHKPENIVIEMARENQTTQKGQKNSRERMKRIEEGIKELGSQILKEHPVENTQLQNEKLYLYYLQNGRDMYVDQELDINRLSDYDVDHIVPQSFLKDDSIDNKVLTRSDKARGKSDNVPSEEVVKKMKNYWRQLLNAKLITQRKFDNLTKAERGGLSELDKAGFIKRQLVETRQITKHVAQILDSRMNTKYDENDKLIREVKVITLKSKLVSDFRKDFQFYKVREINNYHHAHDAYLNAVVGTALIKKYPKLESEFVYGDYKVYDVRKMIAKSEQEIGKATAKYFFYSNIMNFFKTEITLANGEIRKRPLIETNGETGEIVWDKGRDFATVRKVLSMPQVNIVKKTEVQTGGFSKESILPKRNSDKLIARKKDWDPKKYGGFDSPTVAYSVLVVAKVEKGKSKKLKSVKELLGITIMERSSFEKNPIDFLEAKGYKEVKKDLIIKLPKYSLFELENGRKRMLASAGELQKGNELALPSKYVNFLYLASHYEKLKGSPEDNEQKQLFVEQHKHYLDEIIEQISEFSKRVILADANLDKVLSAYNKHRDKPIREQAENIIHLFTLTNLGAPAAFKYFDTTIDRKRYTSTKEVLDATLIHQSITGLYETRIDLSQLGGDGGGGSGSSGGTLNIEDEYRLHETSKEPDVPLGSTWLSDFPQAWAETGGMGLAVRQAPLIIPLKATSTPVSIKQYPMSQEARLGIKPHIQRLLDQGILVPCQSPWNTPLLPVKKPGTNDYRPVQDLREVNKRVEDIHPTVPNPYNLLSGLPPSHQWYTVLDLKDAFFCLRLHPTSQPLFAFEWRDPEMGISGQLTWTRLPQGFKNSPTLFNEALHRDLADFRIQHPDLILLQYVDDLLLAATSEQDCQRGTRALLQTLGNLGYRASAKKAQICQKQVKYLGYLLKEGQRWLTEARKETVMGQPTPKTPRQLREFLGKAGFCRLFIPGFAEMAAPLYPLTKPGTLFNWGPDQQKAYQEIKQALLTAPALGLPDLTKPFELFVDEKQGYAKGVLTQKLGPWRRPVAYLSKKLDPVAAGWPPCLRMVAAIAVLTKDAGKLTMGQPLVILAPHAVEALVKQPPDRWLSNARMTHYQAMLLDTDRVQFGPVVALNPATLLPLPEKEAPHDCLEILAETHGTRPDLTDQPIPDADYTWYTDGSSFLQEGQRRAGAAVTTETEVIWARALPAGTSAQRAELIALTQALKMAEGKKLNVYTDSRYAFATAHVHGEIYRRRGWLTSEGREIKNKNEILALLKALFLPKRLSIIHCPGHQKGNSAEARGNRMADQAAREAAMKAVLETSTLLAGKRTADGSEFEKRTADGSEFESPKKKAKVE

SEQ ID NO: 1017 - protein, 2091 aa, synthetic construct
MPAAKRVKLDGGDKKYSIGLDIGTNSVGWAVITDEYKVPSKKFKVLGNTDRHSIKKNLIGALLFDSGETAEATRLKRTARRRYTRRKNRICYLQEIFSNEMAKVDDSFFHRLEESFLVEEDKKHERHPIFGNIVDEVAYHEKYPTIYHLRKKLVDSTDKADLRLIYLALAHMIKFRGHFLIEGDLNPDNSDVDKLFIQLVQTYNQLFEENPINASGVDAKAILSARLSKSRRLENLIAQLPGEKKNGLFGNLIALSLGLTPNFKSNFDLAEDAKLQLSKDTYDDDLDNLLAQIGDQYADLFLAAKNLSDAILLSDILRVNTEITKAPLSASMIKRYDEHHQDLTLLKALVRQQLPEKYKEIFFDQSKNGYAGYIDGGASQEEFYKFIKPILEKMDGTEELLVKLNREDLLRKQRTFDNGSIPHQIHLGELHAILRRQEDFYPFLKDNREKIEKILTFRIPYYVGPLARGNSRFAWMTRKSEETITPWNFEEVVDKGASAQSFIERMTNFDKNLPNEKVLPKHSLLYEYFTVYNELTKVKYVTEGMRKPAFLSGEQKKAIVDLLFKTNRKVTVKQLKEDYFKKIECFDSVEISGVEDRFNASLGTYHDLLKIIKDKDFLDNEENEDILEDIVLTLTLFEDREMIEERLKTYAHLFDDKVMKQLKRRRYTGWGRLSRKLINGIRDKQSGKTILDFLKSDGFANRNFMQLIHDDSLTFKEDIQKAQVSGQGDSLHEHIANLAGSPAIKKGILQTVKVVDELVKVMGRHKPENIVIEMARENQTTQKGQKNSRERMKRIEEGIKELGSQILKEHPVENTQLQNEKLYLYYLQNGRDMYVDQELDINRLSDYDVDHIVPQSFLKDDSIDNKVLTRSDKARGKSDNVPSEEVVKKMKNYWRQLLNAKLITQRKFDNLTKAERGGLSELDKAGFIKRQLVETRQITKHVAQILDSRMNTKYDENDKLIREVKVITLKSKLVSDFRKDFQFYKVREINNYHHAHDAYLNAVVGTALIKKYPKLESEFVYGDYKVYDVRKMIAKSEQEIGKATAKYFFYSNIMNFFKTEITLANGEIRKRPLIETNGETGEIVWDKGRDFATVRKVLSMPQVNIVKKTEVQTGGFSKESILPKRNSDKLIARKKDWDPKKYGGFDSPTVAYSVLVVAKVEKGKSKKLKSVKELLGITIMERSSFEKNPIDFLEAKGYKEVKKDLIIKLPKYSLFELENGRKRMLASAGELQKGNELALPSKYVNFLYLASHYEKLKGSPEDNEQKQLFVEQHKHYLDEIIEQISEFSKRVILADANLDKVLSAYNKHRDKPIREQAENIIHLFTLTNLGAPAAFKYFDTTIDRKRYTSTKEVLDATLIHQSITGLYETRIDLSQLGGDGGGGSPAPGGTLNIEDEYRLHETSKEPDVPLGSTWLSDFPQAWAETGGMGLAVRQAPLIIPLKATSTPVSIKQYPMSQEARLGIKPHIQRLLDQGILVPCQSPWNTPLLPVKKPGTNDYRPVQDLREVNKRVEDIHPTVPNPYNLLSGLPPSHQWYTVLDLKDAFFCLRLHPTSQPLFAFEWRDPEMGISGQLTWTRLPQGFKNSPTLFNEALHRDLADFRIQHPDLILLQYVDDLLLAATSEQDCQRGTRALLQTLGNLGYRASAKKAQICQKQVKYLGYLLKEGQRWLTEARKETVMGQPTPKTPRQLREFLGKAGFCRLFIPGFAEMAAPLYPLTKPGTLFNWGPDQQKAYQEIKQALLTAPALGLPDLTKPFELFVDEKQGYAKGVLTQKLGPWRRPVAYLSKKLDPVAAGWPPCLRMVAAIAVLTKDAGKLTMGQPLVILAPHAVEALVKQPPDRWLSNARMTHYQAMLLDTDRVQFGPVVALNPATLLPLPEKEAPHDCLEILAETHGTRPDLTDQPIPDADYTWYTDGSSFLQEGQRRAGAAVTTETEVIWARALPAGTSAQRAELIALTQALKMAEGKKLNVYTDSRYAFATAHVHGEIYRRRGWLTSEGREIKNKNEILALLKALFLPKRLSIIHCPGHQKGNSAEARGNRMADQAAREAAMKAVLETSTLLAGKRTADGSEFEKRTADGSEFESPKKKAKVE

SEQ ID NO: 1018 - protein, 2096 aa, synthetic construct
MPAAKRVKLDGGDKKYSIGLDIGTNSVGWAVITDEYKVPSKKFKVLGNTDRHSIKKNLIGALLFDSGETAEATRLKRTARRRYTRRKNRICYLQEIFSNEMAKVDDSFFHRLEESFLVEEDKKHERHPIFGNIVDEVAYHEKYPTIYHLRKKLVDSTDKADLRLIYLALAHMIKFRGHFLIEGDLNPDNSDVDKLFIQLVQTYNQLFEENPINASGVDAKAILSARLSKSRRLENLIAQLPGEKKNGLFGNLIALSLGLTPNFKSNFDLAEDAKLQLSKDTYDDDLDNLLAQIGDQYADLFLAAKNLSDAILLSDILRVNTEITKAPLSASMIKRYDEHHQDLTLLKALVRQQLPEKYKEIFFDQSKNGYAGYIDGGASQEEFYKFIKPILEKMDGTEELLVKLNREDLLRKQRTFDNGSIPHQIHLGELHAILRRQEDFYPFLKDNREKIEKILTFRIPYYVGPLARGNSRFAWMTRKSEETITPWNFEEVVDKGASAQSFIERMTNFDKNLPNEKVLPKHSLLYEYFTVYNELTKVKYVTEGMRKPAFLSGEQKKAIVDLLFKTNRKVTVKQLKEDYFKKIECFDSVEISGVEDRFNASLGTYHDLLKIIKDKDFLDNEENEDILEDIVLTLTLFEDREMIEERLKTYAHLFDDKVMKQLKRRRYTGWGRLSRKLINGIRDKQSGKTILDFLKSDGFANRNFMQLIHDDSLTFKEDIQKAQVSGQGDSLHEHIANLAGSPAIKKGILQTVKVVDELVKVMGRHKPENIVIEMARENQTTQKGQKNSRERMKRIEEGIKELGSQILKEHPVENTQLQNEKLYLYYLQNGRDMYVDQELDINRLSDYDVDHIVPQSFLKDDSIDNKVLTRSDKARGKSDNVPSEEVVKKMKNYWRQLLNAKLITQRKFDNLTKAERGGLSELDKAGFIKRQLVETRQITKHVAQILDSRMNTKYDENDKLIREVKVITLKSKLVSDFRKDFQFYKVREINNYHHAHDAYLNAVVGTALIKKYPKLESEFVYGDYKVYDVRKMIAKSEQEIGKATAKYFFYSNIMNFFKTEITLANGEIRKRPLIETNGETGEIVWDKGRDFATVRKVLSMPQVNIVKKTEVQTGGFSKESILPKRNSDKLIARKKDWDPKKYGGFDSPTVAYSVLVVAKVEKGKSKKLKSVKELLGITIMERSSFEKNPIDFLEAKGYKEVKKDLIIKLPKYSLFELENGRKRMLASAGELQKGNELALPSKYVNFLYLASHYEKLKGSPEDNEQKQLFVEQHKHYLDEIIEQISEFSKRVILADANLDKVLSAYNKHRDKPIREQAENIIHLFTLTNLGAPAAFKYFDTTIDRKRYTSTKEVLDATLIHQSITGLYETRIDLSQLGGDGGGGGEAAAKGGSGGTLNIEDEYRLHETSKEPDVPLGSTWLSDFPQAWAETGGMGLAVRQAPLIIPLKATSTPVSIKQYPMSQEARLGIKPHIQRLLDQGILVPCQSPWNTPLLPVKKPGTNDYRPVQDLREVNKRVEDIHPTVPNPYNLLSGLPPSHQWYTVLDLKDAFFCLRLHPTSQPLFAFEWRDPEMGISGQLTWTRLPQGFKNSPTLFNEALHRDLADFRIQHPDLILLQYVDDLLLAATSEQDCQRGTRALLQTLGNLGYRASAKKAQICQKQVKYLGYLLKEGQRWLTEARKETVMGQPTPKTPRQLREFLGKAGFCRLFIPGFAEMAAPLYPLTKPGTLFNWGPDQQKAYQEIKQALLTAPALGLPDLTKPFELFVDEKQGYAKGVLTQKLGPWRRPVAYLSKKLDPVAAGWPPCLRMVAAIAVLTKDAGKLTMGQPLVILAPHAVEALVKQPPDRWLSNARMTHYQAMLLDTDRVQFGPVVALNPATLLPLPEKEAPHDCLEILAETHGTRPDLTDQPIPDADYTWYTDGSSFLQEGQRRAGAAVTTETEVIWARALPAGTSAQRAELIALTQALKMAEGKKLNVYTDSRYAFATAHVHGEIYRRRGWLTSEGREIKNKNEILALLKALFLPKRLSIIHCPGHQKGNSAEARGNRMADQAAREAAMKAVLETSTLLAGKRTADGSEFEKRTADGSEFESPKKKAKVE

SEQ ID NO: 1019 - protein, 2097 aa, synthetic construct
MPAAKRVKLDGGDKKYSIGLDIGTNSVGWAVITDEYKVPSKKFKVLGNTDRHSIKKNLIGALLFDSGETAEATRLKRTARRRYTRRKNRICYLQEIFSNEMAKVDDSFFHRLEESFLVEEDKKHERHPIFGNIVDEVAYHEKYPTIYHLRKKLVDSTDKADLRLIYLALAHMIKFRGHFLIEGDLNPDNSDVDKLFIQLVQTYNQLFEENPINASGVDAKAILSARLSKSRRLENLIAQLPGEKKNGLFGNLIALSLGLTPNFKSNFDLAEDAKLQLSKDTYDDDLDNLLAQIGDQYADLFLAAKNLSDAILLSDILRVNTEITKAPLSASMIKRYDEHHQDLTLLKALVRQQLPEKYKEIFFDQSKNGYAGYIDGGASQEEFYKFIKPILEKMDGTEELLVKLNREDLLRKQRTFDNGSIPHQIHLGELHAILRRQEDFYPFLKDNREKIEKILTFRIPYYVGPLARGNSRFAWMTRKSEETITPWNFEEVVDKGASAQSFIERMTNFDKNLPNEKVLPKHSLLYEYFTVYNELTKVKYVTEGMRKPAFLSGEQKKAIVDLLFKTNRKVTVKQLKEDYFKKIECFDSVEISGVEDRFNASLGTYHDLLKIIKDKDFLDNEENEDILEDIVLTLTLFEDREMIEERLKTYAHLFDDKVMKQLKRRRYTGWGRLSRKLINGIRDKQSGKTILDFLKSDGFANRNFMQLIHDDSLTFKEDIQKAQVSGQGDSLHEHIANLAGSPAIKKGILQTVKVVDELVKVMGRHKPENIVIEMARENQTTQKGQKNSRERMKRIEEGIKELGSQILKEHPVENTQLQNEKLYLYYLQNGRDMYVDQELDINRLSDYDVDHIVPQSFLKDDSIDNKVLTRSDKARGKSDNVPSEEVVKKMKNYWRQLLNAKLITQRKFDNLTKAERGGLSELDKAGFIKRQLVETRQITKHVAQILDSRMNTKYDENDKLIREVKVITLKSKLVSDFRKDFQFYKVREINNYHHAHDAYLNAVVGTALIKKYPKLESEFVYGDYKVYDVRKMIAKSEQEIGKATAKYFFYSNIMNFFKTEITLANGEIRKRPLIETNGETGEIVWDKGRDFATVRKVLSMPQVNIVKKTEVQTGGFSKESILPKRNSDKLIARKKDWDPKKYGGFDSPTVAYSVLVVAKVEKGKSKKLKSVKELLGITIMERSSFEKNPIDFLEAKGYKEVKKDLIIKLPKYSLFELENGRKRMLASAGELQKGNELALPSKYVNFLYLASHYEKLKGSPEDNEQKQLFVEQHKHYLDEIIEQISEFSKRVILADANLDKVLSAYNKHRDKPIREQAENIIHLFTLTNLGAPAAFKYFDTTIDRKRYTSTKEVLDATLIHQSITGLYETRIDLSQLGGDGGGGSGGSGGSGGSGGTLNIEDEYRLHETSKEPDVPLGSTWLSDFPQAWAETGGMGLAVRQAPLIIPLKATSTPVSIKQYPMSQEARLGIKPHIQRLLDQGILVPCQSPWNTPLLPVKKPGTNDYRPVQDLREVNKRVEDIHPTVPNPYNLLSGLPPSHQWYTVLDLKDAFFCLRLHPTSQPLFAFEWRDPEMGISGQLTWTRLPQGFKNSPTLFNEALHRDLADFRIQHPDLILLQYVDDLLLAATSEQDCQRGTRALLQTLGNLGYRASAKKAQICQKQVKYLGYLLKEGQRWLTEARKETVMGQPTPKTPRQLREFLGKAGFCRLFIPGFAEMAAPLYPLTKPGTLFNWGPDQQKAYQEIKQALLTAPALGLPDLTKPFELFVDEKQGYAKGVLTQKLGPWRRPVAYLSKKLDPVAAGWPPCLRMVAAIAVLTKDAGKLTMGQPLVILAPHAVEALVKQPPDRWLSNARMTHYQAMLLDTDRVQFGPVVALNPATLLPLPEKEAPHDCLEILAETHGTRPDLTDQPIPDADYTWYTDGSSFLQEGQRRAGAAVTTETEVIWARALPAGTSAQRAELIALTQALKMAEGKKLNVYTDSRYAFATAHVHGEIYRRRGWLTSEGREIKNKNEILALLKALFLPKRLSIIHCPGHQKGNSAEARGNRMADQAAREAAMKAVLETSTLLAGKRTADGSEFEKRTADGSEFESPKKKAKVE

SEQ ID NO: 1020 - protein, 2098 aa, synthetic construct
MPAAKRVKLDGGDKKYSIGLDIGTNSVGWAVITDEYKVPSKKFKVLGNTDRHSIKKNLIGALLFDSGETAEATRLKRTARRRYTRRKNRICYLQEIFSNEMAKVDDSFFHRLEESFLVEEDKKHERHPIFGNIVDEVAYHEKYPTIYHLRKKLVDSTDKADLRLIYLALAHMIKFRGHFLIEGDLNPDNSDVDKLFIQLVQTYNQLFEENPINASGVDAKAILSARLSKSRRLENLIAQLPGEKKNGLFGNLIALSLGLTPNFKSNFDLAEDAKLQLSKDTYDDDLDNLLAQIGDQYADLFLAAKNLSDAILLSDILRVNTEITKAPLSASMIKRYDEHHQDLTLLKALVRQQLPEKYKEIFFDQSKNGYAGYIDGGASQEEFYKFIKPILEKMDGTEELLVKLNREDLLRKQRTFDNGSIPHQIHLGELHAILRRQEDFYPFLKDNREKIEKILTFRIPYYVGPLARGNSRFAWMTRKSEETITPWNFEEVVDKGASAQSFIERMTNFDKNLPNEKVLPKHSLLYEYFTVYNELTKVKYVTEGMRKPAFLSGEQKKAIVDLLFKTNRKVTVKQLKEDYFKKIECFDSVEISGVEDRFNASLGTYHDLLKIIKDKDFLDNEENEDILEDIVLTLTLFEDREMIEERLKTYAHLFDDKVMKQLKRRRYTGWGRLSRKLINGIRDKQSGKTILDFLKSDGFANRNFMQLIHDDSLTFKEDIQKAQVSGQGDSLHEHIANLAGSPAIKKGILQTVKVVDELVKVMGRHKPENIVIEMARENQTTQKGQKNSRERMKRIEEGIKELGSQILKEHPVENTQLQNEKLYLYYLQNGRDMYVDQELDINRLSDYDVDHIVPQSFLKDDSIDNKVLTRSDKARGKSDNVPSEEVVKKMKNYWRQLLNAKLITQRKFDNLTKAERGGLSELDKAGFIKRQLVETRQITKHVAQILDSRMNTKYDENDKLIREVKVITLKSKLVSDFRKDFQFYKVREINNYHHAHDAYLNAVVGTALIKKYPKLESEFVYGDYKVYDVRKMIAKSEQEIGKATAKYFFYSNIMNFFKTEITLANGEIRKRPLIETNGETGEIVWDKGRDFATVRKVLSMPQVNIVKKTEVQTGGFSKESILPKRNSDKLIARKKDWDPKKYGGFDSPTVAYSVLVVAKVEKGKSKKLKSVKELLGITIMERSSFEKNPIDFLEAKGYKEVKKDLIIKLPKYSLFELENGRKRMLASAGELQKGNELALPSKYVNFLYLASHYEKLKGSPEDNEQKQLFVEQHKHYLDEIIEQISEFSKRVILADANLDKVLSAYNKHRDKPIREQAENIIHLFTLTNLGAPAAFKYFDTTIDRKRYTSTKEVLDATLIHQSITGLYETRIDLSQLGGDGGPAPAPAPAPAPAPGGTLNIEDEYRLHETSKEPDVPLGSTWLSDFPQAWAETGGMGLAVRQAPLIIPLKATSTPVSIKQYPMSQEARLGIKPHIQRLLDQGILVPCQSPWNTPLLPVKKPGTNDYRPVQDLREVNKRVEDIHPTVPNPYNLLSGLPPSHQWYTVLDLKDAFFCLRLHPTSQPLFAFEWRDPEMGISGQLTWTRLPQGFKNSPTLFNEALHRDLADFRIQHPDLILLQYVDDLLLAATSEQDCQRGTRALLQTLGNLGYRASAKKAQICQKQVKYLGYLLKEGQRWLTEARKETVMGQPTPKTPRQLREFLGKAGFCRLFIPGFAEMAAPLYPLTKPGTLFNWGPDQQKAYQEIKQALLTAPALGLPDLTKPFELFVDEKQGYAKGVLTQKLGPWRRPVAYLSKKLDPVAAGWPPCLRMVAAIAVLTKDAGKLTMGQPLVILAPHAVEALVKQPPDRWLSNARMTHYQAMLLDTDRVQFGPVVALNPATLLPLPEKEAPHDCLEILAETHGTRPDLTDQPIPDADYTWYTDGSSFLQEGQRRAGAAVTTETEVIWARALPAGTSAQRAELIALTQALKMAEGKKLNVYTDSRYAFATAHVHGEIYRRRGWLTSEGREIKNKNEILALLKALFLPKRLSIIHCPGHQKGNSAEARGNRMADQAAREAAMKAVLETSTLLAGKRTADGSEFEKRTADGSEFESPKKKAKVE

SEQ ID NO: 1021 - protein, 2115 aa, synthetic construct
MPAAKRVKLDGGDKKYSIGLDIGTNSVGWAVITDEYKVPSKKFKVLGNTDRHSIKKNLIGALLFDSGETAEATRLKRTARRRYTRRKNRICYLQEIFSNEMAKVDDSFFHRLEESFLVEEDKKHERHPIFGNIVDEVAYHEKYPTIYHLRKKLVDSTDKADLRLIYLALAHMIKFRGHFLIEGDLNPDNSDVDKLFIQLVQTYNQLFEENPINASGVDAKAILSARLSKSRRLENLIAQLPGEKKNGLFGNLIALSLGLTPNFKSNFDLAEDAKLQLSKDTYDDDLDNLLAQIGDQYADLFLAAKNLSDAILLSDILRVNTEITKAPLSASMIKRYDEHHQDLTLLKALVRQQLPEKYKEIFFDQSKNGYAGYIDGGASQEEFYKFIKPILEKMDGTEELLVKLNREDLLRKQRTFDNGSIPHQIHLGELHAILRRQEDFYPFLKDNREKIEKILTFRIPYYVGPLARGNSRFAWMTRKSEETITPWNFEEVVDKGASAQSFIERMTNFDKNLPNEKVLPKHSLLYEYFTVYNELTKVKYVTEGMRKPAFLSGEQKKAIVDLLFKTNRKVTVKQLKEDYFKKIECFDSVEISGVEDRFNASLGTYHDLLKIIKDKDFLDNEENEDILEDIVLTLTLFEDREMIEERLKTYAHLFDDKVMKQLKRRRYTGWGRLSRKLINGIRDKQSGKTILDFLKSDGFANRNFMQLIHDDSLTFKEDIQKAQVSGQGDSLHEHIANLAGSPAIKKGILQTVKVVDELVKVMGRHKPENIVIEMARENQTTQKGQKNSRERMKRIEEGIKELGSQILKEHPVENTQLQNEKLYLYYLQNGRDMYVDQELDINRLSDYDVDHIVPQSFLKDDSIDNKVLTRSDKARGKSDNVPSEEVVKKMKNYWRQLLNAKLITQRKFDNLTKAERGGLSELDKAGFIKRQLVETRQITKHVAQILDSRMNTKYDENDKLIREVKVITLKSKLVSDFRKDFQFYKVREINNYHHAHDAYLNAVVGTALIKKYPKLESEFVYGDYKVYDVRKMIAKSEQEIGKATAKYFFYSNIMNFFKTEITLANGEIRKRPLIETNGETGEIVWDKGRDFATVRKVLSMPQVNIVKKTEVQTGGFSKESILPKRNSDKLIARKKDWDPKKYGGFDSPTVAYSVLVVAKVEKGKSKKLKSVKELLGITIMERSSFEKNPIDFLEAKGYKEVKKDLIIKLPKYSLFELENGRKRMLASAGELQKGNELALPSKYVNFLYLASHYEKLKGSPEDNEQKQLFVEQHKHYLDEIIEQISEFSKRVILADANLDKVLSAYNKHRDKPIREQAENIIHLFTLTNLGAPAAFKYFDTTIDRKRYTSTKEVLDATLIHQSITGLYETRIDLSQLGGDGGGGGGSGGGGSGGGGSGGGGSGGGGSGGGGSGGTLNIEDEYRLHETSKEPDVPLGSTWLSDFPQAWAETGGMGLAVRQAPLIIPLKATSTPVSIKQYPMSQEARLGIKPHIQRLLDQGILVPCQSPWNTPLLPVKKPGTNDYRPVQDLREVNKRVEDIHPTVPNPYNLLSGLPPSHQWYTVLDLKDAFFCLRLHPTSQPLFAFEWRDPEMGISGQLTWTRLPQGFKNSPTLFNEALHRDLADFRIQHPDLILLQYVDDLLLAATSEQDCQRGTRALLQTLGNLGYRASAKKAQICQKQVKYLGYLLKEGQRWLTEARKETVMGQPTPKTPRQLREFLGKAGFCRLFIPGFAEMAAPLYPLTKPGTLFNWGPDQQKAYQEIKQALLTAPALGLPDLTKPFELFVDEKQGYAKGVLTQKLGPWRRPVAYLSKKLDPVAAGWPPCLRMVAAIAVLTKDAGKLTMGQPLVILAPHAVEALVKQPPDRWLSNARMTHYQAMLLDTDRVQFGPVVALNPATLLPLPEKEAPHDCLEILAETHGTRPDLTDQPIPDADYTWYTDGSSFLQEGQRRAGAAVTTETEVIWARALPAGTSAQRAELIALTQALKMAEGKKLNVYTDSRYAFATAHVHGEIYRRRGWLTSEGREIKNKNEILALLKALFLPKRLSIIHCPGHQKGNSAEARGNRMADQAAREAAMKAVLETSTLLAGKRTADGSEFEKRTADGSEFESPKKKAKVE

SEQ ID NO: 1022 - protein, 2094 aa, synthetic construct
MPAAKRVKLDGGDKKYSIGLDIGTNSVGWAVITDEYKVPSKKFKVLGNTDRHSIKKNLIGALLFDSGETAEATRLKRTARRRYTRRKNRICYLQEIFSNEMAKVDDSFFHRLEESFLVEEDKKHERHPIFGNIVDEVAYHEKYPTIYHLRKKLVDSTDKADLRLIYLALAHMIKFRGHFLIEGDLNPDNSDVDKLFIQLVQTYNQLFEENPINASGVDAKAILSARLSKSRRLENLIAQLPGEKKNGLFGNLIALSLGLTPNFKSNFDLAEDAKLQLSKDTYDDDLDNLLAQIGDQYADLFLAAKNLSDAILLSDILRVNTEITKAPLSASMIKRYDEHHQDLTLLKALVRQQLPEKYKEIFFDQSKNGYAGYIDGGASQEEFYKFIKPILEKMDGTEELLVKLNREDLLRKQRTFDNGSIPHQIHLGELHAILRRQEDFYPFLKDNREKIEKILTFRIPYYVGPLARGNSRFAWMTRKSEETITPWNFEEVVDKGASAQSFIERMTNFDKNLPNEKVLPKHSLLYEYFTVYNELTKVKYVTEGMRKPAFLSGEQKKAIVDLLFKTNRKVTVKQLKEDYFKKIECFDSVEISGVEDRFNASLGTYHDLLKIIKDKDFLDNEENEDILEDIVLTLTLFEDREMIEERLKTYAHLFDDKVMKQLKRRRYTGWGRLSRKLINGIRDKQSGKTILDFLKSDGFANRNFMQLIHDDSLTFKEDIQKAQVSGQGDSLHEHIANLAGSPAIKKGILQTVKVVDELVKVMGRHKPENIVIEMARENQTTQKGQKNSRERMKRIEEGIKELGSQILKEHPVENTQLQNEKLYLYYLQNGRDMYVDQELDINRLSDYDVDHIVPQSFLKDDSIDNKVLTRSDKARGKSDNVPSEEVVKKMKNYWRQLLNAKLITQRKFDNLTKAERGGLSELDKAGFIKRQLVETRQITKHVAQILDSRMNTKYDENDKLIREVKVITLKSKLVSDFRKDFQFYKVREINNYHHAHDAYLNAVVGTALIKKYPKLESEFVYGDYKVYDVRKMIAKSEQEIGKATAKYFFYSNIMNFFKTEITLANGEIRKRPLIETNGETGEIVWDKGRDFATVRKVLSMPQVNIVKKTEVQTGGFSKESILPKRNSDKLIARKKDWDPKKYGGFDSPTVAYSVLVVAKVEKGKSKKLKSVKELLGITIMERSSFEKNPIDFLEAKGYKEVKKDLIIKLPKYSLFELENGRKRMLASAGELQKGNELALPSKYVNFLYLASHYEKLKGSPEDNEQKQLFVEQHKHYLDEIIEQISEFSKRVILADANLDKVLSAYNKHRDKPIREQAENIIHLFTLTNLGAPAAFKYFDTTIDRKRYTSTKEVLDATLIHQSITGLYETRIDLSQLGGDGGGGSGSSGGGGGTLNIEDEYRLHETSKEPDVPLGSTWLSDFPQAWAETGGMGLAVRQAPLIIPLKATSTPVSIKQYPMSQEARLGIKPHIQRLLDQGILVPCQSPWNTPLLPVKKPGTNDYRPVQDLREVNKRVEDIHPTVPNPYNLLSGLPPSHQWYTVLDLKDAFFCLRLHPTSQPLFAFEWRDPEMGISGQLTWTRLPQGFKNSPTLFNEALHRDLADFRIQHPDLILLQYVDDLLLAATSEQDCQRGTRALLQTLGNLGYRASAKKAQICQKQVKYLGYLLKEGQRWLTEARKETVMGQPTPKTPRQLREFLGKAGFCRLFIPGFAEMAAPLYPLTKPGTLFNWGPDQQKAYQEIKQALLTAPALGLPDLTKPFELFVDEKQGYAKGVLTQKLGPWRRPVAYLSKKLDPVAAGWPPCLRMVAAIAVLTKDAGKLTMGQPLVILAPHAVEALVKQPPDRWLSNARMTHYQAMLLDTDRVQFGPVVALNPATLLPLPEKEAPHDCLEILAETHGTRPDLTDQPIPDADYTWYTDGSSFLQEGQRRAGAAVTTETEVIWARALPAGTSAQRAELIALTQALKMAEGKKLNVYTDSRYAFATAHVHGEIYRRRGWLTSEGREIKNKNEILALLKALFLPKRLSIIHCPGHQKGNSAEARGNRMADQAAREAAMKAVLETSTLLAGKRTADGSEFEKRTADGSEFESPKKKAKVE

SEQ ID NO: 1023 - protein, 2093 aa, synthetic construct
MPAAKRVKLDGGDKKYSIGLDIGTNSVGWAVITDEYKVPSKKFKVLGNTDRHSIKKNLIGALLFDSGETAEATRLKRTARRRYTRRKNRICYLQEIFSNEMAKVDDSFFHRLEESFLVEEDKKHERHPIFGNIVDEVAYHEKYPTIYHLRKKLVDSTDKADLRLIYLALAHMIKFRGHFLIEGDLNPDNSDVDKLFIQLVQTYNQLFEENPINASGVDAKAILSARLSKSRRLENLIAQLPGEKKNGLFGNLIALSLGLTPNFKSNFDLAEDAKLQLSKDTYDDDLDNLLAQIGDQYADLFLAAKNLSDAILLSDILRVNTEITKAPLSASMIKRYDEHHQDLTLLKALVRQQLPEKYKEIFFDQSKNGYAGYIDGGASQEEFYKFIKPILEKMDGTEELLVKLNREDLLRKQRTFDNGSIPHQIHLGELHAILRRQEDFYPFLKDNREKIEKILTFRIPYYVGPLARGNSRFAWMTRKSEETITPWNFEEVVDKGASAQSFIERMTNFDKNLPNEKVLPKHSLLYEYFTVYNELTKVKYVTEGMRKPAFLSGEQKKAIVDLLFKTNRKVTVKQLKEDYFKKIECFDSVEISGVEDRFNASLGTYHDLLKIIKDKDFLDNEENEDILEDIVLTLTLFEDREMIEERLKTYAHLFDDKVMKQLKRRRYTGWGRLSRKLINGIRDKQSGKTILDFLKSDGFANRNFMQLIHDDSLTFKEDIQKAQVSGQGDSLHEHIANLAGSPAIKKGILQTVKVVDELVKVMGRHKPENIVIEMARENQTTQKGQKNSRERMKRIEEGIKELGSQILKEHPVENTQLQNEKLYLYYLQNGRDMYVDQELDINRLSDYDVDHIVPQSFLKDDSIDNKVLTRSDKARGKSDNVPSEEVVKKMKNYWRQLLNAKLITQRKFDNLTKAERGGLSELDKAGFIKRQLVETRQITKHVAQILDSRMNTKYDENDKLIREVKVITLKSKLVSDFRKDFQFYKVREINNYHHAHDAYLNAVVGTALIKKYPKLESEFVYGDYKVYDVRKMIAKSEQEIGKATAKYFFYSNIMNFFKTEITLANGEIRKRPLIETNGETGEIVWDKGRDFATVRKVLSMPQVNIVKKTEVQTGGFSKESILPKRNSDKLIARKKDWDPKKYGGFDSPTVAYSVLVVAKVEKGKSKKLKSVKELLGITIMERSSFEKNPIDFLEAKGYKEVKKDLIIKLPKYSLFELENGRKRMLASAGELQKGNELALPSKYVNFLYLASHYEKLKGSPEDNEQKQLFVEQHKHYLDEIIEQISEFSKRVILADANLDKVLSAYNKHRDKPIREQAENIIHLFTLTNLGAPAAFKYFDTTIDRKRYTSTKEVLDATLIHQSITGLYETRIDLSQLGGDGGEAAAKGGSGGTLNIEDEYRLHETSKEPDVPLGSTWLSDFPQAWAETGGMGLAVRQAPLIIPLKATSTPVSIKQYPMSQEARLGIKPHIQRLLDQGILVPCQSPWNTPLLPVKKPGTNDYRPVQDLREVNKRVEDIHPTVPNPYNLLSGLPPSHQWYTVLDLKDAFFCLRLHPTSQPLFAFEWRDPEMGISGQLTWTRLPQGFKNSPTLFNEALHRDLADFRIQHPDLILLQYVDDLLLAATSEQDCQRGTRALLQTLGNLGYRASAKKAQICQKQVKYLGYLLKEGQRWLTEARKETVMGQPTPKTPRQLREFLGKAGFCRLFIPGFAEMAAPLYPLTKPGTLFNWGPDQQKAYQEIKQALLTAPALGLPDLTKPFELFVDEKQGYAKGVLTQKLGPWRRPVAYLSKKLDPVAAGWPPCLRMVAAIAVLTKDAGKLTMGQPLVILAPHAVEALVKQPPDRWLSNARMTHYQAMLLDTDRVQFGPVVALNPATLLPLPEKEAPHDCLEILAETHGTRPDLTDQPIPDADYTWYTDGSSFLQEGQRRAGAAVTTETEVIWARALPAGTSAQRAELIALTQALKMAEGKKLNVYTDSRYAFATAHVHGEIYRRRGWLTSEGREIKNKNEILALLKALFLPKRLSIIHCPGHQKGNSAEARGNRMADQAAREAAMKAVLETSTLLAGKRTADGSEFEKRTADGSEFESPKKKAKVE

SEQ ID NO: 1024 - protein, 2094 aa, synthetic construct
MPAAKRVKLDGGDKKYSIGLDIGTNSVGWAVITDEYKVPSKKFKVLGNTDRHSIKKNLIGALLFDSGETAEATRLKRTARRRYTRRKNRICYLQEIFSNEMAKVDDSFFHRLEESFLVEEDKKHERHPIFGNIVDEVAYHEKYPTIYHLRKKLVDSTDKADLRLIYLALAHMIKFRGHFLIEGDLNPDNSDVDKLFIQLVQTYNQLFEENPINASGVDAKAILSARLSKSRRLENLIAQLPGEKKNGLFGNLIALSLGLTPNFKSNFDLAEDAKLQLSKDTYDDDLDNLLAQIGDQYADLFLAAKNLSDAILLSDILRVNTEITKAPLSASMIKRYDEHHQDLTLLKALVRQQLPEKYKEIFFDQSKNGYAGYIDGGASQEEFYKFIKPILEKMDGTEELLVKLNREDLLRKQRTFDNGSIPHQIHLGELHAILRRQEDFYPFLKDNREKIEKILTFRIPYYVGPLARGNSRFAWMTRKSEETITPWNFEEVVDKGASAQSFIERMTNFDKNLPNEKVLPKHSLLYEYFTVYNELTKVKYVTEGMRKPAFLSGEQKKAIVDLLFKTNRKVTVKQLKEDYFKKIECFDSVEISGVEDRFNASLGTYHDLLKIIKDKDFLDNEENEDILEDIVLTLTLFEDREMIEERLKTYAHLFDDKVMKQLKRRRYTGWGRLSRKLINGIRDKQSGKTILDFLKSDGFANRNFMQLIHDDSLTFKEDIQKAQVSGQGDSLHEHIANLAGSPAIKKGILQTVKVVDELVKVMGRHKPENIVIEMARENQTTQKGQKNSRERMKRIEEGIKELGSQILKEHPVENTQLQNEKLYLYYLQNGRDMYVDQELDINRLSDYDVDHIVPQSFLKDDSIDNKVLTRSDKARGKSDNVPSEEVVKKMKNYWRQLLNAKLITQRKFDNLTKAERGGLSELDKAGFIKRQLVETRQITKHVAQILDSRMNTKYDENDKLIREVKVITLKSKLVSDFRKDFQFYKVREINNYHHAHDAYLNAVVGTALIKKYPKLESEFVYGDYKVYDVRKMIAKSEQEIGKATAKYFFYSNIMNFFKTEITLANGEIRKRPLIETNGETGEIVWDKGRDFATVRKVLSMPQVNIVKKTEVQTGGFSKESILPKRNSDKLIARKKDWDPKKYGGFDSPTVAYSVLVVAKVEKGKSKKLKSVKELLGITIMERSSFEKNPIDFLEAKGYKEVKKDLIIKLPKYSLFELENGRKRMLASAGELQKGNELALPSKYVNFLYLASHYEKLKGSPEDNEQKQLFVEQHKHYLDEIIEQISEFSKRVILADANLDKVLSAYNKHRDKPIREQAENIIHLFTLTNLGAPAAFKYFDTTIDRKRYTSTKEVLDATLIHQSITGLYETRIDLSQLGGDGGGGGGGSGSSGGTLNIEDEYRLHETSKEPDVPLGSTWLSDFPQAWAETGGMGLAVRQAPLIIPLKATSTPVSIKQYPMSQEARLGIKPHIQRLLDQGILVPCQSPWNTPLLPVKKPGTNDYRPVQDLREVNKRVEDIHPTVPNPYNLLSGLPPSHQWYTVLDLKDAFFCLRLHPTSQPLFAFEWRDPEMGISGQLTWTRLPQGFKNSPTLFNEALHRDLADFRIQHPDLILLQYVDDLLLAATSEQDCQRGTRALLQTLGNLGYRASAKKAQICQKQVKYLGYLLKEGQRWLTEARKETVMGQPTPKTPRQLREFLGKAGFCRLFIPGFAEMAAPLYPLTKPGTLFNWGPDQQKAYQEIKQALLTAPALGLPDLTKPFELFVDEKQGYAKGVLTQKLGPWRRPVAYLSKKLDPVAAGWPPCLRMVAAIAVLTKDAGKLTMGQPLVILAPHAVEALVKQPPDRWLSNARMTHYQAMLLDTDRVQFGPVVALNPATLLPLPEKEAPHDCLEILAETHGTRPDLTDQPIPDADYTWYTDGSSFLQEGQRRAGAAVTTETEVIWARALPAGTSAQRAELIALTQALKMAEGKKLNVYTDSRYAFATAHVHGEIYRRRGWLTSEGREIKNKNEILALLKALFLPKRLSIIHCPGHQKGNSAEARGNRMADQAAREAAMKAVLETSTLLAGKRTADGSEFEKRTADGSEFESPKKKAKVE

SEQ ID NO: 1025 - protein, 2094 aa, synthetic construct
MPAAKRVKLDGGDKKYSIGLDIGTNSVGWAVITDEYKVPSKKFKVLGNTDRHSIKKNLIGALLFDSGETAEATRLKRTARRRYTRRKNRICYLQEIFSNEMAKVDDSFFHRLEESFLVEEDKKHERHPIFGNIVDEVAYHEKYPTIYHLRKKLVDSTDKADLRLIYLALAHMIKFRGHFLIEGDLNPDNSDVDKLFIQLVQTYNQLFEENPINASGVDAKAILSARLSKSRRLENLIAQLPGEKKNGLFGNLIALSLGLTPNFKSNFDLAEDAKLQLSKDTYDDDLDNLLAQIGDQYADLFLAAKNLSDAILLSDILRVNTEITKAPLSASMIKRYDEHHQDLTLLKALVRQQLPEKYKEIFFDQSKNGYAGYIDGGASQEEFYKFIKPILEKMDGTEELLVKLNREDLLRKQRTFDNGSIPHQIHLGELHAILRRQEDFYPFLKDNREKIEKILTFRIPYYVGPLARGNSRFAWMTRKSEETITPWNFEEVVDKGASAQSFIERMTNFDKNLPNEKVLPKHSLLYEYFTVYNELTKVKYVTEGMRKPAFLSGEQKKAIVDLLFKTNRKVTVKQLKEDYFKKIECFDSVEISGVEDRFNASLGTYHDLLKIIKDKDFLDNEENEDILEDIVLTLTLFEDREMIEERLKTYAHLFDDKVMKQLKRRRYTGWGRLSRKLINGIRDKQSGKTILDFLKSDGFANRNFMQLIHDDSLTFKEDIQKAQVSGQGDSLHEHIANLAGSPAIKKGILQTVKVVDELVKVMGRHKPENIVIEMARENQTTQKGQKNSRERMKRIEEGIKELGSQILKEHPVENTQLQNEKLYLYYLQNGRDMYVDQELDINRLSDYDVDHIVPQSFLKDDSIDNKVLTRSDKARGKSDNVPSEEVVKKMKNYWRQLLNAKLITQRKFDNLTKAERGGLSELDKAGFIKRQLVETRQITKHVAQILDSRMNTKYDENDKLIREVKVITLKSKLVSDFRKDFQFYKVREINNYHHAHDAYLNAVVGTALIKKYPKLESEFVYGDYKVYDVRKMIAKSEQEIGKATAKYFFYSNIMNFFKTEITLANGEIRKRPLIETNGETGEIVWDKGRDFATVRKVLSMPQVNIVKKTEVQTGGFSKESILPKRNSDKLIARKKDWDPKKYGGFDSPTVAYSVLVVAKVEKGKSKKLKSVKELLGITIMERSSFEKNPIDFLEAKGYKEVKKDLIIKLPKYSLFELENGRKRMLASAGELQKGNELALPSKYVNFLYLASHYEKLKGSPEDNEQKQLFVEQHKHYLDEIIEQISEFSKRVILADANLDKVLSAYNKHRDKPIREQAENIIHLFTLTNLGAPAAFKYFDTTIDRKRYTSTKEVLDATLIHQSITGLYETRIDLSQLGGDGGGGGPAPGGSGGTLNIEDEYRLHETSKEPDVPLGSTWLSDFPQAWAETGGMGLAVRQAPLIIPLKATSTPVSIKQYPMSQEARLGIKPHIQRLLDQGILVPCQSPWNTPLLPVKKPGTNDYRPVQDLREVNKRVEDIHPTVPNPYNLLSGLPPSHQWYTVLDLKDAFFCLRLHPTSQPLFAFEWRDPEMGISGQLTWTRLPQGFKNSPTLFNEALHRDLADFRIQHPDLILLQYVDDLLLAATSEQDCQRGTRALLQTLGNLGYRASAKKAQICQKQVKYLGYLLKEGQRWLTEARKETVMGQPTPKTPRQLREFLGKAGFCRLFIPGFAEMAAPLYPLTKPGTLFNWGPDQQKAYQEIKQALLTAPALGLPDLTKPFELFVDEKQGYAKGVLTQKLGPWRRPVAYLSKKLDPVAAGWPPCLRMVAAIAVLTKDAGKLTMGQPLVILAPHAVEALVKQPPDRWLSNARMTHYQAMLLDTDRVQFGPVVALNPATLLPLPEKEAPHDCLEILAETHGTRPDLTDQPIPDADYTWYTDGSSFLQEGQRRAGAAVTTETEVIWARALPAGTSAQRAELIALTQALKMAEGKKLNVYTDSRYAFATAHVHGEIYRRRGWLTSEGREIKNKNEILALLKALFLPKRLSIIHCPGHQKGNSAEARGNRMADQAAREAAMKAVLETSTLLAGKRTADGSEFEKRTADGSEFESPKKKAKVE

SEQ ID NO: 1026 - protein, 2110 aa, synthetic construct
MPAAKRVKLDGGDKKYSIGLDIGTNSVGWAVITDEYKVPSKKFKVLGNTDRHSIKKNLIGALLFDSGETAEATRLKRTARRRYTRRKNRICYLQEIFSNEMAKVDDSFFHRLEESFLVEEDKKHERHPIFGNIVDEVAYHEKYPTIYHLRKKLVDSTDKADLRLIYLALAHMIKFRGHFLIEGDLNPDNSDVDKLFIQLVQTYNQLFEENPINASGVDAKAILSARLSKSRRLENLIAQLPGEKKNGLFGNLIALSLGLTPNFKSNFDLAEDAKLQLSKDTYDDDLDNLLAQIGDQYADLFLAAKNLSDAILLSDILRVNTEITKAPLSASMIKRYDEHHQDLTLLKALVRQQLPEKYKEIFFDQSKNGYAGYIDGGASQEEFYKFIKPILEKMDGTEELLVKLNREDLLRKQRTFDNGSIPHQIHLGELHAILRRQEDFYPFLKDNREKIEKILTFRIPYYVGPLARGNSRFAWMTRKSEETITPWNFEEVVDKGASAQSFIERMTNFDKNLPNEKVLPKHSLLYEYFTVYNELTKVKYVTEGMRKPAFLSGEQKKAIVDLLFKTNRKVTVKQLKEDYFKKIECFDSVEISGVEDRFNASLGTYHDLLKIIKDKDFLDNEENEDILEDIVLTLTLFEDREMIEERLKTYAHLFDDKVMKQLKRRRYTGWGRLSRKLINGIRDKQSGKTILDFLKSDGFANRNFMQLIHDDSLTFKEDIQKAQVSGQGDSLHEHIANLAGSPAIKKGILQTVKVVDELVKVMGRHKPENIVIEMARENQTTQKGQKNSRERMKRIEEGIKELGSQILKEHPVENTQLQNEKLYLYYLQNGRDMYVDQELDINRLSDYDVDHIVPQSFLKDDSIDNKVLTRSDKARGKSDNVPSEEVVKKMKNYWRQLLNAKLITQRKFDNLTKAERGGLSELDKAGFIKRQLVETRQITKHVAQILDSRMNTKYDENDKLIREVKVITLKSKLVSDFRKDFQFYKVREINNYHHAHDAYLNAVVGTALIKKYPKLESEFVYGDYKVYDVRKMIAKSEQEIGKATAKYFFYSNIMNFFKTEITLANGEIRKRPLIETNGETGEIVWDKGRDFATVRKVLSMPQVNIVKKTEVQTGGFSKESILPKRNSDKLIARKKDWDPKKYGGFDSPTVAYSVLVVAKVEKGKSKKLKSVKELLGITIMERSSFEKNPIDFLEAKGYKEVKKDLIIKLPKYSLFELENGRKRMLASAGELQKGNELALPSKYVNFLYLASHYEKLKGSPEDNEQKQLFVEQHKHYLDEIIEQISEFSKRVILADANLDKVLSAYNKHRDKPIREQAENIIHLFTLTNLGAPAAFKYFDTTIDRKRYTSTKEVLDATLIHQSITGLYETRIDLSQLGGDGGGGGGSGGGGSGGGGSGGGGSGGGGSGGTLNIEDEYRLHETSKEPDVPLGSTWLSDFPQAWAETGGMGLAVRQAPLIIPLKATSTPVSIKQYPMSQEARLGIKPHIQRLLDQGILVPCQSPWNTPLLPVKKPGTNDYRPVQDLREVNKRVEDIHPTVPNPYNLLSGLPPSHQWYTVLDLKDAFFCLRLHPTSQPLFAFEWRDPEMGISGQLTWTRLPQGFKNSPTLFNEALHRDLADFRIQHPDLILLQYVDDLLLAATSEQDCQRGTRALLQTLGNLGYRASAKKAQICQKQVKYLGYLLKEGQRWLTEARKETVMGQPTPKTPRQLREFLGKAGFCRLFIPGFAEMAAPLYPLTKPGTLFNWGPDQQKAYQEIKQALLTAPALGLPDLTKPFELFVDEKQGYAKGVLTQKLGPWRRPVAYLSKKLDPVAAGWPPCLRMVAAIAVLTKDAGKLTMGQPLVILAPHAVEALVKQPPDRWLSNARMTHYQAMLLDTDRVQFGPVVALNPATLLPLPEKEAPHDCLEILAETHGTRPDLTDQPIPDADYTWYTDGSSFLQEGQRRAGAAVTTETEVIWARALPAGTSAQRAELIALTQALKMAEGKKLNVYTDSRYAFATAHVHGEIYRRRGWLTSEGREIKNKNEILALLKALFLPKRLSIIHCPGHQKGNSAEARGNRMADQAAREAAMKAVLETSTLLAGKRTADGSEFEKRTADGSEFESPKKKAKVE

SEQ ID NO: 1027 - protein, 2096 aa, synthetic construct
MPAAKRVKLDGGDKKYSIGLDIGTNSVGWAVITDEYKVPSKKFKVLGNTDRHSIKKNLIGALLFDSGETAEATRLKRTARRRYTRRKNRICYLQEIFSNEMAKVDDSFFHRLEESFLVEEDKKHERHPIFGNIVDEVAYHEKYPTIYHLRKKLVDSTDKADLRLIYLALAHMIKFRGHFLIEGDLNPDNSDVDKLFIQLVQTYNQLFEENPINASGVDAKAILSARLSKSRRLENLIAQLPGEKKNGLFGNLIALSLGLTPNFKSNFDLAEDAKLQLSKDTYDDDLDNLLAQIGDQYADLFLAAKNLSDAILLSDILRVNTEITKAPLSASMIKRYDEHHQDLTLLKALVRQQLPEKYKEIFFDQSKNGYAGYIDGGASQEEFYKFIKPILEKMDGTEELLVKLNREDLLRKQRTFDNGSIPHQIHLGELHAILRRQEDFYPFLKDNREKIEKILTFRIPYYVGPLARGNSRFAWMTRKSEETITPWNFEEVVDKGASAQSFIERMTNFDKNLPNEKVLPKHSLLYEYFTVYNELTKVKYVTEGMRKPAFLSGEQKKAIVDLLFKTNRKVTVKQLKEDYFKKIECFDSVEISGVEDRFNASLGTYHDLLKIIKDKDFLDNEENEDILEDIVLTLTLFEDREMIEERLKTYAHLFDDKVMKQLKRRRYTGWGRLSRKLINGIRDKQSGKTILDFLKSDGFANRNFMQLIHDDSLTFKEDIQKAQVSGQGDSLHEHIANLAGSPAIKKGILQTVKVVDELVKVMGRHKPENIVIEMARENQTTQKGQKNSRERMKRIEEGIKELGSQILKEHPVENTQLQNEKLYLYYLQNGRDMYVDQELDINRLSDYDVDHIVPQSFLKDDSIDNKVLTRSDKARGKSDNVPSEEVVKKMKNYWRQLLNAKLITQRKFDNLTKAERGGLSELDKAGFIKRQLVETRQITKHVAQILDSRMNTKYDENDKLIREVKVITLKSKLVSDFRKDFQFYKVREINNYHHAHDAYLNAVVGTALIKKYPKLESEFVYGDYKVYDVRKMIAKSEQEIGKATAKYFFYSNIMNFFKTEITLANGEIRKRPLIETNGETGEIVWDKGRDFATVRKVLSMPQVNIVKKTEVQTGGFSKESILPKRNSDKLIARKKDWDPKKYGGFDSPTVAYSVLVVAKVEKGKSKKLKSVKELLGITIMERSSFEKNPIDFLEAKGYKEVKKDLIIKLPKYSLFELENGRKRMLASAGELQKGNELALPSKYVNFLYLASHYEKLKGSPEDNEQKQLFVEQHKHYLDEIIEQISEFSKRVILADANLDKVLSAYNKHRDKPIREQAENIIHLFTLTNLGAPAAFKYFDTTIDRKRYTSTKEVLDATLIHQSITGLYETRIDLSQLGGDGGGSSEAAAKPAPGGTLNIEDEYRLHETSKEPDVPLGSTWLSDFPQAWAETGGMGLAVRQAPLIIPLKATSTPVSIKQYPMSQEARLGIKPHIQRLLDQGILVPCQSPWNTPLLPVKKPGTNDYRPVQDLREVNKRVEDIHPTVPNPYNLLSGLPPSHQWYTVLDLKDAFFCLRLHPTSQPLFAFEWRDPEMGISGQLTWTRLPQGFKNSPTLFNEALHRDLADFRIQHPDLILLQYVDDLLLAATSEQDCQRGTRALLQTLGNLGYRASAKKAQICQKQVKYLGYLLKEGQRWLTEARKETVMGQPTPKTPRQLREFLGKAGFCRLFIPGFAEMAAPLYPLTKPGTLFNWGPDQQKAYQEIKQALLTAPALGLPDLTKPFELFVDEKQGYAKGVLTQKLGPWRRPVAYLSKKLDPVAAGWPPCLRMVAAIAVLTKDAGKLTMGQPLVILAPHAVEALVKQPPDRWLSNARMTHYQAMLLDTDRVQFGPVVALNPATLLPLPEKEAPHDCLEILAETHGTRPDLTDQPIPDADYTWYTDGSSFLQEGQRRAGAAVTTETEVIWARALPAGTSAQRAELIALTQALKMAEGKKLNVYTDSRYAFATAHVHGEIYRRRGWLTSEGREIKNKNEILALLKALFLPKRLSIIHCPGHQKGNSAEARGNRMADQAAREAAMKAVLETSTLLAGKRTADGSEFEKRTADGSEFESPKKKAKVE

SEQ ID NO: 1028 - protein, 2101 aa, synthetic construct
MPAAKRVKLDGGDKKYSIGLDIGTNSVGWAVITDEYKVPSKKFKVLGNTDRHSIKKNLIGALLFDSGETAEATRLKRTARRRYTRRKNRICYLQEIFSNEMAKVDDSFFHRLEESFLVEEDKKHERHPIFGNIVDEVAYHEKYPTIYHLRKKLVDSTDKADLRLIYLALAHMIKFRGHFLIEGDLNPDNSDVDKLFIQLVQTYNQLFEENPINASGVDAKAILSARLSKSRRLENLIAQLPGEKKNGLFGNLIALSLGLTPNFKSNFDLAEDAKLQLSKDTYDDDLDNLLAQIGDQYADLFLAAKNLSDAILLSDILRVNTEITKAPLSASMIKRYDEHHQDLTLLKALVRQQLPEKYKEIFFDQSKNGYAGYIDGGASQEEFYKFIKPILEKMDGTEELLVKLNREDLLRKQRTFDNGSIPHQIHLGELHAILRRQEDFYPFLKDNREKIEKILTFRIPYYVGPLARGNSRFAWMTRKSEETITPWNFEEVVDKGASAQSFIERMTNFDKNLPNEKVLPKHSLLYEYFTVYNELTKVKYVTEGMRKPAFLSGEQKKAIVDLLFKTNRKVTVKQLKEDYFKKIECFDSVEISGVEDRFNASLGTYHDLLKIIKDKDFLDNEENEDILEDIVLTLTLFEDREMIEERLKTYAHLFDDKVMKQLKRRRYTGWGRLSRKLINGIRDKQSGKTILDFLKSDGFANRNFMQLIHDDSLTFKEDIQKAQVSGQGDSLHEHIANLAGSPAIKKGILQTVKVVDELVKVMGRHKPENIVIEMARENQTTQKGQKNSRERMKRIEEGIKELGSQILKEHPVENTQLQNEKLYLYYLQNGRDMYVDQELDINRLSDYDVDHIVPQSFLKDDSIDNKVLTRSDKARGKSDNVPSEEVVKKMKNYWRQLLNAKLITQRKFDNLTKAERGGLSELDKAGFIKRQLVETRQITKHVAQILDSRMNTKYDENDKLIREVKVITLKSKLVSDFRKDFQFYKVREINNYHHAHDAYLNAVVGTALIKKYPKLESEFVYGDYKVYDVRKMIAKSEQEIGKATAKYFFYSNIMNFFKTEITLANGEIRKRPLIETNGETGEIVWDKGRDFATVRKVLSMPQVNIVKKTEVQTGGFSKESILPKRNSDKLIARKKDWDPKKYGGFDSPTVAYSVLVVAKVEKGKSKKLKSVKELLGITIMERSSFEKNPIDFLEAKGYKEVKKDLIIKLPKYSLFELENGRKRMLASAGELQKGNELALPSKYVNFLYLASHYEKLKGSPEDNEQKQLFVEQHKHYLDEIIEQISEFSKRVILADANLDKVLSAYNKHRDKPIREQAENIIHLFTLTNLGAPAAFKYFDTTIDRKRYTSTKEVLDATLIHQSITGLYETRIDLSQLGGDGGSGSETPGTSESATPESGGTLNIEDEYRLHETSKEPDVPLGSTWLSDFPQAWAETGGMGLAVRQAPLIIPLKATSTPVSIKQYPMSQEARLGIKPHIQRLLDQGILVPCQSPWNTPLLPVKKPGTNDYRPVQDLREVNKRVEDIHPTVPNPYNLLSGLPPSHQWYTVLDLKDAFFCLRLHPTSQPLFAFEWRDPEMGISGQLTWTRLPQGFKNSPTLFNEALHRDLADFRIQHPDLILLQYVDDLLLAATSEQDCQRGTRALLQTLGNLGYRASAKKAQICQKQVKYLGYLLKEGQRWLTEARKETVMGQPTPKTPRQLREFLGKAGFCRLFIPGFAEMAAPLYPLTKPGTLFNWGPDQQKAYQEIKQALLTAPALGLPDLTKPFELFVDEKQGYAKGVLTQKLGPWRRPVAYLSKKLDPVAAGWPPCLRMVAAIAVLTKDAGKLTMGQPLVILAPHAVEALVKQPPDRWLSNARMTHYQAMLLDTDRVQFGPVVALNPATLLPLPEKEAPHDCLEILAETHGTRPDLTDQPIPDADYTWYTDGSSFLQEGQRRAGAAVTTETEVIWARALPAGTSAQRAELIALTQALKMAEGKKLNVYTDSRYAFATAHVHGEIYRRRGWLTSEGREIKNKNEILALLKALFLPKRLSIIHCPGHQKGNSAEARGNRMADQAAREAAMKAVLETSTLLAGKRTADGSEFEKRTADGSEFESPKKKAKVE

SEQ ID NO: 1029 - protein, 2110 aa, synthetic construct
MPAAKRVKLDGGDKKYSIGLDIGTNSVGWAVITDEYKVPSKKFKVLGNTDRHSIKKNLIGALLFDSGETAEATRLKRTARRRYTRRKNRICYLQEIFSNEMAKVDDSFFHRLEESFLVEEDKKHERHPIFGNIVDEVAYHEKYPTIYHLRKKLVDSTDKADLRLIYLALAHMIKFRGHFLIEGDLNPDNSDVDKLFIQLVQTYNQLFEENPINASGVDAKAILSARLSKSRRLENLIAQLPGEKKNGLFGNLIALSLGLTPNFKSNFDLAEDAKLQLSKDTYDDDLDNLLAQIGDQYADLFLAAKNLSDAILLSDILRVNTEITKAPLSASMIKRYDEHHQDLTLLKALVRQQLPEKYKEIFFDQSKNGYAGYIDGGASQEEFYKFIKPILEKMDGTEELLVKLNREDLLRKQRTFDNGSIPHQIHLGELHAILRRQEDFYPFLKDNREKIEKILTFRIPYYVGPLARGNSRFAWMTRKSEETITPWNFEEVVDKGASAQSFIERMTNFDKNLPNEKVLPKHSLLYEYFTVYNELTKVKYVTEGMRKPAFLSGEQKKAIVDLLFKTNRKVTVKQLKEDYFKKIECFDSVEISGVEDRFNASLGTYHDLLKIIKDKDFLDNEENEDILEDIVLTLTLFEDREMIEERLKTYAHLFDDKVMKQLKRRRYTGWGRLSRKLINGIRDKQSGKTILDFLKSDGFANRNFMQLIHDDSLTFKEDIQKAQVSGQGDSLHEHIANLAGSPAIKKGILQTVKVVDELVKVMGRHKPENIVIEMARENQTTQKGQKNSRERMKRIEEGIKELGSQILKEHPVENTQLQNEKLYLYYLQNGRDMYVDQELDINRLSDYDVDHIVPQSFLKDDSIDNKVLTRSDKARGKSDNVPSEEVVKKMKNYWRQLLNAKLITQRKFDNLTKAERGGLSELDKAGFIKRQLVETRQITKHVAQILDSRMNTKYDENDKLIREVKVITLKSKLVSDFRKDFQFYKVREINNYHHAHDAYLNAVVGTALIKKYPKLESEFVYGDYKVYDVRKMIAKSEQEIGKATAKYFFYSNIMNFFKTEITLANGEIRKRPLIETNGETGEIVWDKGRDFATVRKVLSMPQVNIVKKTEVQTGGFSKESILPKRNSDKLIARKKDWDPKKYGGFDSPTVAYSVLVVAKVEKGKSKKLKSVKELLGITIMERSSFEKNPIDFLEAKGYKEVKKDLIIKLPKYSLFELENGRKRMLASAGELQKGNELALPSKYVNFLYLASHYEKLKGSPEDNEQKQLFVEQHKHYLDEIIEQISEFSKRVILADANLDKVLSAYNKHRDKPIREQAENIIHLFTLTNLGAPAAFKYFDTTIDRKRYTSTKEVLDATLIHQSITGLYETRIDLSQLGGDGGEAAAKEAAAKEAAAKEAAAKEAAAKGGTLNIEDEYRLHETSKEPDVPLGSTWLSDFPQAWAETGGMGLAVRQAPLIIPLKATSTPVSIKQYPMSQEARLGIKPHIQRLLDQGILVPCQSPWNTPLLPVKKPGTNDYRPVQDLREVNKRVEDIHPTVPNPYNLLSGLPPSHQWYTVLDLKDAFFCLRLHPTSQPLFAFEWRDPEMGISGQLTWTRLPQGFKNSPTLFNEALHRDLADFRIQHPDLILLQYVDDLLLAATSEQDCQRGTRALLQTLGNLGYRASAKKAQICQKQVKYLGYLLKEGQRWLTEARKETVMGQPTPKTPRQLREFLGKAGFCRLFIPGFAEMAAPLYPLTKPGTLFNWGPDQQKAYQEIKQALLTAPALGLPDLTKPFELFVDEKQGYAKGVLTQKLGPWRRPVAYLSKKLDPVAAGWPPCLRMVAAIAVLTKDAGKLTMGQPLVILAPHAVEALVKQPPDRWLSNARMTHYQAMLLDTDRVQFGPVVALNPATLLPLPEKEAPHDCLEILAETHGTRPDLTDQPIPDADYTWYTDGSSFLQEGQRRAGAAVTTETEVIWARALPAGTSAQRAELIALTQALKMAEGKKLNVYTDSRYAFATAHVHGEIYRRRGWLTSEGREIKNKNEILALLKALFLPKRLSIIHCPGHQKGNSAEARGNRMADQAAREAAMKAVLETSTLLAGKRTADGSEFEKRTADGSEFESPKKKAKVE

SEQ ID NO: 1030 - protein, 2091 aa, synthetic construct
MPAAKRVKLDGGDKKYSIGLDIGTNSVGWAVITDEYKVPSKKFKVLGNTDRHSIKKNLIGALLFDSGETAEATRLKRTARRRYTRRKNRICYLQEIFSNEMAKVDDSFFHRLEESFLVEEDKKHERHPIFGNIVDEVAYHEKYPTIYHLRKKLVDSTDKADLRLIYLALAHMIKFRGHFLIEGDLNPDNSDVDKLFIQLVQTYNQLFEENPINASGVDAKAILSARLSKSRRLENLIAQLPGEKKNGLFGNLIALSLGLTPNFKSNFDLAEDAKLQLSKDTYDDDLDNLLAQIGDQYADLFLAAKNLSDAILLSDILRVNTEITKAPLSASMIKRYDEHHQDLTLLKALVRQQLPEKYKEIFFDQSKNGYAGYIDGGASQEEFYKFIKPILEKMDGTEELLVKLNREDLLRKQRTFDNGSIPHQIHLGELHAILRRQEDFYPFLKDNREKIEKILTFRIPYYVGPLARGNSRFAWMTRKSEETITPWNFEEVVDKGASAQSFIERMTNFDKNLPNEKVLPKHSLLYEYFTVYNELTKVKYVTEGMRKPAFLSGEQKKAIVDLLFKTNRKVTVKQLKEDYFKKIECFDSVEISGVEDRFNASLGTYHDLLKIIKDKDFLDNEENEDILEDIVLTLTLFEDREMIEERLKTYAHLFDDKVMKQLKRRRYTGWGRLSRKLINGIRDKQSGKTILDFLKSDGFANRNFMQLIHDDSLTFKEDIQKAQVSGQGDSLHEHIANLAGSPAIKKGILQTVKVVDELVKVMGRHKPENIVIEMARENQTTQKGQKNSRERMKRIEEGIKELGSQILKEHPVENTQLQNEKLYLYYLQNGRDMYVDQELDINRLSDYDVDHIVPQSFLKDDSIDNKVLTRSDKARGKSDNVPSEEVVKKMKNYWRQLLNAKLITQRKFDNLTKAERGGLSELDKAGFIKRQLVETRQITKHVAQILDSRMNTKYDENDKLIREVKVITLKSKLVSDFRKDFQFYKVREINNYHHAHDAYLNAVVGTALIKKYPKLESEFVYGDYKVYDVRKMIAKSEQEIGKATAKYFFYSNIMNFFKTEITLANGEIRKRPLIETNGETGEIVWDKGRDFATVRKVLSMPQVNIVKKTEVQTGGFSKESILPKRNSDKLIARKKDWDPKKYGGFDSPTVAYSVLVVAKVEKGKSKKLKSVKELLGITIMERSSFEKNPIDFLEAKGYKEVKKDLIIKLPKYSLFELENGRKRMLASAGELQKGNELALPSKYVNFLYLASHYEKLKGSPEDNEQKQLFVEQHKHYLDEIIEQISEFSKRVILADANLDKVLSAYNKHRDKPIREQAENIIHLFTLTNLGAPAAFKYFDTTIDRKRYTSTKEVLDATLIHQSITGLYETRIDLSQLGGDGGPAPGGSGGTLNIEDEYRLHETSKEPDVPLGSTWLSDFPQAWAETGGMGLAVRQAPLIIPLKATSTPVSIKQYPMSQEARLGIKPHIQRLLDQGILVPCQSPWNTPLLPVKKPGTNDYRPVQDLREVNKRVEDIHPTVPNPYNLLSGLPPSHQWYTVLDLKDAFFCLRLHPTSQPLFAFEWRDPEMGISGQLTWTRLPQGFKNSPTLFNEALHRDLADFRIQHPDLILLQYVDDLLLAATSEQDCQRGTRALLQTLGNLGYRASAKKAQICQKQVKYLGYLLKEGQRWLTEARKETVMGQPTPKTPRQLREFLGKAGFCRLFIPGFAEMAAPLYPLTKPGTLFNWGPDQQKAYQEIKQALLTAPALGLPDLTKPFELFVDEKQGYAKGVLTQKLGPWRRPVAYLSKKLDPVAAGWPPCLRMVAAIAVLTKDAGKLTMGQPLVILAPHAVEALVKQPPDRWLSNARMTHYQAMLLDTDRVQFGPVVALNPATLLPLPEKEAPHDCLEILAETHGTRPDLTDQPIPDADYTWYTDGSSFLQEGQRRAGAAVTTETEVIWARALPAGTSAQRAELIALTQALKMAEGKKLNVYTDSRYAFATAHVHGEIYRRRGWLTSEGREIKNKNEILALLKALFLPKRLSIIHCPGHQKGNSAEARGNRMADQAAREAAMKAVLETSTLLAGKRTADGSEFEKRTADGSEFESPKKKAKVE

SEQ ID NO: 1031 - protein, 2091 aa, synthetic construct
MPAAKRVKLDGGDKKYSIGLDIGTNSVGWAVITDEYKVPSKKFKVLGNTDRHSIKKNLIGALLFDSGETAEATRLKRTARRRYTRRKNRICYLQEIFSNEMAKVDDSFFHRLEESFLVEEDKKHERHPIFGNIVDEVAYHEKYPTIYHLRKKLVDSTDKADLRLIYLALAHMIKFRGHFLIEGDLNPDNSDVDKLFIQLVQTYNQLFEENPINASGVDAKAILSARLSKSRRLENLIAQLPGEKKNGLFGNLIALSLGLTPNFKSNFDLAEDAKLQLSKDTYDDDLDNLLAQIGDQYADLFLAAKNLSDAILLSDILRVNTEITKAPLSASMIKRYDEHHQDLTLLKALVRQQLPEKYKEIFFDQSKNGYAGYIDGGASQEEFYKFIKPILEKMDGTEELLVKLNREDLLRKQRTFDNGSIPHQIHLGELHAILRRQEDFYPFLKDNREKIEKILTFRIPYYVGPLARGNSRFAWMTRKSEETITPWNFEEVVDKGASAQSFIERMTNFDKNLPNEKVLPKHSLLYEYFTVYNELTKVKYVTEGMRKPAFLSGEQKKAIVDLLFKTNRKVTVKQLKEDYFKKIECFDSVEISGVEDRFNASLGTYHDLLKIIKDKDFLDNEENEDILEDIVLTLTLFEDREMIEERLKTYAHLFDDKVMKQLKRRRYTGWGRLSRKLINGIRDKQSGKTILDFLKSDGFANRNFMQLIHDDSLTFKEDIQKAQVSGQGDSLHEHIANLAGSPAIKKGILQTVKVVDELVKVMGRHKPENIVIEMARENQTTQKGQKNSRERMKRIEEGIKELGSQILKEHPVENTQLQNEKLYLYYLQNGRDMYVDQELDINRLSDYDVDHIVPQSFLKDDSIDNKVLTRSDKARGKSDNVPSEEVVKKMKNYWRQLLNAKLITQRKFDNLTKAERGGLSELDKAGFIKRQLVETRQITKHVAQILDSRMNTKYDENDKLIREVKVITLKSKLVSDFRKDFQFYKVREINNYHHAHDAYLNAVVGTALIKKYPKLESEFVYGDYKVYDVRKMIAKSEQEIGKATAKYFFYSNIMNFFKTEITLANGEIRKRPLIETNGETGEIVWDKGRDFATVRKVLSMPQVNIVKKTEVQTGGFSKESILPKRNSDKLIARKKDWDPKKYGGFDSPTVAYSVLVVAKVEKGKSKKLKSVKELLGITIMERSSFEKNPIDFLEAKGYKEVKKDLIIKLPKYSLFELENGRKRMLASAGELQKGNELALPSKYVNFLYLASHYEKLKGSPEDNEQKQLFVEQHKHYLDEIIEQISEFSKRVILADANLDKVLSAYNKHRDKPIREQAENIIHLFTLTNLGAPAAFKYFDTTIDRKRYTSTKEVLDATLIHQSITGLYETRIDLSQLGGDGGGGGGSSGGTLNIEDEYRLHETSKEPDVPLGSTWLSDFPQAWAETGGMGLAVRQAPLIIPLKATSTPVSIKQYPMSQEARLGIKPHIQRLLDQGILVPCQSPWNTPLLPVKKPGTNDYRPVQDLREVNKRVEDIHPTVPNPYNLLSGLPPSHQWYTVLDLKDAFFCLRLHPTSQPLFAFEWRDPEMGISGQLTWTRLPQGFKNSPTLFNEALHRDLADFRIQHPDLILLQYVDDLLLAATSEQDCQRGTRALLQTLGNLGYRASAKKAQICQKQVKYLGYLLKEGQRWLTEARKETVMGQPTPKTPRQLREFLGKAGFCRLFIPGFAEMAAPLYPLTKPGTLFNWGPDQQKAYQEIKQALLTAPALGLPDLTKPFELFVDEKQGYAKGVLTQKLGPWRRPVAYLSKKLDPVAAGWPPCLRMVAAIAVLTKDAGKLTMGQPLVILAPHAVEALVKQPPDRWLSNARMTHYQAMLLDTDRVQFGPVVALNPATLLPLPEKEAPHDCLEILAETHGTRPDLTDQPIPDADYTWYTDGSSFLQEGQRRAGAAVTTETEVIWARALPAGTSAQRAELIALTQALKMAEGKKLNVYTDSRYAFATAHVHGEIYRRRGWLTSEGREIKNKNEILALLKALFLPKRLSIIHCPGHQKGNSAEARGNRMADQAAREAAMKAVLETSTLLAGKRTADGSEFEKRTADGSEFESPKKKAKVE

SEQ ID NO: 1032 - protein, 2094 aa, synthetic construct
MPAAKRVKLDGGDKKYSIGLDIGTNSVGWAVITDEYKVPSKKFKVLGNTDRHSIKKNLIGALLFDSGETAEATRLKRTARRRYTRRKNRICYLQEIFSNEMAKVDDSFFHRLEESFLVEEDKKHERHPIFGNIVDEVAYHEKYPTIYHLRKKLVDSTDKADLRLIYLALAHMIKFRGHFLIEGDLNPDNSDVDKLFIQLVQTYNQLFEENPINASGVDAKAILSARLSKSRRLENLIAQLPGEKKNGLFGNLIALSLGLTPNFKSNFDLAEDAKLQLSKDTYDDDLDNLLAQIGDQYADLFLAAKNLSDAILLSDILRVNTEITKAPLSASMIKRYDEHHQDLTLLKALVRQQLPEKYKEIFFDQSKNGYAGYIDGGASQEEFYKFIKPILEKMDGTEELLVKLNREDLLRKQRTFDNGSIPHQIHLGELHAILRRQEDFYPFLKDNREKIEKILTFRIPYYVGPLARGNSRFAWMTRKSEETITPWNFEEVVDKGASAQSFIERMTNFDKNLPNEKVLPKHSLLYEYFTVYNELTKVKYVTEGMRKPAFLSGEQKKAIVDLLFKTNRKVTVKQLKEDYFKKIECFDSVEISGVEDRFNASLGTYHDLLKIIKDKDFLDNEENEDILEDIVLTLTLFEDREMIEERLKTYAHLFDDKVMKQLKRRRYTGWGRLSRKLINGIRDKQSGKTILDFLKSDGFANRNFMQLIHDDSLTFKEDIQKAQVSGQGDSLHEHIANLAGSPAIKKGILQTVKVVDELVKVMGRHKPENIVIEMARENQTTQKGQKNSRERMKRIEEGIKELGSQILKEHPVENTQLQNEKLYLYYLQNGRDMYVDQELDINRLSDYDVDHIVPQSFLKDDSIDNKVLTRSDKARGKSDNVPSEEVVKKMKNYWRQLLNAKLITQRKFDNLTKAERGGLSELDKAGFIKRQLVETRQITKHVAQILDSRMNTKYDENDKLIREVKVITLKSKLVSDFRKDFQFYKVREINNYHHAHDAYLNAVVGTALIKKYPKLESEFVYGDYKVYDVRKMIAKSEQEIGKATAKYFFYSNIMNFFKTEITLANGEIRKRPLIETNGETGEIVWDKGRDFATVRKVLSMPQVNIVKKTEVQTGGFSKESILPKRNSDKLIARKKDWDPKKYGGFDSPTVAYSVLVVAKVEKGKSKKLKSVKELLGITIMERSSFEKNPIDFLEAKGYKEVKKDLIIKLPKYSLFELENGRKRMLASAGELQKGNELALPSKYVNFLYLASHYEKLKGSPEDNEQKQLFVEQHKHYLDEIIEQISEFSKRVILADANLDKVLSAYNKHRDKPIREQAENIIHLFTLTNLGAPAAFKYFDTTIDRKRYTSTKEVLDATLIHQSITGLYETRIDLSQLGGDGGPAPAPAPAPGGTLNIEDEYRLHETSKEPDVPLGSTWLSDFPQAWAETGGMGLAVRQAPLIIPLKATSTPVSIKQYPMSQEARLGIKPHIQRLLDQGILVPCQSPWNTPLLPVKKPGTNDYRPVQDLREVNKRVEDIHPTVPNPYNLLSGLPPSHQWYTVLDLKDAFFCLRLHPTSQPLFAFEWRDPEMGISGQLTWTRLPQGFKNSPTLFNEALHRDLADFRIQHPDLILLQYVDDLLLAATSEQDCQRGTRALLQTLGNLGYRASAKKAQICQKQVKYLGYLLKEGQRWLTEARKETVMGQPTPKTPRQLREFLGKAGFCRLFIPGFAEMAAPLYPLTKPGTLFNWGPDQQKAYQEIKQALLTAPALGLPDLTKPFELFVDEKQGYAKGVLTQKLGPWRRPVAYLSKKLDPVAAGWPPCLRMVAAIAVLTKDAGKLTMGQPLVILAPHAVEALVKQPPDRWLSNARMTHYQAMLLDTDRVQFGPVVALNPATLLPLPEKEAPHDCLEILAETHGTRPDLTDQPIPDADYTWYTDGSSFLQEGQRRAGAAVTTETEVIWARALPAGTSAQRAELIALTQALKMAEGKKLNVYTDSRYAFATAHVHGEIYRRRGWLTSEGREIKNKNEILALLKALFLPKRLSIIHCPGHQKGNSAEARGNRMADQAAREAAMKAVLETSTLLAGKRTADGSEFEKRTADGSEFESPKKKAKVE

SEQ ID NO: 1033 - protein, 2094 aa, synthetic construct
MPAAKRVKLDGGDKKYSIGLDIGTNSVGWAVITDEYKVPSKKFKVLGNTDRHSIKKNLIGALLFDSGETAEATRLKRTARRRYTRRKNRICYLQEIFSNEMAKVDDSFFHRLEESFLVEEDKKHERHPIFGNIVDEVAYHEKYPTIYHLRKKLVDSTDKADLRLIYLALAHMIKFRGHFLIEGDLNPDNSDVDKLFIQLVQTYNQLFEENPINASGVDAKAILSARLSKSRRLENLIAQLPGEKKNGLFGNLIALSLGLTPNFKSNFDLAEDAKLQLSKDTYDDDLDNLLAQIGDQYADLFLAAKNLSDAILLSDILRVNTEITKAPLSASMIKRYDEHHQDLTLLKALVRQQLPEKYKEIFFDQSKNGYAGYIDGGASQEEFYKFIKPILEKMDGTEELLVKLNREDLLRKQRTFDNGSIPHQIHLGELHAILRRQEDFYPFLKDNREKIEKILTFRIPYYVGPLARGNSRFAWMTRKSEETITPWNFEEVVDKGASAQSFIERMTNFDKNLPNEKVLPKHSLLYEYFTVYNELTKVKYVTEGMRKPAFLSGEQKKAIVDLLFKTNRKVTVKQLKEDYFKKIECFDSVEISGVEDRFNASLGTYHDLLKIIKDKDFLDNEENEDILEDIVLTLTLFEDREMIEERLKTYAHLFDDKVMKQLKRRRYTGWGRLSRKLINGIRDKQSGKTILDFLKSDGFANRNFMQLIHDDSLTFKEDIQKAQVSGQGDSLHEHIANLAGSPAIKKGILQTVKVVDELVKVMGRHKPENIVIEMARENQTTQKGQKNSRERMKRIEEGIKELGSQILKEHPVENTQLQNEKLYLYYLQNGRDMYVDQELDINRLSDYDVDHIVPQSFLKDDSIDNKVLTRSDKARGKSDNVPSEEVVKKMKNYWRQLLNAKLITQRKFDNLTKAERGGLSELDKAGFIKRQLVETRQITKHVAQILDSRMNTKYDENDKLIREVKVITLKSKLVSDFRKDFQFYKVREINNYHHAHDAYLNAVVGTALIKKYPKLESEFVYGDYKVYDVRKMIAKSEQEIGKATAKYFFYSNIMNFFKTEITLANGEIRKRPLIETNGETGEIVWDKGRDFATVRKVLSMPQVNIVKKTEVQTGGFSKESILPKRNSDKLIARKKDWDPKKYGGFDSPTVAYSVLVVAKVEKGKSKKLKSVKELLGITIMERSSFEKNPIDFLEAKGYKEVKKDLIIKLPKYSLFELENGRKRMLASAGELQKGNELALPSKYVNFLYLASHYEKLKGSPEDNEQKQLFVEQHKHYLDEIIEQISEFSKRVILADANLDKVLSAYNKHRDKPIREQAENIIHLFTLTNLGAPAAFKYFDTTIDRKRYTSTKEVLDATLIHQSITGLYETRIDLSQLGGDGGPAPGSSGGGGGTLNIEDEYRLHETSKEPDVPLGSTWLSDFPQAWAETGGMGLAVRQAPLIIPLKATSTPVSIKQYPMSQEARLGIKPHIQRLLDQGILVPCQSPWNTPLLPVKKPGTNDYRPVQDLREVNKRVEDIHPTVPNPYNLLSGLPPSHQWYTVLDLKDAFFCLRLHPTSQPLFAFEWRDPEMGISGQLTWTRLPQGFKNSPTLFNEALHRDLADFRIQHPDLILLQYVDDLLLAATSEQDCQRGTRALLQTLGNLGYRASAKKAQICQKQVKYLGYLLKEGQRWLTEARKETVMGQPTPKTPRQLREFLGKAGFCRLFIPGFAEMAAPLYPLTKPGTLFNWGPDQQKAYQEIKQALLTAPALGLPDLTKPFELFVDEKQGYAKGVLTQKLGPWRRPVAYLSKKLDPVAAGWPPCLRMVAAIAVLTKDAGKLTMGQPLVILAPHAVEALVKQPPDRWLSNARMTHYQAMLLDTDRVQFGPVVALNPATLLPLPEKEAPHDCLEILAETHGTRPDLTDQPIPDADYTWYTDGSSFLQEGQRRAGAAVTTETEVIWARALPAGTSAQRAELIALTQALKMAEGKKLNVYTDSRYAFATAHVHGEIYRRRGWLTSEGREIKNKNEILALLKALFLPKRLSIIHCPGHQKGNSAEARGNRMADQAAREAAMKAVLETSTLLAGKRTADGSEFEKRTADGSEFESPKKKAKVE

SEQ ID NO: 1034 - protein, 2096 aa, synthetic construct
MPAAKRVKLDGGDKKYSIGLDIGTNSVGWAVITDEYKVPSKKFKVLGNTDRHSIKKNLIGALLFDSGETAEATRLKRTARRRYTRRKNRICYLQEIFSNEMAKVDDSFFHRLEESFLVEEDKKHERHPIFGNIVDEVAYHEKYPTIYHLRKKLVDSTDKADLRLIYLALAHMIKFRGHFLIEGDLNPDNSDVDKLFIQLVQTYNQLFEENPINASGVDAKAILSARLSKSRRLENLIAQLPGEKKNGLFGNLIALSLGLTPNFKSNFDLAEDAKLQLSKDTYDDDLDNLLAQIGDQYADLFLAAKNLSDAILLSDILRVNTEITKAPLSASMIKRYDEHHQDLTLLKALVRQQLPEKYKEIFFDQSKNGYAGYIDGGASQEEFYKFIKPILEKMDGTEELLVKLNREDLLRKQRTFDNGSIPHQIHLGELHAILRRQEDFYPFLKDNREKIEKILTFRIPYYVGPLARGNSRFAWMTRKSEETITPWNFEEVVDKGASAQSFIERMTNFDKNLPNEKVLPKHSLLYEYFTVYNELTKVKYVTEGMRKPAFLSGEQKKAIVDLLFKTNRKVTVKQLKEDYFKKIECFDSVEISGVEDRFNASLGTYHDLLKIIKDKDFLDNEENEDILEDIVLTLTLFEDREMIEERLKTYAHLFDDKVMKQLKRRRYTGWGRLSRKLINGIRDKQSGKTILDFLKSDGFANRNFMQLIHDDSLTFKEDIQKAQVSGQGDSLHEHIANLAGSPAIKKGILQTVKVVDELVKVMGRHKPENIVIEMARENQTTQKGQKNSRERMKRIEEGIKELGSQILKEHPVENTQLQNEKLYLYYLQNGRDMYVDQELDINRLSDYDVDHIVPQSFLKDDSIDNKVLTRSDKARGKSDNVPSEEVVKKMKNYWRQLLNAKLITQRKFDNLTKAERGGLSELDKAGFIKRQLVETRQITKHVAQILDSRMNTKYDENDKLIREVKVITLKSKLVSDFRKDFQFYKVREINNYHHAHDAYLNAVVGTALIKKYPKLESEFVYGDYKVYDVRKMIAKSEQEIGKATAKYFFYSNIMNFFKTEITLANGEIRKRPLIETNGETGEIVWDKGRDFATVRKVLSMPQVNIVKKTEVQTGGFSKESILPKRNSDKLIARKKDWDPKKYGGFDSPTVAYSVLVVAKVEKGKSKKLKSVKELLGITIMERSSFEKNPIDFLEAKGYKEVKKDLIIKLPKYSLFELENGRKRMLASAGELQKGNELALPSKYVNFLYLASHYEKLKGSPEDNEQKQLFVEQHKHYLDEIIEQISEFSKRVILADANLDKVLSAYNKHRDKPIREQAENIIHLFTLTNLGAPAAFKYFDTTIDRKRYTSTKEVLDATLIHQSITGLYETRIDLSQLGGDGGPAPGGSEAAAKGGTLNIEDEYRLHETSKEPDVPLGSTWLSDFPQAWAETGGMGLAVRQAPLIIPLKATSTPVSIKQYPMSQEARLGIKPHIQRLLDQGILVPCQSPWNTPLLPVKKPGTNDYRPVQDLREVNKRVEDIHPTVPNPYNLLSGLPPSHQWYTVLDLKDAFFCLRLHPTSQPLFAFEWRDPEMGISGQLTWTRLPQGFKNSPTLFNEALHRDLADFRIQHPDLILLQYVDDLLLAATSEQDCQRGTRALLQTLGNLGYRASAKKAQICQKQVKYLGYLLKEGQRWLTEARKETVMGQPTPKTPRQLREFLGKAGFCRLFIPGFAEMAAPLYPLTKPGTLFNWGPDQQKAYQEIKQALLTAPALGLPDLTKPFELFVDEKQGYAKGVLTQKLGPWRRPVAYLSKKLDPVAAGWPPCLRMVAAIAVLTKDAGKLTMGQPLVILAPHAVEALVKQPPDRWLSNARMTHYQAMLLDTDRVQFGPVVALNPATLLPLPEKEAPHDCLEILAETHGTRPDLTDQPIPDADYTWYTDGSSFLQEGQRRAGAAVTTETEVIWARALPAGTSAQRAELIALTQALKMAEGKKLNVYTDSRYAFATAHVHGEIYRRRGWLTSEGREIKNKNEILALLKALFLPKRLSIIHCPGHQKGNSAEARGNRMADQAAREAAMKAVLETSTLLAGKRTADGSEFEKRTADGSEFESPKKKAKVE

SEQ ID NO: 1035 - protein, 2096 aa, synthetic construct
MPAAKRVKLDGGDKKYSIGLDIGTNSVGWAVITDEYKVPSKKFKVLGNTDRHSIKKNLIGALLFDSGETAEATRLKRTARRRYTRRKNRICYLQEIFSNEMAKVDDSFFHRLEESFLVEEDKKHERHPIFGNIVDEVAYHEKYPTIYHLRKKLVDSTDKADLRLIYLALAHMIKFRGHFLIEGDLNPDNSDVDKLFIQLVQTYNQLFEENPINASGVDAKAILSARLSKSRRLENLIAQLPGEKKNGLFGNLIALSLGLTPNFKSNFDLAEDAKLQLSKDTYDDDLDNLLAQIGDQYADLFLAAKNLSDAILLSDILRVNTEITKAPLSASMIKRYDEHHQDLTLLKALVRQQLPEKYKEIFFDQSKNGYAGYIDGGASQEEFYKFIKPILEKMDGTEELLVKLNREDLLRKQRTFDNGSIPHQIHLGELHAILRRQEDFYPFLKDNREKIEKILTFRIPYYVGPLARGNSRFAWMTRKSEETITPWNFEEVVDKGASAQSFIERMTNFDKNLPNEKVLPKHSLLYEYFTVYNELTKVKYVTEGMRKPAFLSGEQKKAIVDLLFKTNRKVTVKQLKEDYFKKIECFDSVEISGVEDRFNASLGTYHDLLKIIKDKDFLDNEENEDILEDIVLTLTLFEDREMIEERLKTYAHLFDDKVMKQLKRRRYTGWGRLSRKLINGIRDKQSGKTILDFLKSDGFANRNFMQLIHDDSLTFKEDIQKAQVSGQGDSLHEHIANLAGSPAIKKGILQTVKVVDELVKVMGRHKPENIVIEMARENQTTQKGQKNSRERMKRIEEGIKELGSQILKEHPVENTQLQNEKLYLYYLQNGRDMYVDQELDINRLSDYDVDHIVPQSFLKDDSIDNKVLTRSDKARGKSDNVPSEEVVKKMKNYWRQLLNAKLITQRKFDNLTKAERGGLSELDKAGFIKRQLVETRQITKHVAQILDSRMNTKYDENDKLIREVKVITLKSKLVSDFRKDFQFYKVREINNYHHAHDAYLNAVVGTALIKKYPKLESEFVYGDYKVYDVRKMIAKSEQEIGKATAKYFFYSNIMNFFKTEITLANGEIRKRPLIETNGETGEIVWDKGRDFATVRKVLSMPQVNIVKKTEVQTGGFSKESILPKRNSDKLIARKKDWDPKKYGGFDSPTVAYSVLVVAKVEKGKSKKLKSVKELLGITIMERSSFEKNPIDFLEAKGYKEVKKDLIIKLPKYSLFELENGRKRMLASAGELQKGNELALPSKYVNFLYLASHYEKLKGSPEDNEQKQLFVEQHKHYLDEIIEQISEFSKRVILADANLDKVLSAYNKHRDKPIREQAENIIHLFTLTNLGAPAAFKYFDTTIDRKRYTSTKEVLDATLIHQSITGLYETRIDLSQLGGDGGGGSEAAAKPAPGGTLNIEDEYRLHETSKEPDVPLGSTWLSDFPQAWAETGGMGLAVRQAPLIIPLKATSTPVSIKQYPMSQEARLGIKPHIQRLLDQGILVPCQSPWNTPLLPVKKPGTNDYRPVQDLREVNKRVEDIHPTVPNPYNLLSGLPPSHQWYTVLDLKDAFFCLRLHPTSQPLFAFEWRDPEMGISGQLTWTRLPQGFKNSPTLFNEALHRDLADFRIQHPDLILLQYVDDLLLAATSEQDCQRGTRALLQTLGNLGYRASAKKAQICQKQVKYLGYLLKEGQRWLTEARKETVMGQPTPKTPRQLREFLGKAGFCRLFIPGFAEMAAPLYPLTKPGTLFNWGPDQQKAYQEIKQALLTAPALGLPDLTKPFELFVDEKQGYAKGVLTQKLGPWRRPVAYLSKKLDPVAAGWPPCLRMVAAIAVLTKDAGKLTMGQPLVILAPHAVEALVKQPPDRWLSNARMTHYQAMLLDTDRVQFGPVVALNPATLLPLPEKEAPHDCLEILAETHGTRPDLTDQPIPDADYTWYTDGSSFLQEGQRRAGAAVTTETEVIWARALPAGTSAQRAELIALTQALKMAEGKKLNVYTDSRYAFATAHVHGEIYRRRGWLTSEGREIKNKNEILALLKALFLPKRLSIIHCPGHQKGNSAEARGNRMADQAAREAAMKAVLETSTLLAGKRTADGSEFEKRTADGSEFESPKKKAKVE

SEQ ID NO: 1036 - protein, 2118 aa, synthetic construct
MPAAKRVKLDGGDKKYSIGLDIGTNSVGWAVITDEYKVPSKKFKVLGNTDRHSIKKNLIGALLFDSGETAEATRLKRTARRRYTRRKNRICYLQEIFSNEMAKVDDSFFHRLEESFLVEEDKKHERHPIFGNIVDEVAYHEKYPTIYHLRKKLVDSTDKADLRLIYLALAHMIKFRGHFLIEGDLNPDNSDVDKLFIQLVQTYNQLFEENPINASGVDAKAILSARLSKSRRLENLIAQLPGEKKNGLFGNLIALSLGLTPNFKSNFDLAEDAKLQLSKDTYDDDLDNLLAQIGDQYADLFLAAKNLSDAILLSDILRVNTEITKAPLSASMIKRYDEHHQDLTLLKALVRQQLPEKYKEIFFDQSKNGYAGYIDGGASQEEFYKFIKPILEKMDGTEELLVKLNREDLLRKQRTFDNGSIPHQIHLGELHAILRRQEDFYPFLKDNREKIEKILTFRIPYYVGPLARGNSRFAWMTRKSEETITPWNFEEVVDKGASAQSFIERMTNFDKNLPNEKVLPKHSLLYEYFTVYNELTKVKYVTEGMRKPAFLSGEQKKAIVDLLFKTNRKVTVKQLKEDYFKKIECFDSVEISGVEDRFNASLGTYHDLLKIIKDKDFLDNEENEDILEDIVLTLTLFEDREMIEERLKTYAHLFDDKVMKQLKRRRYTGWGRLSRKLINGIRDKQSGKTILDFLKSDGFANRNFMQLIHDDSLTFKEDIQKAQVSGQGDSLHEHIANLAGSPAIKKGILQTVKVVDELVKVMGRHKPENIVIEMARENQTTQKGQKNSRERMKRIEEGIKELGSQILKEHPVENTQLQNEKLYLYYLQNGRDMYVDQELDINRLSDYDVDHIVPQSFLKDDSIDNKVLTRSDKARGKSDNVPSEEVVKKMKNYWRQLLNAKLITQRKFDNLTKAERGGLSELDKAGFIKRQLVETRQITKHVAQILDSRMNTKYDENDKLIREVKVITLKSKLVSDFRKDFQFYKVREINNYHHAHDAYLNAVVGTALIKKYPKLESEFVYGDYKVYDVRKMIAKSEQEIGKATAKYFFYSNIMNFFKTEITLANGEIRKRPLIETNGETGEIVWDKGRDFATVRKVLSMPQVNIVKKTEVQTGGFSKESILPKRNSDKLIARKKDWDPKKYGGFDSPTVAYSVLVVAKVEKGKSKKLKSVKELLGITIMERSSFEKNPIDFLEAKGYKEVKKDLIIKLPKYSLFELENGRKRMLASAGELQKGNELALPSKYVNFLYLASHYEKLKGSPEDNEQKQLFVEQHKHYLDEIIEQISEFSKRVILADANLDKVLSAYNKHRDKPIREQAENIIHLFTLTNLGAPAAFKYFDTTIDRKRYTSTKEVLDATLIHQSITGLYETRIDLSQLGGDGGSGGSSGGSSGSETPGTSESATPESSGGSSGGSSGGTLNIEDEYRLHETSKEPDVPLGSTWLSDFPQAWAETGGMGLAVRQAPLIIPLKATSTPVSIKQYPMSQEARLGIKPHIQRLLDQGILVPCQSPWNTPLLPVKKPGTNDYRPVQDLREVNKRVEDIHPTVPNPYNLLSGLPPSHQWYTVLDLKDAFFCLRLHPTSQPLFAFEWRDPEMGISGQLTWTRLPQGFKNSPTLFNEALHRDLADFRIQHPDLILLQYVDDLLLAATSEQDCQRGTRALLQTLGNLGYRASAKKAQICQKQVKYLGYLLKEGQRWLTEARKETVMGQPTPKTPRQLREFLGKAGFCRLFIPGFAEMAAPLYPLTKPGTLFNWGPDQQKAYQEIKQALLTAPALGLPDLTKPFELFVDEKQGYAKGVLTQKLGPWRRPVAYLSKKLDPVAAGWPPCLRMVAAIAVLTKDAGKLTMGQPLVILAPHAVEALVKQPPDRWLSNARMTHYQAMLLDTDRVQFGPVVALNPATLLPLPEKEAPHDCLEILAETHGTRPDLTDQPIPDADYTWYTDGSSFLQEGQRRAGAAVTTETEVIWARALPAGTSAQRAELIALTQALKMAEGKKLNVYTDSRYAFATAHVHGEIYRRRGWLTSEGREIKNKNEILALLKALFLPKRLSIIHCPGHQKGNSAEARGNRMADQAAREAAMKAVLETSTLLAGKRTADGSEFEKRTADGSEFESPKKKAKVE

SEQ ID NO: 1037 - protein, 2100 aa, synthetic construct
MPAAKRVKLDGGDKKYSIGLDIGTNSVGWAVITDEYKVPSKKFKVLGNTDRHSIKKNLIGALLFDSGETAEATRLKRTARRRYTRRKNRICYLQEIFSNEMAKVDDSFFHRLEESFLVEEDKKHERHPIFGNIVDEVAYHEKYPTIYHLRKKLVDSTDKADLRLIYLALAHMIKFRGHFLIEGDLNPDNSDVDKLFIQLVQTYNQLFEENPINASGVDAKAILSARLSKSRRLENLIAQLPGEKKNGLFGNLIALSLGLTPNFKSNFDLAEDAKLQLSKDTYDDDLDNLLAQIGDQYADLFLAAKNLSDAILLSDILRVNTEITKAPLSASMIKRYDEHHQDLTLLKALVRQQLPEKYKEIFFDQSKNGYAGYIDGGASQEEFYKFIKPILEKMDGTEELLVKLNREDLLRKQRTFDNGSIPHQIHLGELHAILRRQEDFYPFLKDNREKIEKILTFRIPYYVGPLARGNSRFAWMTRKSEETITPWNFEEVVDKGASAQSFIERMTNFDKNLPNEKVLPKHSLLYEYFTVYNELTKVKYVTEGMRKPAFLSGEQKKAIVDLLFKTNRKVTVKQLKEDYFKKIECFDSVEISGVEDRFNASLGTYHDLLKIIKDKDFLDNEENEDILEDIVLTLTLFEDREMIEERLKTYAHLFDDKVMKQLKRRRYTGWGRLSRKLINGIRDKQSGKTILDFLKSDGFANRNFMQLIHDDSLTFKEDIQKAQVSGQGDSLHEHIANLAGSPAIKKGILQTVKVVDELVKVMGRHKPENIVIEMARENQTTQKGQKNSRERMKRIEEGIKELGSQILKEHPVENTQLQNEKLYLYYLQNGRDMYVDQELDINRLSDYDVDHIVPQSFLKDDSIDNKVLTRSDKARGKSDNVPSEEVVKKMKNYWRQLLNAKLITQRKFDNLTKAERGGLSELDKAGFIKRQLVETRQITKHVAQILDSRMNTKYDENDKLIREVKVITLKSKLVSDFRKDFQFYKVREINNYHHAHDAYLNAVVGTALIKKYPKLESEFVYGDYKVYDVRKMIAKSEQEIGKATAKYFFYSNIMNFFKTEITLANGEIRKRPLIETNGETGEIVWDKGRDFATVRKVLSMPQVNIVKKTEVQTGGFSKESILPKRNSDKLIARKKDWDPKKYGGFDSPTVAYSVLVVAKVEKGKSKKLKSVKELLGITIMERSSFEKNPIDFLEAKGYKEVKKDLIIKLPKYSLFELENGRKRMLASAGELQKGNELALPSKYVNFLYLASHYEKLKGSPEDNEQKQLFVEQHKHYLDEIIEQISEFSKRVILADANLDKVLSAYNKHRDKPIREQAENIIHLFTLTNLGAPAAFKYFDTTIDRKRYTSTKEVLDATLIHQSITGLYETRIDLSQLGGDGGEAAAKGGGGSEAAAKGGTLNIEDEYRLHETSKEPDVPLGSTWLSDFPQAWAETGGMGLAVRQAPLIIPLKATSTPVSIKQYPMSQEARLGIKPHIQRLLDQGILVPCQSPWNTPLLPVKKPGTNDYRPVQDLREVNKRVEDIHPTVPNPYNLLSGLPPSHQWYTVLDLKDAFFCLRLHPTSQPLFAFEWRDPEMGISGQLTWTRLPQGFKNSPTLFNEALHRDLADFRIQHPDLILLQYVDDLLLAATSEQDCQRGTRALLQTLGNLGYRASAKKAQICQKQVKYLGYLLKEGQRWLTEARKETVMGQPTPKTPRQLREFLGKAGFCRLFIPGFAEMAAPLYPLTKPGTLFNWGPDQQKAYQEIKQALLTAPALGLPDLTKPFELFVDEKQGYAKGVLTQKLGPWRRPVAYLSKKLDPVAAGWPPCLRMVAAIAVLTKDAGKLTMGQPLVILAPHAVEALVKQPPDRWLSNARMTHYQAMLLDTDRVQFGPVVALNPATLLPLPEKEAPHDCLEILAETHGTRPDLTDQPIPDADYTWYTDGSSFLQEGQRRAGAAVTTETEVIWARALPAGTSAQRAELIALTQALKMAEGKKLNVYTDSRYAFATAHVHGEIYRRRGWLTSEGREIKNKNEILALLKALFLPKRLSIIHCPGHQKGNSAEARGNRMADQAAREAAMKAVLETSTLLAGKRTADGSEFEKRTADGSEFESPKKKAKVE

SEQ ID NO: 1038 - protein, 2094 aa, synthetic construct
MPAAKRVKLDGGDKKYSIGLDIGTNSVGWAVITDEYKVPSKKFKVLGNTDRHSIKKNLIGALLFDSGETAEATRLKRTARRRYTRRKNRICYLQEIFSNEMAKVDDSFFHRLEESFLVEEDKKHERHPIFGNIVDEVAYHEKYPTIYHLRKKLVDSTDKADLRLIYLALAHMIKFRGHFLIEGDLNPDNSDVDKLFIQLVQTYNQLFEENPINASGVDAKAILSARLSKSRRLENLIAQLPGEKKNGLFGNLIALSLGLTPNFKSNFDLAEDAKLQLSKDTYDDDLDNLLAQIGDQYADLFLAAKNLSDAILLSDILRVNTEITKAPLSASMIKRYDEHHQDLTLLKALVRQQLPEKYKEIFFDQSKNGYAGYIDGGASQEEFYKFIKPILEKMDGTEELLVKLNREDLLRKQRTFDNGSIPHQIHLGELHAILRRQEDFYPFLKDNREKIEKILTFRIPYYVGPLARGNSRFAWMTRKSEETITPWNFEEVVDKGASAQSFIERMTNFDKNLPNEKVLPKHSLLYEYFTVYNELTKVKYVTEGMRKPAFLSGEQKKAIVDLLFKTNRKVTVKQLKEDYFKKIECFDSVEISGVEDRFNASLGTYHDLLKIIKDKDFLDNEENEDILEDIVLTLTLFEDREMIEERLKTYAHLFDDKVMKQLKRRRYTGWGRLSRKLINGIRDKQSGKTILDFLKSDGFANRNFMQLIHDDSLTFKEDIQKAQVSGQGDSLHEHIANLAGSPAIKKGILQTVKVVDELVKVMGRHKPENIVIEMARENQTTQKGQKNSRERMKRIEEGIKELGSQILKEHPVENTQLQNEKLYLYYLQNGRDMYVDQELDINRLSDYDVDHIVPQSFLKDDSIDNKVLTRSDKARGKSDNVPSEEVVKKMKNYWRQLLNAKLITQRKFDNLTKAERGGLSELDKAGFIKRQLVETRQITKHVAQILDSRMNTKYDENDKLIREVKVITLKSKLVSDFRKDFQFYKVREINNYHHAHDAYLNAVVGTALIKKYPKLESEFVYGDYKVYDVRKMIAKSEQEIGKATAKYFFYSNIMNFFKTEITLANGEIRKRPLIETNGETGEIVWDKGRDFATVRKVLSMPQVNIVKKTEVQTGGFSKESILPKRNSDKLIARKKDWDPKKYGGFDSPTVAYSVLVVAKVEKGKSKKLKSVKELLGITIMERSSFEKNPIDFLEAKGYKEVKKDLIIKLPKYSLFELENGRKRMLASAGELQKGNELALPSKYVNFLYLASHYEKLKGSPEDNEQKQLFVEQHKHYLDEIIEQISEFSKRVILADANLDKVLSAYNKHRDKPIREQAENIIHLFTLTNLGAPAAFKYFDTTIDRKRYTSTKEVLDATLIHQSITGLYETRIDLSQLGGDGGGSSPAPGGGGGTLNIEDEYRLHETSKEPDVPLGSTWLSDFPQAWAETGGMGLAVRQAPLIIPLKATSTPVSIKQYPMSQEARLGIKPHIQRLLDQGILVPCQSPWNTPLLPVKKPGTNDYRPVQDLREVNKRVEDIHPTVPNPYNLLSGLPPSHQWYTVLDLKDAFFCLRLHPTSQPLFAFEWRDPEMGISGQLTWTRLPQGFKNSPTLFNEALHRDLADFRIQHPDLILLQYVDDLLLAATSEQDCQRGTRALLQTLGNLGYRASAKKAQICQKQVKYLGYLLKEGQRWLTEARKETVMGQPTPKTPRQLREFLGKAGFCRLFIPGFAEMAAPLYPLTKPGTLFNWGPDQQKAYQEIKQALLTAPALGLPDLTKPFELFVDEKQGYAKGVLTQKLGPWRRPVAYLSKKLDPVAAGWPPCLRMVAAIAVLTKDAGKLTMGQPLVILAPHAVEALVKQPPDRWLSNARMTHYQAMLLDTDRVQFGPVVALNPATLLPLPEKEAPHDCLEILAETHGTRPDLTDQPIPDADYTWYTDGSSFLQEGQRRAGAAVTTETEVIWARALPAGTSAQRAELIALTQALKMAEGKKLNVYTDSRYAFATAHVHGEIYRRRGWLTSEGREIKNKNEILALLKALFLPKRLSIIHCPGHQKGNSAEARGNRMADQAAREAAMKAVLETSTLLAGKRTADGSEFEKRTADGSEFESPKKKAKVE

SEQ ID NO: 1039 - protein, 2096 aa, synthetic construct
MPAAKRVKLDGGDKKYSIGLDIGTNSVGWAVITDEYKVPSKKFKVLGNTDRHSIKKNLIGALLFDSGETAEATRLKRTARRRYTRRKNRICYLQEIFSNEMAKVDDSFFHRLEESFLVEEDKKHERHPIFGNIVDEVAYHEKYPTIYHLRKKLVDSTDKADLRLIYLALAHMIKFRGHFLIEGDLNPDNSDVDKLFIQLVQTYNQLFEENPINASGVDAKAILSARLSKSRRLENLIAQLPGEKKNGLFGNLIALSLGLTPNFKSNFDLAEDAKLQLSKDTYDDDLDNLLAQIGDQYADLFLAAKNLSDAILLSDILRVNTEITKAPLSASMIKRYDEHHQDLTLLKALVRQQLPEKYKEIFFDQSKNGYAGYIDGGASQEEFYKFIKPILEKMDGTEELLVKLNREDLLRKQRTFDNGSIPHQIHLGELHAILRRQEDFYPFLKDNREKIEKILTFRIPYYVGPLARGNSRFAWMTRKSEETITPWNFEEVVDKGASAQSFIERMTNFDKNLPNEKVLPKHSLLYEYFTVYNELTKVKYVTEGMRKPAFLSGEQKKAIVDLLFKTNRKVTVKQLKEDYFKKIECFDSVEISGVEDRFNASLGTYHDLLKIIKDKDFLDNEENEDILEDIVLTLTLFEDREMIEERLKTYAHLFDDKVMKQLKRRRYTGWGRLSRKLINGIRDKQSGKTILDFLKSDGFANRNFMQLIHDDSLTFKEDIQKAQVSGQGDSLHEHIANLAGSPAIKKGILQTVKVVDELVKVMGRHKPENIVIEMARENQTTQKGQKNSRERMKRIEEGIKELGSQILKEHPVENTQLQNEKLYLYYLQNGRDMYVDQELDINRLSDYDVDHIVPQSFLKDDSIDNKVLTRSDKARGKSDNVPSEEVVKKMKNYWRQLLNAKLITQRKFDNLTKAERGGLSELDKAGFIKRQLVETRQITKHVAQILDSRMNTKYDENDKLIREVKVITLKSKLVSDFRKDFQFYKVREINNYHHAHDAYLNAVVGTALIKKYPKLESEFVYGDYKVYDVRKMIAKSEQEIGKATAKYFFYSNIMNFFKTEITLANGEIRKRPLIETNGETGEIVWDKGRDFATVRKVLSMPQVNIVKKTEVQTGGFSKESILPKRNSDKLIARKKDWDPKKYGGFDSPTVAYSVLVVAKVEKGKSKKLKSVKELLGITIMERSSFEKNPIDFLEAKGYKEVKKDLIIKLPKYSLFELENGRKRMLASAGELQKGNELALPSKYVNFLYLASHYEKLKGSPEDNEQKQLFVEQHKHYLDEIIEQISEFSKRVILADANLDKVLSAYNKHRDKPIREQAENIIHLFTLTNLGAPAAFKYFDTTIDRKRYTSTKEVLDATLIHQSITGLYETRIDLSQLGGDGGEAAAKGSSPAPGGTLNIEDEYRLHETSKEPDVPLGSTWLSDFPQAWAETGGMGLAVRQAPLIIPLKATSTPVSIKQYPMSQEARLGIKPHIQRLLDQGILVPCQSPWNTPLLPVKKPGTNDYRPVQDLREVNKRVEDIHPTVPNPYNLLSGLPPSHQWYTVLDLKDAFFCLRLHPTSQPLFAFEWRDPEMGISGQLTWTRLPQGFKNSPTLFNEALHRDLADFRIQHPDLILLQYVDDLLLAATSEQDCQRGTRALLQTLGNLGYRASAKKAQICQKQVKYLGYLLKEGQRWLTEARKETVMGQPTPKTPRQLREFLGKAGFCRLFIPGFAEMAAPLYPLTKPGTLFNWGPDQQKAYQEIKQALLTAPALGLPDLTKPFELFVDEKQGYAKGVLTQKLGPWRRPVAYLSKKLDPVAAGWPPCLRMVAAIAVLTKDAGKLTMGQPLVILAPHAVEALVKQPPDRWLSNARMTHYQAMLLDTDRVQFGPVVALNPATLLPLPEKEAPHDCLEILAETHGTRPDLTDQPIPDADYTWYTDGSSFLQEGQRRAGAAVTTETEVIWARALPAGTSAQRAELIALTQALKMAEGKKLNVYTDSRYAFATAHVHGEIYRRRGWLTSEGREIKNKNEILALLKALFLPKRLSIIHCPGHQKGNSAEARGNRMADQAAREAAMKAVLETSTLLAGKRTADGSEFEKRTADGSEFESPKKKAKVE

SEQ ID NO: 1040 - protein, 2091 aa, synthetic construct
MPAAKRVKLDGGDKKYSIGLDIGTNSVGWAVITDEYKVPSKKFKVLGNTDRHSIKKNLIGALLFDSGETAEATRLKRTARRRYTRRKNRICYLQEIFSNEMAKVDDSFFHRLEESFLVEEDKKHERHPIFGNIVDEVAYHEKYPTIYHLRKKLVDSTDKADLRLIYLALAHMIKFRGHFLIEGDLNPDNSDVDKLFIQLVQTYNQLFEENPINASGVDAKAILSARLSKSRRLENLIAQLPGEKKNGLFGNLIALSLGLTPNFKSNFDLAEDAKLQLSKDTYDDDLDNLLAQIGDQYADLFLAAKNLSDAILLSDILRVNTEITKAPLSASMIKRYDEHHQDLTLLKALVRQQLPEKYKEIFFDQSKNGYAGYIDGGASQEEFYKFIKPILEKMDGTEELLVKLNREDLLRKQRTFDNGSIPHQIHLGELHAILRRQEDFYPFLKDNREKIEKILTFRIPYYVGPLARGNSRFAWMTRKSEETITPWNFEEVVDKGASAQSFIERMTNFDKNLPNEKVLPKHSLLYEYFTVYNELTKVKYVTEGMRKPAFLSGEQKKAIVDLLFKTNRKVTVKQLKEDYFKKIECFDSVEISGVEDRFNASLGTYHDLLKIIKDKDFLDNEENEDILEDIVLTLTLFEDREMIEERLKTYAHLFDDKVMKQLKRRRYTGWGRLSRKLINGIRDKQSGKTILDFLKSDGFANRNFMQLIHDDSLTFKEDIQKAQVSGQGDSLHEHIANLAGSPAIKKGILQTVKVVDELVKVMGRHKPENIVIEMARENQTTQKGQKNSRERMKRIEEGIKELGSQILKEHPVENTQLQNEKLYLYYLQNGRDMYVDQELDINRLSDYDVDHIVPQSFLKDDSIDNKVLTRSDKARGKSDNVPSEEVVKKMKNYWRQLLNAKLITQRKFDNLTKAERGGLSELDKAGFIKRQLVETRQITKHVAQILDSRMNTKYDENDKLIREVKVITLKSKLVSDFRKDFQFYKVREINNYHHAHDAYLNAVVGTALIKKYPKLESEFVYGDYKVYDVRKMIAKSEQEIGKATAKYFFYSNIMNFFKTEITLANGEIRKRPLIETNGETGEIVWDKGRDFATVRKVLSMPQVNIVKKTEVQTGGFSKESILPKRNSDKLIARKKDWDPKKYGGFDSPTVAYSVLVVAKVEKGKSKKLKSVKELLGITIMERSSFEKNPIDFLEAKGYKEVKKDLIIKLPKYSLFELENGRKRMLASAGELQKGNELALPSKYVNFLYLASHYEKLKGSPEDNEQKQLFVEQHKHYLDEIIEQISEFSKRVILADANLDKVLSAYNKHRDKPIREQAENIIHLFTLTNLGAPAAFKYFDTTIDRKRYTSTKEVLDATLIHQSITGLYETRIDLSQLGGDGGGGSGGSGGTLNIEDEYRLHETSKEPDVPLGSTWLSDFPQAWAETGGMGLAVRQAPLIIPLKATSTPVSIKQYPMSQEARLGIKPHIQRLLDQGILVPCQSPWNTPLLPVKKPGTNDYRPVQDLREVNKRVEDIHPTVPNPYNLLSGLPPSHQWYTVLDLKDAFFCLRLHPTSQPLFAFEWRDPEMGISGQLTWTRLPQGFKNSPTLFNEALHRDLADFRIQHPDLILLQYVDDLLLAATSEQDCQRGTRALLQTLGNLGYRASAKKAQICQKQVKYLGYLLKEGQRWLTEARKETVMGQPTPKTPRQLREFLGKAGFCRLFIPGFAEMAAPLYPLTKPGTLFNWGPDQQKAYQEIKQALLTAPALGLPDLTKPFELFVDEKQGYAKGVLTQKLGPWRRPVAYLSKKLDPVAAGWPPCLRMVAAIAVLTKDAGKLTMGQPLVILAPHAVEALVKQPPDRWLSNARMTHYQAMLLDTDRVQFGPVVALNPATLLPLPEKEAPHDCLEILAETHGTRPDLTDQPIPDADYTWYTDGSSFLQEGQRRAGAAVTTETEVIWARALPAGTSAQRAELIALTQALKMAEGKKLNVYTDSRYAFATAHVHGEIYRRRGWLTSEGREIKNKNEILALLKALFLPKRLSIIHCPGHQKGNSAEARGNRMADQAAREAAMKAVLETSTLLAGKRTADGSEFEKRTADGSEFESPKKKAKVE

SEQ ID NO: 1041 - protein, 2096 aa, synthetic construct
MPAAKRVKLDGGDKKYSIGLDIGTNSVGWAVITDEYKVPSKKFKVLGNTDRHSIKKNLIGALLFDSGETAEATRLKRTARRRYTRRKNRICYLQEIFSNEMAKVDDSFFHRLEESFLVEEDKKHERHPIFGNIVDEVAYHEKYPTIYHLRKKLVDSTDKADLRLIYLALAHMIKFRGHFLIEGDLNPDNSDVDKLFIQLVQTYNQLFEENPINASGVDAKAILSARLSKSRRLENLIAQLPGEKKNGLFGNLIALSLGLTPNFKSNFDLAEDAKLQLSKDTYDDDLDNLLAQIGDQYADLFLAAKNLSDAILLSDILRVNTEITKAPLSASMIKRYDEHHQDLTLLKALVRQQLPEKYKEIFFDQSKNGYAGYIDGGASQEEFYKFIKPILEKMDGTEELLVKLNREDLLRKQRTFDNGSIPHQIHLGELHAILRRQEDFYPFLKDNREKIEKILTFRIPYYVGPLARGNSRFAWMTRKSEETITPWNFEEVVDKGASAQSFIERMTNFDKNLPNEKVLPKHSLLYEYFTVYNELTKVKYVTEGMRKPAFLSGEQKKAIVDLLFKTNRKVTVKQLKEDYFKKIECFDSVEISGVEDRFNASLGTYHDLLKIIKDKDFLDNEENEDILEDIVLTLTLFEDREMIEERLKTYAHLFDDKVMKQLKRRRYTGWGRLSRKLINGIRDKQSGKTILDFLKSDGFANRNFMQLIHDDSLTFKEDIQKAQVSGQGDSLHEHIANLAGSPAIKKGILQTVKVVDELVKVMGRHKPENIVIEMARENQTTQKGQKNSRERMKRIEEGIKELGSQILKEHPVENTQLQNEKLYLYYLQNGRDMYVDQELDINRLSDYDVDHIVPQSFLKDDSIDNKVLTRSDKARGKSDNVPSEEVVKKMKNYWRQLLNAKLITQRKFDNLTKAERGGLSELDKAGFIKRQLVETRQITKHVAQILDSRMNTKYDENDKLIREVKVITLKSKLVSDFRKDFQFYKVREINNYHHAHDAYLNAVVGTALIKKYPKLESEFVYGDYKVYDVRKMIAKSEQEIGKATAKYFFYSNIMNFFKTEITLANGEIRKRPLIETNGETGEIVWDKGRDFATVRKVLSMPQVNIVKKTEVQTGGFSKESILPKRNSDKLIARKKDWDPKKYGGFDSPTVAYSVLVVAKVEKGKSKKLKSVKELLGITIMERSSFEKNPIDFLEAKGYKEVKKDLIIKLPKYSLFELENGRKRMLASAGELQKGNELALPSKYVNFLYLASHYEKLKGSPEDNEQKQLFVEQHKHYLDEIIEQISEFSKRVILADANLDKVLSAYNKHRDKPIREQAENIIHLFTLTNLGAPAAFKYFDTTIDRKRYTSTKEVLDATLIHQSITGLYETRIDLSQLGGDGGEAAAKGGSPAPGGTLNIEDEYRLHETSKEPDVPLGSTWLSDFPQAWAETGGMGLAVRQAPLIIPLKATSTPVSIKQYPMSQEARLGIKPHIQRLLDQGILVPCQSPWNTPLLPVKKPGTNDYRPVQDLREVNKRVEDIHPTVPNPYNLLSGLPPSHQWYTVLDLKDAFFCLRLHPTSQPLFAFEWRDPEMGISGQLTWTRLPQGFKNSPTLFNEALHRDLADFRIQHPDLILLQYVDDLLLAATSEQDCQRGTRALLQTLGNLGYRASAKKAQICQKQVKYLGYLLKEGQRWLTEARKETVMGQPTPKTPRQLREFLGKAGFCRLFIPGFAEMAAPLYPLTKPGTLFNWGPDQQKAYQEIKQALLTAPALGLPDLTKPFELFVDEKQGYAKGVLTQKLGPWRRPVAYLSKKLDPVAAGWPPCLRMVAAIAVLTKDAGKLTMGQPLVILAPHAVEALVKQPPDRWLSNARMTHYQAMLLDTDRVQFGPVVALNPATLLPLPEKEAPHDCLEILAETHGTRPDLTDQPIPDADYTWYTDGSSFLQEGQRRAGAAVTTETEVIWARALPAGTSAQRAELIALTQALKMAEGKKLNVYTDSRYAFATAHVHGEIYRRRGWLTSEGREIKNKNEILALLKALFLPKRLSIIHCPGHQKGNSAEARGNRMADQAAREAAMKAVLETSTLLAGKRTADGSEFEKRTADGSEFESPKKKAKVE

SEQ ID NO: 1042 - protein, 2100 aa, synthetic construct
MPAAKRVKLDGGDKKYSIGLDIGTNSVGWAVITDEYKVPSKKFKVLGNTDRHSIKKNLIGALLFDSGETAEATRLKRTARRRYTRRKNRICYLQEIFSNEMAKVDDSFFHRLEESFLVEEDKKHERHPIFGNIVDEVAYHEKYPTIYHLRKKLVDSTDKADLRLIYLALAHMIKFRGHFLIEGDLNPDNSDVDKLFIQLVQTYNQLFEENPINASGVDAKAILSARLSKSRRLENLIAQLPGEKKNGLFGNLIALSLGLTPNFKSNFDLAEDAKLQLSKDTYDDDLDNLLAQIGDQYADLFLAAKNLSDAILLSDILRVNTEITKAPLSASMIKRYDEHHQDLTLLKALVRQQLPEKYKEIFFDQSKNGYAGYIDGGASQEEFYKFIKPILEKMDGTEELLVKLNREDLLRKQRTFDNGSIPHQIHLGELHAILRRQEDFYPFLKDNREKIEKILTFRIPYYVGPLARGNSRFAWMTRKSEETITPWNFEEVVDKGASAQSFIERMTNFDKNLPNEKVLPKHSLLYEYFTVYNELTKVKYVTEGMRKPAFLSGEQKKAIVDLLFKTNRKVTVKQLKEDYFKKIECFDSVEISGVEDRFNASLGTYHDLLKIIKDKDFLDNEENEDILEDIVLTLTLFEDREMIEERLKTYAHLFDDKVMKQLKRRRYTGWGRLSRKLINGIRDKQSGKTILDFLKSDGFANRNFMQLIHDDSLTFKEDIQKAQVSGQGDSLHEHIANLAGSPAIKKGILQTVKVVDELVKVMGRHKPENIVIEMARENQTTQKGQKNSRERMKRIEEGIKELGSQILKEHPVENTQLQNEKLYLYYLQNGRDMYVDQELDINRLSDYDVDHIVPQSFLKDDSIDNKVLTRSDKARGKSDNVPSEEVVKKMKNYWRQLLNAKLITQRKFDNLTKAERGGLSELDKAGFIKRQLVETRQITKHVAQILDSRMNTKYDENDKLIREVKVITLKSKLVSDFRKDFQFYKVREINNYHHAHDAYLNAVVGTALIKKYPKLESEFVYGDYKVYDVRKMIAKSEQEIGKATAKYFFYSNIMNFFKTEITLANGEIRKRPLIETNGETGEIVWDKGRDFATVRKVLSMPQVNIVKKTEVQTGGFSKESILPKRNSDKLIARKKDWDPKKYGGFDSPTVAYSVLVVAKVEKGKSKKLKSVKELLGITIMERSSFEKNPIDFLEAKGYKEVKKDLIIKLPKYSLFELENGRKRMLASAGELQKGNELALPSKYVNFLYLASHYEKLKGSPEDNEQKQLFVEQHKHYLDEIIEQISEFSKRVILADANLDKVLSAYNKHRDKPIREQAENIIHLFTLTNLGAPAAFKYFDTTIDRKRYTSTKEVLDATLIHQSITGLYETRIDLSQLGGDGGGGGGSGGGGSGGGGSGGTLNIEDEYRLHETSKEPDVPLGSTWLSDFPQAWAETGGMGLAVRQAPLIIPLKATSTPVSIKQYPMSQEARLGIKPHIQRLLDQGILVPCQSPWNTPLLPVKKPGTNDYRPVQDLREVNKRVEDIHPTVPNPYNLLSGLPPSHQWYTVLDLKDAFFCLRLHPTSQPLFAFEWRDPEMGISGQLTWTRLPQGFKNSPTLFNEALHRDLADFRIQHPDLILLQYVDDLLLAATSEQDCQRGTRALLQTLGNLGYRASAKKAQICQKQVKYLGYLLKEGQRWLTEARKETVMGQPTPKTPRQLREFLGKAGFCRLFIPGFAEMAAPLYPLTKPGTLFNWGPDQQKAYQEIKQALLTAPALGLPDLTKPFELFVDEKQGYAKGVLTQKLGPWRRPVAYLSKKLDPVAAGWPPCLRMVAAIAVLTKDAGKLTMGQPLVILAPHAVEALVKQPPDRWLSNARMTHYQAMLLDTDRVQFGPVVALNPATLLPLPEKEAPHDCLEILAETHGTRPDLTDQPIPDADYTWYTDGSSFLQEGQRRAGAAVTTETEVIWARALPAGTSAQRAELIALTQALKMAEGKKLNVYTDSRYAFATAHVHGEIYRRRGWLTSEGREIKNKNEILALLKALFLPKRLSIIHCPGHQKGNSAEARGNRMADQAAREAAMKAVLETSTLLAGKRTADGSEFEKRTADGSEFESPKKKAKVE

SEQ ID NO: 1043 - protein, 2094 aa, synthetic construct
MPAAKRVKLDGGDKKYSIGLDIGTNSVGWAVITDEYKVPSKKFKVLGNTDRHSIKKNLIGALLFDSGETAEATRLKRTARRRYTRRKNRICYLQEIFSNEMAKVDDSFFHRLEESFLVEEDKKHERHPIFGNIVDEVAYHEKYPTIYHLRKKLVDSTDKADLRLIYLALAHMIKFRGHFLIEGDLNPDNSDVDKLFIQLVQTYNQLFEENPINASGVDAKAILSARLSKSRRLENLIAQLPGEKKNGLFGNLIALSLGLTPNFKSNFDLAEDAKLQLSKDTYDDDLDNLLAQIGDQYADLFLAAKNLSDAILLSDILRVNTEITKAPLSASMIKRYDEHHQDLTLLKALVRQQLPEKYKEIFFDQSKNGYAGYIDGGASQEEFYKFIKPILEKMDGTEELLVKLNREDLLRKQRTFDNGSIPHQIHLGELHAILRRQEDFYPFLKDNREKIEKILTFRIPYYVGPLARGNSRFAWMTRKSEETITPWNFEEVVDKGASAQSFIERMTNFDKNLPNEKVLPKHSLLYEYFTVYNELTKVKYVTEGMRKPAFLSGEQKKAIVDLLFKTNRKVTVKQLKEDYFKKIECFDSVEISGVEDRFNASLGTYHDLLKIIKDKDFLDNEENEDILEDIVLTLTLFEDREMIEERLKTYAHLFDDKVMKQLKRRRYTGWGRLSRKLINGIRDKQSGKTILDFLKSDGFANRNFMQLIHDDSLTFKEDIQKAQVSGQGDSLHEHIANLAGSPAIKKGILQTVKVVDELVKVMGRHKPENIVIEMARENQTTQKGQKNSRERMKRIEEGIKELGSQILKEHPVENTQLQNEKLYLYYLQNGRDMYVDQELDINRLSDYDVDHIVPQSFLKDDSIDNKVLTRSDKARGKSDNVPSEEVVKKMKNYWRQLLNAKLITQRKFDNLTKAERGGLSELDKAGFIKRQLVETRQITKHVAQILDSRMNTKYDENDKLIREVKVITLKSKLVSDFRKDFQFYKVREINNYHHAHDAYLNAVVGTALIKKYPKLESEFVYGDYKVYDVRKMIAKSEQEIGKATAKYFFYSNIMNFFKTEITLANGEIRKRPLIETNGETGEIVWDKGRDFATVRKVLSMPQVNIVKKTEVQTGGFSKESILPKRNSDKLIARKKDWDPKKYGGFDSPTVAYSVLVVAKVEKGKSKKLKSVKELLGITIMERSSFEKNPIDFLEAKGYKEVKKDLIIKLPKYSLFELENGRKRMLASAGELQKGNELALPSKYVNFLYLASHYEKLKGSPEDNEQKQLFVEQHKHYLDEIIEQISEFSKRVILADANLDKVLSAYNKHRDKPIREQAENIIHLFTLTNLGAPAAFKYFDTTIDRKRYTSTKEVLDATLIHQSITGLYETRIDLSQLGGDGGPAPGSSGGSGGTLNIEDEYRLHETSKEPDVPLGSTWLSDFPQAWAETGGMGLAVRQAPLIIPLKATSTPVSIKQYPMSQEARLGIKPHIQRLLDQGILVPCQSPWNTPLLPVKKPGTNDYRPVQDLREVNKRVEDIHPTVPNPYNLLSGLPPSHQWYTVLDLKDAFFCLRLHPTSQPLFAFEWRDPEMGISGQLTWTRLPQGFKNSPTLFNEALHRDLADFRIQHPDLILLQYVDDLLLAATSEQDCQRGTRALLQTLGNLGYRASAKKAQICQKQVKYLGYLLKEGQRWLTEARKETVMGQPTPKTPRQLREFLGKAGFCRLFIPGFAEMAAPLYPLTKPGTLFNWGPDQQKAYQEIKQALLTAPALGLPDLTKPFELFVDEKQGYAKGVLTQKLGPWRRPVAYLSKKLDPVAAGWPPCLRMVAAIAVLTKDAGKLTMGQPLVILAPHAVEALVKQPPDRWLSNARMTHYQAMLLDTDRVQFGPVVALNPATLLPLPEKEAPHDCLEILAETHGTRPDLTDQPIPDADYTWYTDGSSFLQEGQRRAGAAVTTETEVIWARALPAGTSAQRAELIALTQALKMAEGKKLNVYTDSRYAFATAHVHGEIYRRRGWLTSEGREIKNKNEILALLKALFLPKRLSIIHCPGHQKGNSAEARGNRMADQAAREAAMKAVLETSTLLAGKRTADGSEFEKRTADGSEFESPKKKAKVE

SEQ ID NO: 1044 - protein, 2093 aa, synthetic construct
MPAAKRVKLDGGDKKYSIGLDIGTNSVGWAVITDEYKVPSKKFKVLGNTDRHSIKKNLIGALLFDSGETAEATRLKRTARRRYTRRKNRICYLQEIFSNEMAKVDDSFFHRLEESFLVEEDKKHERHPIFGNIVDEVAYHEKYPTIYHLRKKLVDSTDKADLRLIYLALAHMIKFRGHFLIEGDLNPDNSDVDKLFIQLVQTYNQLFEENPINASGVDAKAILSARLSKSRRLENLIAQLPGEKKNGLFGNLIALSLGLTPNFKSNFDLAEDAKLQLSKDTYDDDLDNLLAQIGDQYADLFLAAKNLSDAILLSDILRVNTEITKAPLSASMIKRYDEHHQDLTLLKALVRQQLPEKYKEIFFDQSKNGYAGYIDGGASQEEFYKFIKPILEKMDGTEELLVKLNREDLLRKQRTFDNGSIPHQIHLGELHAILRRQEDFYPFLKDNREKIEKILTFRIPYYVGPLARGNSRFAWMTRKSEETITPWNFEEVVDKGASAQSFIERMTNFDKNLPNEKVLPKHSLLYEYFTVYNELTKVKYVTEGMRKPAFLSGEQKKAIVDLLFKTNRKVTVKQLKEDYFKKIECFDSVEISGVEDRFNASLGTYHDLLKIIKDKDFLDNEENEDILEDIVLTLTLFEDREMIEERLKTYAHLFDDKVMKQLKRRRYTGWGRLSRKLINGIRDKQSGKTILDFLKSDGFANRNFMQLIHDDSLTFKEDIQKAQVSGQGDSLHEHIANLAGSPAIKKGILQTVKVVDELVKVMGRHKPENIVIEMARENQTTQKGQKNSRERMKRIEEGIKELGSQILKEHPVENTQLQNEKLYLYYLQNGRDMYVDQELDINRLSDYDVDHIVPQSFLKDDSIDNKVLTRSDKARGKSDNVPSEEVVKKMKNYWRQLLNAKLITQRKFDNLTKAERGGLSELDKAGFIKRQLVETRQITKHVAQILDSRMNTKYDENDKLIREVKVITLKSKLVSDFRKDFQFYKVREINNYHHAHDAYLNAVVGTALIKKYPKLESEFVYGDYKVYDVRKMIAKSEQEIGKATAKYFFYSNIMNFFKTEITLANGEIRKRPLIETNGETGEIVWDKGRDFATVRKVLSMPQVNIVKKTEVQTGGFSKESILPKRNSDKLIARKKDWDPKKYGGFDSPTVAYSVLVVAKVEKGKSKKLKSVKELLGITIMERSSFEKNPIDFLEAKGYKEVKKDLIIKLPKYSLFELENGRKRMLASAGELQKGNELALPSKYVNFLYLASHYEKLKGSPEDNEQKQLFVEQHKHYLDEIIEQISEFSKRVILADANLDKVLSAYNKHRDKPIREQAENIIHLFTLTNLGAPAAFKYFDTTIDRKRYTSTKEVLDATLIHQSITGLYETRIDLSQLGGDGGGGGEAAAKGGTLNIEDEYRLHETSKEPDVPLGSTWLSDFPQAWAETGGMGLAVRQAPLIIPLKATSTPVSIKQYPMSQEARLGIKPHIQRLLDQGILVPCQSPWNTPLLPVKKPGTNDYRPVQDLREVNKRVEDIHPTVPNPYNLLSGLPPSHQWYTVLDLKDAFFCLRLHPTSQPLFAFEWRDPEMGISGQLTWTRLPQGFKNSPTLFNEALHRDLADFRIQHPDLILLQYVDDLLLAATSEQDCQRGTRALLQTLGNLGYRASAKKAQICQKQVKYLGYLLKEGQRWLTEARKETVMGQPTPKTPRQLREFLGKAGFCRLFIPGFAEMAAPLYPLTKPGTLFNWGPDQQKAYQEIKQALLTAPALGLPDLTKPFELFVDEKQGYAKGVLTQKLGPWRRPVAYLSKKLDPVAAGWPPCLRMVAAIAVLTKDAGKLTMGQPLVILAPHAVEALVKQPPDRWLSNARMTHYQAMLLDTDRVQFGPVVALNPATLLPLPEKEAPHDCLEILAETHGTRPDLTDQPIPDADYTWYTDGSSFLQEGQRRAGAAVTTETEVIWARALPAGTSAQRAELIALTQALKMAEGKKLNVYTDSRYAFATAHVHGEIYRRRGWLTSEGREIKNKNEILALLKALFLPKRLSIIHCPGHQKGNSAEARGNRMADQAAREAAMKAVLETSTLLAGKRTADGSEFEKRTADGSEFESPKKKAKVE

SEQ ID NO: 1045 - protein, 2100 aa, synthetic construct
MPAAKRVKLDGGDKKYSIGLDIGTNSVGWAVITDEYKVPSKKFKVLGNTDRHSIKKNLIGALLFDSGETAEATRLKRTARRRYTRRKNRICYLQEIFSNEMAKVDDSFFHRLEESFLVEEDKKHERHPIFGNIVDEVAYHEKYPTIYHLRKKLVDSTDKADLRLIYLALAHMIKFRGHFLIEGDLNPDNSDVDKLFIQLVQTYNQLFEENPINASGVDAKAILSARLSKSRRLENLIAQLPGEKKNGLFGNLIALSLGLTPNFKSNFDLAEDAKLQLSKDTYDDDLDNLLAQIGDQYADLFLAAKNLSDAILLSDILRVNTEITKAPLSASMIKRYDEHHQDLTLLKALVRQQLPEKYKEIFFDQSKNGYAGYIDGGASQEEFYKFIKPILEKMDGTEELLVKLNREDLLRKQRTFDNGSIPHQIHLGELHAILRRQEDFYPFLKDNREKIEKILTFRIPYYVGPLARGNSRFAWMTRKSEETITPWNFEEVVDKGASAQSFIERMTNFDKNLPNEKVLPKHSLLYEYFTVYNELTKVKYVTEGMRKPAFLSGEQKKAIVDLLFKTNRKVTVKQLKEDYFKKIECFDSVEISGVEDRFNASLGTYHDLLKIIKDKDFLDNEENEDILEDIVLTLTLFEDREMIEERLKTYAHLFDDKVMKQLKRRRYTGWGRLSRKLINGIRDKQSGKTILDFLKSDGFANRNFMQLIHDDSLTFKEDIQKAQVSGQGDSLHEHIANLAGSPAIKKGILQTVKVVDELVKVMGRHKPENIVIEMARENQTTQKGQKNSRERMKRIEEGIKELGSQILKEHPVENTQLQNEKLYLYYLQNGRDMYVDQELDINRLSDYDVDHIVPQSFLKDDSIDNKVLTRSDKARGKSDNVPSEEVVKKMKNYWRQLLNAKLITQRKFDNLTKAERGGLSELDKAGFIKRQLVETRQITKHVAQILDSRMNTKYDENDKLIREVKVITLKSKLVSDFRKDFQFYKVREINNYHHAHDAYLNAVVGTALIKKYPKLESEFVYGDYKVYDVRKMIAKSEQEIGKATAKYFFYSNIMNFFKTEITLANGEIRKRPLIETNGETGEIVWDKGRDFATVRKVLSMPQVNIVKKTEVQTGGFSKESILPKRNSDKLIARKKDWDPKKYGGFDSPTVAYSVLVVAKVEKGKSKKLKSVKELLGITIMERSSFEKNPIDFLEAKGYKEVKKDLIIKLPKYSLFELENGRKRMLASAGELQKGNELALPSKYVNFLYLASHYEKLKGSPEDNEQKQLFVEQHKHYLDEIIEQISEFSKRVILADANLDKVLSAYNKHRDKPIREQAENIIHLFTLTNLGAPAAFKYFDTTIDRKRYTSTKEVLDATLIHQSITGLYETRIDLSQLGGDGGGSSGSSGSSGSSGSSGGTLNIEDEYRLHETSKEPDVPLGSTWLSDFPQAWAETGGMGLAVRQAPLIIPLKATSTPVSIKQYPMSQEARLGIKPHIQRLLDQGILVPCQSPWNTPLLPVKKPGTNDYRPVQDLREVNKRVEDIHPTVPNPYNLLSGLPPSHQWYTVLDLKDAFFCLRLHPTSQPLFAFEWRDPEMGISGQLTWTRLPQGFKNSPTLFNEALHRDLADFRIQHPDLILLQYVDDLLLAATSEQDCQRGTRALLQTLGNLGYRASAKKAQICQKQVKYLGYLLKEGQRWLTEARKETVMGQPTPKTPRQLREFLGKAGFCRLFIPGFAEMAAPLYPLTKPGTLFNWGPDQQKAYQEIKQALLTAPALGLPDLTKPFELFVDEKQGYAKGVLTQKLGPWRRPVAYLSKKLDPVAAGWPPCLRMVAAIAVLTKDAGKLTMGQPLVILAPHAVEALVKQPPDRWLSNARMTHYQAMLLDTDRVQFGPVVALNPATLLPLPEKEAPHDCLEILAETHGTRPDLTDQPIPDADYTWYTDGSSFLQEGQRRAGAAVTTETEVIWARALPAGTSAQRAELIALTQALKMAEGKKLNVYTDSRYAFATAHVHGEIYRRRGWLTSEGREIKNKNEILALLKALFLPKRLSIIHCPGHQKGNSAEARGNRMADQAAREAAMKAVLETSTLLAGKRTADGSEFEKRTADGSEFESPKKKAKVE

SEQ ID NO: 1046 - protein, 2096 aa, synthetic construct
MPAAKRVKLDGGDKKYSIGLDIGTNSVGWAVITDEYKVPSKKFKVLGNTDRHSIKKNLIGALLFDSGETAEATRLKRTARRRYTRRKNRICYLQEIFSNEMAKVDDSFFHRLEESFLVEEDKKHERHPIFGNIVDEVAYHEKYPTIYHLRKKLVDSTDKADLRLIYLALAHMIKFRGHFLIEGDLNPDNSDVDKLFIQLVQTYNQLFEENPINASGVDAKAILSARLSKSRRLENLIAQLPGEKKNGLFGNLIALSLGLTPNFKSNFDLAEDAKLQLSKDTYDDDLDNLLAQIGDQYADLFLAAKNLSDAILLSDILRVNTEITKAPLSASMIKRYDEHHQDLTLLKALVRQQLPEKYKEIFFDQSKNGYAGYIDGGASQEEFYKFIKPILEKMDGTEELLVKLNREDLLRKQRTFDNGSIPHQIHLGELHAILRRQEDFYPFLKDNREKIEKILTFRIPYYVGPLARGNSRFAWMTRKSEETITPWNFEEVVDKGASAQSFIERMTNFDKNLPNEKVLPKHSLLYEYFTVYNELTKVKYVTEGMRKPAFLSGEQKKAIVDLLFKTNRKVTVKQLKEDYFKKIECFDSVEISGVEDRFNASLGTYHDLLKIIKDKDFLDNEENEDILEDIVLTLTLFEDREMIEERLKTYAHLFDDKVMKQLKRRRYTGWGRLSRKLINGIRDKQSGKTILDFLKSDGFANRNFMQLIHDDSLTFKEDIQKAQVSGQGDSLHEHIANLAGSPAIKKGILQTVKVVDELVKVMGRHKPENIVIEMARENQTTQKGQKNSRERMKRIEEGIKELGSQILKEHPVENTQLQNEKLYLYYLQNGRDMYVDQELDINRLSDYDVDHIVPQSFLKDDSIDNKVLTRSDKARGKSDNVPSEEVVKKMKNYWRQLLNAKLITQRKFDNLTKAERGGLSELDKAGFIKRQLVETRQITKHVAQILDSRMNTKYDENDKLIREVKVITLKSKLVSDFRKDFQFYKVREINNYHHAHDAYLNAVVGTALIKKYPKLESEFVYGDYKVYDVRKMIAKSEQEIGKATAKYFFYSNIMNFFKTEITLANGEIRKRPLIETNGETGEIVWDKGRDFATVRKVLSMPQVNIVKKTEVQTGGFSKESILPKRNSDKLIARKKDWDPKKYGGFDSPTVAYSVLVVAKVEKGKSKKLKSVKELLGITIMERSSFEKNPIDFLEAKGYKEVKKDLIIKLPKYSLFELENGRKRMLASAGELQKGNELALPSKYVNFLYLASHYEKLKGSPEDNEQKQLFVEQHKHYLDEIIEQISEFSKRVILADANLDKVLSAYNKHRDKPIREQAENIIHLFTLTNLGAPAAFKYFDTTIDRKRYTSTKEVLDATLIHQSITGLYETRIDLSQLGGDGGGGSGGGEAAAKGGTLNIEDEYRLHETSKEPDVPLGSTWLSDFPQAWAETGGMGLAVRQAPLIIPLKATSTPVSIKQYPMSQEARLGIKPHIQRLLDQGILVPCQSPWNTPLLPVKKPGTNDYRPVQDLREVNKRVEDIHPTVPNPYNLLSGLPPSHQWYTVLDLKDAFFCLRLHPTSQPLFAFEWRDPEMGISGQLTWTRLPQGFKNSPTLFNEALHRDLADFRIQHPDLILLQYVDDLLLAATSEQDCQRGTRALLQTLGNLGYRASAKKAQICQKQVKYLGYLLKEGQRWLTEARKETVMGQPTPKTPRQLREFLGKAGFCRLFIPGFAEMAAPLYPLTKPGTLFNWGPDQQKAYQEIKQALLTAPALGLPDLTKPFELFVDEKQGYAKGVLTQKLGPWRRPVAYLSKKLDPVAAGWPPCLRMVAAIAVLTKDAGKLTMGQPLVILAPHAVEALVKQPPDRWLSNARMTHYQAMLLDTDRVQFGPVVALNPATLLPLPEKEAPHDCLEILAETHGTRPDLTDQPIPDADYTWYTDGSSFLQEGQRRAGAAVTTETEVIWARALPAGTSAQRAELIALTQALKMAEGKKLNVYTDSRYAFATAHVHGEIYRRRGWLTSEGREIKNKNEILALLKALFLPKRLSIIHCPGHQKGNSAEARGNRMADQAAREAAMKAVLETSTLLAGKRTADGSEFEKRTADGSEFESPKKKAKVE

SEQ ID NO: 1047 - protein, 2091 aa, synthetic construct
MPAAKRVKLDGGDKKYSIGLDIGTNSVGWAVITDEYKVPSKKFKVLGNTDRHSIKKNLIGALLFDSGETAEATRLKRTARRRYTRRKNRICYLQEIFSNEMAKVDDSFFHRLEESFLVEEDKKHERHPIFGNIVDEVAYHEKYPTIYHLRKKLVDSTDKADLRLIYLALAHMIKFRGHFLIEGDLNPDNSDVDKLFIQLVQTYNQLFEENPINASGVDAKAILSARLSKSRRLENLIAQLPGEKKNGLFGNLIALSLGLTPNFKSNFDLAEDAKLQLSKDTYDDDLDNLLAQIGDQYADLFLAAKNLSDAILLSDILRVNTEITKAPLSASMIKRYDEHHQDLTLLKALVRQQLPEKYKEIFFDQSKNGYAGYIDGGASQEEFYKFIKPILEKMDGTEELLVKLNREDLLRKQRTFDNGSIPHQIHLGELHAILRRQEDFYPFLKDNREKIEKILTFRIPYYVGPLARGNSRFAWMTRKSEETITPWNFEEVVDKGASAQSFIERMTNFDKNLPNEKVLPKHSLLYEYFTVYNELTKVKYVTEGMRKPAFLSGEQKKAIVDLLFKTNRKVTVKQLKEDYFKKIECFDSVEISGVEDRFNASLGTYHDLLKIIKDKDFLDNEENEDILEDIVLTLTLFEDREMIEERLKTYAHLFDDKVMKQLKRRRYTGWGRLSRKLINGIRDKQSGKTILDFLKSDGFANRNFMQLIHDDSLTFKEDIQKAQVSGQGDSLHEHIANLAGSPAIKKGILQTVKVVDELVKVMGRHKPENIVIEMARENQTTQKGQKNSRERMKRIEEGIKELGSQILKEHPVENTQLQNEKLYLYYLQNGRDMYVDQELDINRLSDYDVDHIVPQSFLKDDSIDNKVLTRSDKARGKSDNVPSEEVVKKMKNYWRQLLNAKLITQRKFDNLTKAERGGLSELDKAGFIKRQLVETRQITKHVAQILDSRMNTKYDENDKLIREVKVITLKSKLVSDFRKDFQFYKVREINNYHHAHDAYLNAVVGTALIKKYPKLESEFVYGDYKVYDVRKMIAKSEQEIGKATAKYFFYSNIMNFFKTEITLANGEIRKRPLIETNGETGEIVWDKGRDFATVRKVLSMPQVNIVKKTEVQTGGFSKESILPKRNSDKLIARKKDWDPKKYGGFDSPTVAYSVLVVAKVEKGKSKKLKSVKELLGITIMERSSFEKNPIDFLEAKGYKEVKKDLIIKLPKYSLFELENGRKRMLASAGELQKGNELALPSKYVNFLYLASHYEKLKGSPEDNEQKQLFVEQHKHYLDEIIEQISEFSKRVILADANLDKVLSAYNKHRDKPIREQAENIIHLFTLTNLGAPAAFKYFDTTIDRKRYTSTKEVLDATLIHQSITGLYETRIDLSQLGGDGGGSSGSSGGTLNIEDEYRLHETSKEPDVPLGSTWLSDFPQAWAETGGMGLAVRQAPLIIPLKATSTPVSIKQYPMSQEARLGIKPHIQRLLDQGILVPCQSPWNTPLLPVKKPGTNDYRPVQDLREVNKRVEDIHPTVPNPYNLLSGLPPSHQWYTVLDLKDAFFCLRLHPTSQPLFAFEWRDPEMGISGQLTWTRLPQGFKNSPTLFNEALHRDLADFRIQHPDLILLQYVDDLLLAATSEQDCQRGTRALLQTLGNLGYRASAKKAQICQKQVKYLGYLLKEGQRWLTEARKETVMGQPTPKTPRQLREFLGKAGFCRLFIPGFAEMAAPLYPLTKPGTLFNWGPDQQKAYQEIKQALLTAPALGLPDLTKPFELFVDEKQGYAKGVLTQKLGPWRRPVAYLSKKLDPVAAGWPPCLRMVAAIAVLTKDAGKLTMGQPLVILAPHAVEALVKQPPDRWLSNARMTHYQAMLLDTDRVQFGPVVALNPATLLPLPEKEAPHDCLEILAETHGTRPDLTDQPIPDADYTWYTDGSSFLQEGQRRAGAAVTTETEVIWARALPAGTSAQRAELIALTQALKMAEGKKLNVYTDSRYAFATAHVHGEIYRRRGWLTSEGREIKNKNEILALLKALFLPKRLSIIHCPGHQKGNSAEARGNRMADQAAREAAMKAVLETSTLLAGKRTADGSEFEKRTADGSEFESPKKKAKVE

SEQ ID NO: 1048 - protein, 2093 aa, synthetic construct
MPAAKRVKLDGGDKKYSIGLDIGTNSVGWAVITDEYKVPSKKFKVLGNTDRHSIKKNLIGALLFDSGETAEATRLKRTARRRYTRRKNRICYLQEIFSNEMAKVDDSFFHRLEESFLVEEDKKHERHPIFGNIVDEVAYHEKYPTIYHLRKKLVDSTDKADLRLIYLALAHMIKFRGHFLIEGDLNPDNSDVDKLFIQLVQTYNQLFEENPINASGVDAKAILSARLSKSRRLENLIAQLPGEKKNGLFGNLIALSLGLTPNFKSNFDLAEDAKLQLSKDTYDDDLDNLLAQIGDQYADLFLAAKNLSDAILLSDILRVNTEITKAPLSASMIKRYDEHHQDLTLLKALVRQQLPEKYKEIFFDQSKNGYAGYIDGGASQEEFYKFIKPILEKMDGTEELLVKLNREDLLRKQRTFDNGSIPHQIHLGELHAILRRQEDFYPFLKDNREKIEKILTFRIPYYVGPLARGNSRFAWMTRKSEETITPWNFEEVVDKGASAQSFIERMTNFDKNLPNEKVLPKHSLLYEYFTVYNELTKVKYVTEGMRKPAFLSGEQKKAIVDLLFKTNRKVTVKQLKEDYFKKIECFDSVEISGVEDRFNASLGTYHDLLKIIKDKDFLDNEENEDILEDIVLTLTLFEDREMIEERLKTYAHLFDDKVMKQLKRRRYTGWGRLSRKLINGIRDKQSGKTILDFLKSDGFANRNFMQLIHDDSLTFKEDIQKAQVSGQGDSLHEHIANLAGSPAIKKGILQTVKVVDELVKVMGRHKPENIVIEMARENQTTQKGQKNSRERMKRIEEGIKELGSQILKEHPVENTQLQNEKLYLYYLQNGRDMYVDQELDINRLSDYDVDHIVPQSFLKDDSIDNKVLTRSDKARGKSDNVPSEEVVKKMKNYWRQLLNAKLITQRKFDNLTKAERGGLSELDKAGFIKRQLVETRQITKHVAQILDSRMNTKYDENDKLIREVKVITLKSKLVSDFRKDFQFYKVREINNYHHAHDAYLNAVVGTALIKKYPKLESEFVYGDYKVYDVRKMIAKSEQEIGKATAKYFFYSNIMNFFKTEITLANGEIRKRPLIETNGETGEIVWDKGRDFATVRKVLSMPQVNIVKKTEVQTGGFSKESILPKRNSDKLIARKKDWDPKKYGGFDSPTVAYSVLVVAKVEKGKSKKLKSVKELLGITIMERSSFEKNPIDFLEAKGYKEVKKDLIIKLPKYSLFELENGRKRMLASAGELQKGNELALPSKYVNFLYLASHYEKLKGSPEDNEQKQLFVEQHKHYLDEIIEQISEFSKRVILADANLDKVLSAYNKHRDKPIREQAENIIHLFTLTNLGAPAAFKYFDTTIDRKRYTSTKEVLDATLIHQSITGLYETRIDLSQLGGDGGEAAAKPAPGGTLNIEDEYRLHETSKEPDVPLGSTWLSDFPQAWAETGGMGLAVRQAPLIIPLKATSTPVSIKQYPMSQEARLGIKPHIQRLLDQGILVPCQSPWNTPLLPVKKPGTNDYRPVQDLREVNKRVEDIHPTVPNPYNLLSGLPPSHQWYTVLDLKDAFFCLRLHPTSQPLFAFEWRDPEMGISGQLTWTRLPQGFKNSPTLFNEALHRDLADFRIQHPDLILLQYVDDLLLAATSEQDCQRGTRALLQTLGNLGYRASAKKAQICQKQVKYLGYLLKEGQRWLTEARKETVMGQPTPKTPRQLREFLGKAGFCRLFIPGFAEMAAPLYPLTKPGTLFNWGPDQQKAYQEIKQALLTAPALGLPDLTKPFELFVDEKQGYAKGVLTQKLGPWRRPVAYLSKKLDPVAAGWPPCLRMVAAIAVLTKDAGKLTMGQPLVILAPHAVEALVKQPPDRWLSNARMTHYQAMLLDTDRVQFGPVVALNPATLLPLPEKEAPHDCLEILAETHGTRPDLTDQPIPDADYTWYTDGSSFLQEGQRRAGAAVTTETEVIWARALPAGTSAQRAELIALTQALKMAEGKKLNVYTDSRYAFATAHVHGEIYRRRGWLTSEGREIKNKNEILALLKALFLPKRLSIIHCPGHQKGNSAEARGNRMADQAAREAAMKAVLETSTLLAGKRTADGSEFEKRTADGSEFESPKKKAKVE

SEQ ID NO: 1049 - protein, 2105 aa, synthetic construct
MPAAKRVKLDGGDKKYSIGLDIGTNSVGWAVITDEYKVPSKKFKVLGNTDRHSIKKNLIGALLFDSGETAEATRLKRTARRRYTRRKNRICYLQEIFSNEMAKVDDSFFHRLEESFLVEEDKKHERHPIFGNIVDEVAYHEKYPTIYHLRKKLVDSTDKADLRLIYLALAHMIKFRGHFLIEGDLNPDNSDVDKLFIQLVQTYNQLFEENPINASGVDAKAILSARLSKSRRLENLIAQLPGEKKNGLFGNLIALSLGLTPNFKSNFDLAEDAKLQLSKDTYDDDLDNLLAQIGDQYADLFLAAKNLSDAILLSDILRVNTEITKAPLSASMIKRYDEHHQDLTLLKALVRQQLPEKYKEIFFDQSKNGYAGYIDGGASQEEFYKFIKPILEKMDGTEELLVKLNREDLLRKQRTFDNGSIPHQIHLGELHAILRRQEDFYPFLKDNREKIEKILTFRIPYYVGPLARGNSRFAWMTRKSEETITPWNFEEVVDKGASAQSFIERMTNFDKNLPNEKVLPKHSLLYEYFTVYNELTKVKYVTEGMRKPAFLSGEQKKAIVDLLFKTNRKVTVKQLKEDYFKKIECFDSVEISGVEDRFNASLGTYHDLLKIIKDKDFLDNEENEDILEDIVLTLTLFEDREMIEERLKTYAHLFDDKVMKQLKRRRYTGWGRLSRKLINGIRDKQSGKTILDFLKSDGFANRNFMQLIHDDSLTFKEDIQKAQVSGQGDSLHEHIANLAGSPAIKKGILQTVKVVDELVKVMGRHKPENIVIEMARENQTTQKGQKNSRERMKRIEEGIKELGSQILKEHPVENTQLQNEKLYLYYLQNGRDMYVDQELDINRLSDYDVDHIVPQSFLKDDSIDNKVLTRSDKARGKSDNVPSEEVVKKMKNYWRQLLNAKLITQRKFDNLTKAERGGLSELDKAGFIKRQLVETRQITKHVAQILDSRMNTKYDENDKLIREVKVITLKSKLVSDFRKDFQFYKVREINNYHHAHDAYLNAVVGTALIKKYPKLESEFVYGDYKVYDVRKMIAKSEQEIGKATAKYFFYSNIMNFFKTEITLANGEIRKRPLIETNGETGEIVWDKGRDFATVRKVLSMPQVNIVKKTEVQTGGFSKESILPKRNSDKLIARKKDWDPKKYGGFDSPTVAYSVLVVAKVEKGKSKKLKSVKELLGITIMERSSFEKNPIDFLEAKGYKEVKKDLIIKLPKYSLFELENGRKRMLASAGELQKGNELALPSKYVNFLYLASHYEKLKGSPEDNEQKQLFVEQHKHYLDEIIEQISEFSKRVILADANLDKVLSAYNKHRDKPIREQAENIIHLFTLTNLGAPAAFKYFDTTIDRKRYTSTKEVLDATLIHQSITGLYETRIDLSQLGGDGGGGGGSGGGGSGGGGSGGGGSGGTLNIEDEYRLHETSKEPDVPLGSTWLSDFPQAWAETGGMGLAVRQAPLIIPLKATSTPVSIKQYPMSQEARLGIKPHIQRLLDQGILVPCQSPWNTPLLPVKKPGTNDYRPVQDLREVNKRVEDIHPTVPNPYNLLSGLPPSHQWYTVLDLKDAFFCLRLHPTSQPLFAFEWRDPEMGISGQLTWTRLPQGFKNSPTLFNEALHRDLADFRIQHPDLILLQYVDDLLLAATSEQDCQRGTRALLQTLGNLGYRASAKKAQICQKQVKYLGYLLKEGQRWLTEARKETVMGQPTPKTPRQLREFLGKAGFCRLFIPGFAEMAAPLYPLTKPGTLFNWGPDQQKAYQEIKQALLTAPALGLPDLTKPFELFVDEKQGYAKGVLTQKLGPWRRPVAYLSKKLDPVAAGWPPCLRMVAAIAVLTKDAGKLTMGQPLVILAPHAVEALVKQPPDRWLSNARMTHYQAMLLDTDRVQFGPVVALNPATLLPLPEKEAPHDCLEILAETHGTRPDLTDQPIPDADYTWYTDGSSFLQEGQRRAGAAVTTETEVIWARALPAGTSAQRAELIALTQALKMAEGKKLNVYTDSRYAFATAHVHGEIYRRRGWLTSEGREIKNKNEILALLKALFLPKRLSIIHCPGHQKGNSAEARGNRMADQAAREAAMKAVLETSTLLAGKRTADGSEFEKRTADGSEFESPKKKAKVE

SEQ ID NO: 1050 - protein, 2093 aa, synthetic construct
MPAAKRVKLDGGDKKYSIGLDIGTNSVGWAVITDEYKVPSKKFKVLGNTDRHSIKKNLIGALLFDSGETAEATRLKRTARRRYTRRKNRICYLQEIFSNEMAKVDDSFFHRLEESFLVEEDKKHERHPIFGNIVDEVAYHEKYPTIYHLRKKLVDSTDKADLRLIYLALAHMIKFRGHFLIEGDLNPDNSDVDKLFIQLVQTYNQLFEENPINASGVDAKAILSARLSKSRRLENLIAQLPGEKKNGLFGNLIALSLGLTPNFKSNFDLAEDAKLQLSKDTYDDDLDNLLAQIGDQYADLFLAAKNLSDAILLSDILRVNTEITKAPLSASMIKRYDEHHQDLTLLKALVRQQLPEKYKEIFFDQSKNGYAGYIDGGASQEEFYKFIKPILEKMDGTEELLVKLNREDLLRKQRTFDNGSIPHQIHLGELHAILRRQEDFYPFLKDNREKIEKILTFRIPYYVGPLARGNSRFAWMTRKSEETITPWNFEEVVDKGASAQSFIERMTNFDKNLPNEKVLPKHSLLYEYFTVYNELTKVKYVTEGMRKPAFLSGEQKKAIVDLLFKTNRKVTVKQLKEDYFKKIECFDSVEISGVEDRFNASLGTYHDLLKIIKDKDFLDNEENEDILEDIVLTLTLFEDREMIEERLKTYAHLFDDKVMKQLKRRRYTGWGRLSRKLINGIRDKQSGKTILDFLKSDGFANRNFMQLIHDDSLTFKEDIQKAQVSGQGDSLHEHIANLAGSPAIKKGILQTVKVVDELVKVMGRHKPENIVIEMARENQTTQKGQKNSRERMKRIEEGIKELGSQILKEHPVENTQLQNEKLYLYYLQNGRDMYVDQELDINRLSDYDVDHIVPQSFLKDDSIDNKVLTRSDKARGKSDNVPSEEVVKKMKNYWRQLLNAKLITQRKFDNLTKAERGGLSELDKAGFIKRQLVETRQITKHVAQILDSRMNTKYDENDKLIREVKVITLKSKLVSDFRKDFQFYKVREINNYHHAHDAYLNAVVGTALIKKYPKLESEFVYGDYKVYDVRKMIAKSEQEIGKATAKYFFYSNIMNFFKTEITLANGEIRKRPLIETNGETGEIVWDKGRDFATVRKVLSMPQVNIVKKTEVQTGGFSKESILPKRNSDKLIARKKDWDPKKYGGFDSPTVAYSVLVVAKVEKGKSKKLKSVKELLGITIMERSSFEKNPIDFLEAKGYKEVKKDLIIKLPKYSLFELENGRKRMLASAGELQKGNELALPSKYVNFLYLASHYEKLKGSPEDNEQKQLFVEQHKHYLDEIIEQISEFSKRVILADANLDKVLSAYNKHRDKPIREQAENIIHLFTLTNLGAPAAFKYFDTTIDRKRYTSTKEVLDATLIHQSITGLYETRIDLSQLGGDGGEAAAKGGGGGTLNIEDEYRLHETSKEPDVPLGSTWLSDFPQAWAETGGMGLAVRQAPLIIPLKATSTPVSIKQYPMSQEARLGIKPHIQRLLDQGILVPCQSPWNTPLLPVKKPGTNDYRPVQDLREVNKRVEDIHPTVPNPYNLLSGLPPSHQWYTVLDLKDAFFCLRLHPTSQPLFAFEWRDPEMGISGQLTWTRLPQGFKNSPTLFNEALHRDLADFRIQHPDLILLQYVDDLLLAATSEQDCQRGTRALLQTLGNLGYRASAKKAQICQKQVKYLGYLLKEGQRWLTEARKETVMGQPTPKTPRQLREFLGKAGFCRLFIPGFAEMAAPLYPLTKPGTLFNWGPDQQKAYQEIKQALLTAPALGLPDLTKPFELFVDEKQGYAKGVLTQKLGPWRRPVAYLSKKLDPVAAGWPPCLRMVAAIAVLTKDAGKLTMGQPLVILAPHAVEALVKQPPDRWLSNARMTHYQAMLLDTDRVQFGPVVALNPATLLPLPEKEAPHDCLEILAETHGTRPDLTDQPIPDADYTWYTDGSSFLQEGQRRAGAAVTTETEVIWARALPAGTSAQRAELIALTQALKMAEGKKLNVYTDSRYAFATAHVHGEIYRRRGWLTSEGREIKNKNEILALLKALFLPKRLSIIHCPGHQKGNSAEARGNRMADQAAREAAMKAVLETSTLLAGKRTADGSEFEKRTADGSEFESPKKKAKVE

SEQ ID NO: 1051 - protein, 2096 aa, synthetic construct
MPAAKRVKLDGGDKKYSIGLDIGTNSVGWAVITDEYKVPSKKFKVLGNTDRHSIKKNLIGALLFDSGETAEATRLKRTARRRYTRRKNRICYLQEIFSNEMAKVDDSFFHRLEESFLVEEDKKHERHPIFGNIVDEVAYHEKYPTIYHLRKKLVDSTDKADLRLIYLALAHMIKFRGHFLIEGDLNPDNSDVDKLFIQLVQTYNQLFEENPINASGVDAKAILSARLSKSRRLENLIAQLPGEKKNGLFGNLIALSLGLTPNFKSNFDLAEDAKLQLSKDTYDDDLDNLLAQIGDQYADLFLAAKNLSDAILLSDILRVNTEITKAPLSASMIKRYDEHHQDLTLLKALVRQQLPEKYKEIFFDQSKNGYAGYIDGGASQEEFYKFIKPILEKMDGTEELLVKLNREDLLRKQRTFDNGSIPHQIHLGELHAILRRQEDFYPFLKDNREKIEKILTFRIPYYVGPLARGNSRFAWMTRKSEETITPWNFEEVVDKGASAQSFIERMTNFDKNLPNEKVLPKHSLLYEYFTVYNELTKVKYVTEGMRKPAFLSGEQKKAIVDLLFKTNRKVTVKQLKEDYFKKIECFDSVEISGVEDRFNASLGTYHDLLKIIKDKDFLDNEENEDILEDIVLTLTLFEDREMIEERLKTYAHLFDDKVMKQLKRRRYTGWGRLSRKLINGIRDKQSGKTILDFLKSDGFANRNFMQLIHDDSLTFKEDIQKAQVSGQGDSLHEHIANLAGSPAIKKGILQTVKVVDELVKVMGRHKPENIVIEMARENQTTQKGQKNSRERMKRIEEGIKELGSQILKEHPVENTQLQNEKLYLYYLQNGRDMYVDQELDINRLSDYDVDHIVPQSFLKDDSIDNKVLTRSDKARGKSDNVPSEEVVKKMKNYWRQLLNAKLITQRKFDNLTKAERGGLSELDKAGFIKRQLVETRQITKHVAQILDSRMNTKYDENDKLIREVKVITLKSKLVSDFRKDFQFYKVREINNYHHAHDAYLNAVVGTALIKKYPKLESEFVYGDYKVYDVRKMIAKSEQEIGKATAKYFFYSNIMNFFKTEITLANGEIRKRPLIETNGETGEIVWDKGRDFATVRKVLSMPQVNIVKKTEVQTGGFSKESILPKRNSDKLIARKKDWDPKKYGGFDSPTVAYSVLVVAKVEKGKSKKLKSVKELLGITIMERSSFEKNPIDFLEAKGYKEVKKDLIIKLPKYSLFELENGRKRMLASAGELQKGNELALPSKYVNFLYLASHYEKLKGSPEDNEQKQLFVEQHKHYLDEIIEQISEFSKRVILADANLDKVLSAYNKHRDKPIREQAENIIHLFTLTNLGAPAAFKYFDTTIDRKRYTSTKEVLDATLIHQSITGLYETRIDLSQLGGDGGEAAAKGGSGGGGGTLNIEDEYRLHETSKEPDVPLGSTWLSDFPQAWAETGGMGLAVRQAPLIIPLKATSTPVSIKQYPMSQEARLGIKPHIQRLLDQGILVPCQSPWNTPLLPVKKPGTNDYRPVQDLREVNKRVEDIHPTVPNPYNLLSGLPPSHQWYTVLDLKDAFFCLRLHPTSQPLFAFEWRDPEMGISGQLTWTRLPQGFKNSPTLFNEALHRDLADFRIQHPDLILLQYVDDLLLAATSEQDCQRGTRALLQTLGNLGYRASAKKAQICQKQVKYLGYLLKEGQRWLTEARKETVMGQPTPKTPRQLREFLGKAGFCRLFIPGFAEMAAPLYPLTKPGTLFNWGPDQQKAYQEIKQALLTAPALGLPDLTKPFELFVDEKQGYAKGVLTQKLGPWRRPVAYLSKKLDPVAAGWPPCLRMVAAIAVLTKDAGKLTMGQPLVILAPHAVEALVKQPPDRWLSNARMTHYQAMLLDTDRVQFGPVVALNPATLLPLPEKEAPHDCLEILAETHGTRPDLTDQPIPDADYTWYTDGSSFLQEGQRRAGAAVTTETEVIWARALPAGTSAQRAELIALTQALKMAEGKKLNVYTDSRYAFATAHVHGEIYRRRGWLTSEGREIKNKNEILALLKALFLPKRLSIIHCPGHQKGNSAEARGNRMADQAAREAAMKAVLETSTLLAGKRTADGSEFEKRTADGSEFESPKKKAKVE

SEQ ID NO: 1052 - protein, 2115 aa, synthetic construct
MPAAKRVKLDGGDKKYSIGLDIGTNSVGWAVITDEYKVPSKKFKVLGNTDRHSIKKNLIGALLFDSGETAEATRLKRTARRRYTRRKNRICYLQEIFSNEMAKVDDSFFHRLEESFLVEEDKKHERHPIFGNIVDEVAYHEKYPTIYHLRKKLVDSTDKADLRLIYLALAHMIKFRGHFLIEGDLNPDNSDVDKLFIQLVQTYNQLFEENPINASGVDAKAILSARLSKSRRLENLIAQLPGEKKNGLFGNLIALSLGLTPNFKSNFDLAEDAKLQLSKDTYDDDLDNLLAQIGDQYADLFLAAKNLSDAILLSDILRVNTEITKAPLSASMIKRYDEHHQDLTLLKALVRQQLPEKYKEIFFDQSKNGYAGYIDGGASQEEFYKFIKPILEKMDGTEELLVKLNREDLLRKQRTFDNGSIPHQIHLGELHAILRRQEDFYPFLKDNREKIEKILTFRIPYYVGPLARGNSRFAWMTRKSEETITPWNFEEVVDKGASAQSFIERMTNFDKNLPNEKVLPKHSLLYEYFTVYNELTKVKYVTEGMRKPAFLSGEQKKAIVDLLFKTNRKVTVKQLKEDYFKKIECFDSVEISGVEDRFNASLGTYHDLLKIIKDKDFLDNEENEDILEDIVLTLTLFEDREMIEERLKTYAHLFDDKVMKQLKRRRYTGWGRLSRKLINGIRDKQSGKTILDFLKSDGFANRNFMQLIHDDSLTFKEDIQKAQVSGQGDSLHEHIANLAGSPAIKKGILQTVKVVDELVKVMGRHKPENIVIEMARENQTTQKGQKNSRERMKRIEEGIKELGSQILKEHPVENTQLQNEKLYLYYLQNGRDMYVDQELDINRLSDYDVDHIVPQSFLKDDSIDNKVLTRSDKARGKSDNVPSEEVVKKMKNYWRQLLNAKLITQRKFDNLTKAERGGLSELDKAGFIKRQLVETRQITKHVAQILDSRMNTKYDENDKLIREVKVITLKSKLVSDFRKDFQFYKVREINNYHHAHDAYLNAVVGTALIKKYPKLESEFVYGDYKVYDVRKMIAKSEQEIGKATAKYFFYSNIMNFFKTEITLANGEIRKRPLIETNGETGEIVWDKGRDFATVRKVLSMPQVNIVKKTEVQTGGFSKESILPKRNSDKLIARKKDWDPKKYGGFDSPTVAYSVLVVAKVEKGKSKKLKSVKELLGITIMERSSFEKNPIDFLEAKGYKEVKKDLIIKLPKYSLFELENGRKRMLASAGELQKGNELALPSKYVNFLYLASHYEKLKGSPEDNEQKQLFVEQHKHYLDEIIEQISEFSKRVILADANLDKVLSAYNKHRDKPIREQAENIIHLFTLTNLGAPAAFKYFDTTIDRKRYTSTKEVLDATLIHQSITGLYETRIDLSQLGGDGGEAAAKEAAAKEAAAKEAAAKEAAAKEAAAKGGTLNIEDEYRLHETSKEPDVPLGSTWLSDFPQAWAETGGMGLAVRQAPLIIPLKATSTPVSIKQYPMSQEARLGIKPHIQRLLDQGILVPCQSPWNTPLLPVKKPGTNDYRPVQDLREVNKRVEDIHPTVPNPYNLLSGLPPSHQWYTVLDLKDAFFCLRLHPTSQPLFAFEWRDPEMGISGQLTWTRLPQGFKNSPTLFNEALHRDLADFRIQHPDLILLQYVDDLLLAATSEQDCQRGTRALLQTLGNLGYRASAKKAQICQKQVKYLGYLLKEGQRWLTEARKETVMGQPTPKTPRQLREFLGKAGFCRLFIPGFAEMAAPLYPLTKPGTLFNWGPDQQKAYQEIKQALLTAPALGLPDLTKPFELFVDEKQGYAKGVLTQKLGPWRRPVAYLSKKLDPVAAGWPPCLRMVAAIAVLTKDAGKLTMGQPLVILAPHAVEALVKQPPDRWLSNARMTHYQAMLLDTDRVQFGPVVALNPATLLPLPEKEAPHDCLEILAETHGTRPDLTDQPIPDADYTWYTDGSSFLQEGQRRAGAAVTTETEVIWARALPAGTSAQRAELIALTQALKMAEGKKLNVYTDSRYAFATAHVHGEIYRRRGWLTSEGREIKNKNEILALLKALFLPKRLSIIHCPGHQKGNSAEARGNRMADQAAREAAMKAVLETSTLLAGKRTADGSEFEKRTADGSEFESPKKKAKVE

SEQ ID NO: 1053 - protein, 2096 aa, synthetic construct
MPAAKRVKLDGGDKKYSIGLDIGTNSVGWAVITDEYKVPSKKFKVLGNTDRHSIKKNLIGALLFDSGETAEATRLKRTARRRYTRRKNRICYLQEIFSNEMAKVDDSFFHRLEESFLVEEDKKHERHPIFGNIVDEVAYHEKYPTIYHLRKKLVDSTDKADLRLIYLALAHMIKFRGHFLIEGDLNPDNSDVDKLFIQLVQTYNQLFEENPINASGVDAKAILSARLSKSRRLENLIAQLPGEKKNGLFGNLIALSLGLTPNFKSNFDLAEDAKLQLSKDTYDDDLDNLLAQIGDQYADLFLAAKNLSDAILLSDILRVNTEITKAPLSASMIKRYDEHHQDLTLLKALVRQQLPEKYKEIFFDQSKNGYAGYIDGGASQEEFYKFIKPILEKMDGTEELLVKLNREDLLRKQRTFDNGSIPHQIHLGELHAILRRQEDFYPFLKDNREKIEKILTFRIPYYVGPLARGNSRFAWMTRKSEETITPWNFEEVVDKGASAQSFIERMTNFDKNLPNEKVLPKHSLLYEYFTVYNELTKVKYVTEGMRKPAFLSGEQKKAIVDLLFKTNRKVTVKQLKEDYFKKIECFDSVEISGVEDRFNASLGTYHDLLKIIKDKDFLDNEENEDILEDIVLTLTLFEDREMIEERLKTYAHLFDDKVMKQLKRRRYTGWGRLSRKLINGIRDKQSGKTILDFLKSDGFANRNFMQLIHDDSLTFKEDIQKAQVSGQGDSLHEHIANLAGSPAIKKGILQTVKVVDELVKVMGRHKPENIVIEMARENQTTQKGQKNSRERMKRIEEGIKELGSQILKEHPVENTQLQNEKLYLYYLQNGRDMYVDQELDINRLSDYDVDHIVPQSFLKDDSIDNKVLTRSDKARGKSDNVPSEEVVKKMKNYWRQLLNAKLITQRKFDNLTKAERGGLSELDKAGFIKRQLVETRQITKHVAQILDSRMNTKYDENDKLIREVKVITLKSKLVSDFRKDFQFYKVREINNYHHAHDAYLNAVVGTALIKKYPKLESEFVYGDYKVYDVRKMIAKSEQEIGKATAKYFFYSNIMNFFKTEITLANGEIRKRPLIETNGETGEIVWDKGRDFATVRKVLSMPQVNIVKKTEVQTGGFSKESILPKRNSDKLIARKKDWDPKKYGGFDSPTVAYSVLVVAKVEKGKSKKLKSVKELLGITIMERSSFEKNPIDFLEAKGYKEVKKDLIIKLPKYSLFELENGRKRMLASAGELQKGNELALPSKYVNFLYLASHYEKLKGSPEDNEQKQLFVEQHKHYLDEIIEQISEFSKRVILADANLDKVLSAYNKHRDKPIREQAENIIHLFTLTNLGAPAAFKYFDTTIDRKRYTSTKEVLDATLIHQSITGLYETRIDLSQLGGDGGGGGGSSEAAAKGGTLNIEDEYRLHETSKEPDVPLGSTWLSDFPQAWAETGGMGLAVRQAPLIIPLKATSTPVSIKQYPMSQEARLGIKPHIQRLLDQGILVPCQSPWNTPLLPVKKPGTNDYRPVQDLREVNKRVEDIHPTVPNPYNLLSGLPPSHQWYTVLDLKDAFFCLRLHPTSQPLFAFEWRDPEMGISGQLTWTRLPQGFKNSPTLFNEALHRDLADFRIQHPDLILLQYVDDLLLAATSEQDCQRGTRALLQTLGNLGYRASAKKAQICQKQVKYLGYLLKEGQRWLTEARKETVMGQPTPKTPRQLREFLGKAGFCRLFIPGFAEMAAPLYPLTKPGTLFNWGPDQQKAYQEIKQALLTAPALGLPDLTKPFELFVDEKQGYAKGVLTQKLGPWRRPVAYLSKKLDPVAAGWPPCLRMVAAIAVLTKDAGKLTMGQPLVILAPHAVEALVKQPPDRWLSNARMTHYQAMLLDTDRVQFGPVVALNPATLLPLPEKEAPHDCLEILAETHGTRPDLTDQPIPDADYTWYTDGSSFLQEGQRRAGAAVTTETEVIWARALPAGTSAQRAELIALTQALKMAEGKKLNVYTDSRYAFATAHVHGEIYRRRGWLTSEGREIKNKNEILALLKALFLPKRLSIIHCPGHQKGNSAEARGNRMADQAAREAAMKAVLETSTLLAGKRTADGSEFEKRTADGSEFESPKKKAKVE

SEQ ID NO: 1054 - protein, 2096 aa, synthetic construct
MPAAKRVKLDGGDKKYSIGLDIGTNSVGWAVITDEYKVPSKKFKVLGNTDRHSIKKNLIGALLFDSGETAEATRLKRTARRRYTRRKNRICYLQEIFSNEMAKVDDSFFHRLEESFLVEEDKKHERHPIFGNIVDEVAYHEKYPTIYHLRKKLVDSTDKADLRLIYLALAHMIKFRGHFLIEGDLNPDNSDVDKLFIQLVQTYNQLFEENPINASGVDAKAILSARLSKSRRLENLIAQLPGEKKNGLFGNLIALSLGLTPNFKSNFDLAEDAKLQLSKDTYDDDLDNLLAQIGDQYADLFLAAKNLSDAILLSDILRVNTEITKAPLSASMIKRYDEHHQDLTLLKALVRQQLPEKYKEIFFDQSKNGYAGYIDGGASQEEFYKFIKPILEKMDGTEELLVKLNREDLLRKQRTFDNGSIPHQIHLGELHAILRRQEDFYPFLKDNREKIEKILTFRIPYYVGPLARGNSRFAWMTRKSEETITPWNFEEVVDKGASAQSFIERMTNFDKNLPNEKVLPKHSLLYEYFTVYNELTKVKYVTEGMRKPAFLSGEQKKAIVDLLFKTNRKVTVKQLKEDYFKKIECFDSVEISGVEDRFNASLGTYHDLLKIIKDKDFLDNEENEDILEDIVLTLTLFEDREMIEERLKTYAHLFDDKVMKQLKRRRYTGWGRLSRKLINGIRDKQSGKTILDFLKSDGFANRNFMQLIHDDSLTFKEDIQKAQVSGQGDSLHEHIANLAGSPAIKKGILQTVKVVDELVKVMGRHKPENIVIEMARENQTTQKGQKNSRERMKRIEEGIKELGSQILKEHPVENTQLQNEKLYLYYLQNGRDMYVDQELDINRLSDYDVDHIVPQSFLKDDSIDNKVLTRSDKARGKSDNVPSEEVVKKMKNYWRQLLNAKLITQRKFDNLTKAERGGLSELDKAGFIKRQLVETRQITKHVAQILDSRMNTKYDENDKLIREVKVITLKSKLVSDFRKDFQFYKVREINNYHHAHDAYLNAVVGTALIKKYPKLESEFVYGDYKVYDVRKMIAKSEQEIGKATAKYFFYSNIMNFFKTEITLANGEIRKRPLIETNGETGEIVWDKGRDFATVRKVLSMPQVNIVKKTEVQTGGFSKESILPKRNSDKLIARKKDWDPKKYGGFDSPTVAYSVLVVAKVEKGKSKKLKSVKELLGITIMERSSFEKNPIDFLEAKGYKEVKKDLIIKLPKYSLFELENGRKRMLASAGELQKGNELALPSKYVNFLYLASHYEKLKGSPEDNEQKQLFVEQHKHYLDEIIEQISEFSKRVILADANLDKVLSAYNKHRDKPIREQAENIIHLFTLTNLGAPAAFKYFDTTIDRKRYTSTKEVLDATLIHQSITGLYETRIDLSQLGGDGGGSSGGGEAAAKGGTLNIEDEYRLHETSKEPDVPLGSTWLSDFPQAWAETGGMGLAVRQAPLIIPLKATSTPVSIKQYPMSQEARLGIKPHIQRLLDQGILVPCQSPWNTPLLPVKKPGTNDYRPVQDLREVNKRVEDIHPTVPNPYNLLSGLPPSHQWYTVLDLKDAFFCLRLHPTSQPLFAFEWRDPEMGISGQLTWTRLPQGFKNSPTLFNEALHRDLADFRIQHPDLILLQYVDDLLLAATSEQDCQRGTRALLQTLGNLGYRASAKKAQICQKQVKYLGYLLKEGQRWLTEARKETVMGQPTPKTPRQLREFLGKAGFCRLFIPGFAEMAAPLYPLTKPGTLFNWGPDQQKAYQEIKQALLTAPALGLPDLTKPFELFVDEKQGYAKGVLTQKLGPWRRPVAYLSKKLDPVAAGWPPCLRMVAAIAVLTKDAGKLTMGQPLVILAPHAVEALVKQPPDRWLSNARMTHYQAMLLDTDRVQFGPVVALNPATLLPLPEKEAPHDCLEILAETHGTRPDLTDQPIPDADYTWYTDGSSFLQEGQRRAGAAVTTETEVIWARALPAGTSAQRAELIALTQALKMAEGKKLNVYTDSRYAFATAHVHGEIYRRRGWLTSEGREIKNKNEILALLKALFLPKRLSIIHCPGHQKGNSAEARGNRMADQAAREAAMKAVLETSTLLAGKRTADGSEFEKRTADGSEFESPKKKAKVE

SEQ ID NO: 1055 - protein, 2094 aa, synthetic construct
MPAAKRVKLDGGDKKYSIGLDIGTNSVGWAVITDEYKVPSKKFKVLGNTDRHSIKKNLIGALLFDSGETAEATRLKRTARRRYTRRKNRICYLQEIFSNEMAKVDDSFFHRLEESFLVEEDKKHERHPIFGNIVDEVAYHEKYPTIYHLRKKLVDSTDKADLRLIYLALAHMIKFRGHFLIEGDLNPDNSDVDKLFIQLVQTYNQLFEENPINASGVDAKAILSARLSKSRRLENLIAQLPGEKKNGLFGNLIALSLGLTPNFKSNFDLAEDAKLQLSKDTYDDDLDNLLAQIGDQYADLFLAAKNLSDAILLSDILRVNTEITKAPLSASMIKRYDEHHQDLTLLKALVRQQLPEKYKEIFFDQSKNGYAGYIDGGASQEEFYKFIKPILEKMDGTEELLVKLNREDLLRKQRTFDNGSIPHQIHLGELHAILRRQEDFYPFLKDNREKIEKILTFRIPYYVGPLARGNSRFAWMTRKSEETITPWNFEEVVDKGASAQSFIERMTNFDKNLPNEKVLPKHSLLYEYFTVYNELTKVKYVTEGMRKPAFLSGEQKKAIVDLLFKTNRKVTVKQLKEDYFKKIECFDSVEISGVEDRFNASLGTYHDLLKIIKDKDFLDNEENEDILEDIVLTLTLFEDREMIEERLKTYAHLFDDKVMKQLKRRRYTGWGRLSRKLINGIRDKQSGKTILDFLKSDGFANRNFMQLIHDDSLTFKEDIQKAQVSGQGDSLHEHIANLAGSPAIKKGILQTVKVVDELVKVMGRHKPENIVIEMARENQTTQKGQKNSRERMKRIEEGIKELGSQILKEHPVENTQLQNEKLYLYYLQNGRDMYVDQELDINRLSDYDVDHIVPQSFLKDDSIDNKVLTRSDKARGKSDNVPSEEVVKKMKNYWRQLLNAKLITQRKFDNLTKAERGGLSELDKAGFIKRQLVETRQITKHVAQILDSRMNTKYDENDKLIREVKVITLKSKLVSDFRKDFQFYKVREINNYHHAHDAYLNAVVGTALIKKYPKLESEFVYGDYKVYDVRKMIAKSEQEIGKATAKYFFYSNIMNFFKTEITLANGEIRKRPLIETNGETGEIVWDKGRDFATVRKVLSMPQVNIVKKTEVQTGGFSKESILPKRNSDKLIARKKDWDPKKYGGFDSPTVAYSVLVVAKVEKGKSKKLKSVKELLGITIMERSSFEKNPIDFLEAKGYKEVKKDLIIKLPKYSLFELENGRKRMLASAGELQKGNELALPSKYVNFLYLASHYEKLKGSPEDNEQKQLFVEQHKHYLDEIIEQISEFSKRVILADANLDKVLSAYNKHRDKPIREQAENIIHLFTLTNLGAPAAFKYFDTTIDRKRYTSTKEVLDATLIHQSITGLYETRIDLSQLGGDGGGGSPAPGGGGGTLNIEDEYRLHETSKEPDVPLGSTWLSDFPQAWAETGGMGLAVRQAPLIIPLKATSTPVSIKQYPMSQEARLGIKPHIQRLLDQGILVPCQSPWNTPLLPVKKPGTNDYRPVQDLREVNKRVEDIHPTVPNPYNLLSGLPPSHQWYTVLDLKDAFFCLRLHPTSQPLFAFEWRDPEMGISGQLTWTRLPQGFKNSPTLFNEALHRDLADFRIQHPDLILLQYVDDLLLAATSEQDCQRGTRALLQTLGNLGYRASAKKAQICQKQVKYLGYLLKEGQRWLTEARKETVMGQPTPKTPRQLREFLGKAGFCRLFIPGFAEMAAPLYPLTKPGTLFNWGPDQQKAYQEIKQALLTAPALGLPDLTKPFELFVDEKQGYAKGVLTQKLGPWRRPVAYLSKKLDPVAAGWPPCLRMVAAIAVLTKDAGKLTMGQPLVILAPHAVEALVKQPPDRWLSNARMTHYQAMLLDTDRVQFGPVVALNPATLLPLPEKEAPHDCLEILAETHGTRPDLTDQPIPDADYTWYTDGSSFLQEGQRRAGAAVTTETEVIWARALPAGTSAQRAELIALTQALKMAEGKKLNVYTDSRYAFATAHVHGEIYRRRGWLTSEGREIKNKNEILALLKALFLPKRLSIIHCPGHQKGNSAEARGNRMADQAAREAAMKAVLETSTLLAGKRTADGSEFEKRTADGSEFESPKKKAKVE

SEQ ID NO: 1056 - protein, 2096 aa, synthetic construct
MPAAKRVKLDGGDKKYSIGLDIGTNSVGWAVITDEYKVPSKKFKVLGNTDRHSIKKNLIGALLFDSGETAEATRLKRTARRRYTRRKNRICYLQEIFSNEMAKVDDSFFHRLEESFLVEEDKKHERHPIFGNIVDEVAYHEKYPTIYHLRKKLVDSTDKADLRLIYLALAHMIKFRGHFLIEGDLNPDNSDVDKLFIQLVQTYNQLFEENPINASGVDAKAILSARLSKSRRLENLIAQLPGEKKNGLFGNLIALSLGLTPNFKSNFDLAEDAKLQLSKDTYDDDLDNLLAQIGDQYADLFLAAKNLSDAILLSDILRVNTEITKAPLSASMIKRYDEHHQDLTLLKALVRQQLPEKYKEIFFDQSKNGYAGYIDGGASQEEFYKFIKPILEKMDGTEELLVKLNREDLLRKQRTFDNGSIPHQIHLGELHAILRRQEDFYPFLKDNREKIEKILTFRIPYYVGPLARGNSRFAWMTRKSEETITPWNFEEVVDKGASAQSFIERMTNFDKNLPNEKVLPKHSLLYEYFTVYNELTKVKYVTEGMRKPAFLSGEQKKAIVDLLFKTNRKVTVKQLKEDYFKKIECFDSVEISGVEDRFNASLGTYHDLLKIIKDKDFLDNEENEDILEDIVLTLTLFEDREMIEERLKTYAHLFDDKVMKQLKRRRYTGWGRLSRKLINGIRDKQSGKTILDFLKSDGFANRNFMQLIHDDSLTFKEDIQKAQVSGQGDSLHEHIANLAGSPAIKKGILQTVKVVDELVKVMGRHKPENIVIEMARENQTTQKGQKNSRERMKRIEEGIKELGSQILKEHPVENTQLQNEKLYLYYLQNGRDMYVDQELDINRLSDYDVDHIVPQSFLKDDSIDNKVLTRSDKARGKSDNVPSEEVVKKMKNYWRQLLNAKLITQRKFDNLTKAERGGLSELDKAGFIKRQLVETRQITKHVAQILDSRMNTKYDENDKLIREVKVITLKSKLVSDFRKDFQFYKVREINNYHHAHDAYLNAVVGTALIKKYPKLESEFVYGDYKVYDVRKMIAKSEQEIGKATAKYFFYSNIMNFFKTEITLANGEIRKRPLIETNGETGEIVWDKGRDFATVRKVLSMPQVNIVKKTEVQTGGFSKESILPKRNSDKLIARKKDWDPKKYGGFDSPTVAYSVLVVAKVEKGKSKKLKSVKELLGITIMERSSFEKNPIDFLEAKGYKEVKKDLIIKLPKYSLFELENGRKRMLASAGELQKGNELALPSKYVNFLYLASHYEKLKGSPEDNEQKQLFVEQHKHYLDEIIEQISEFSKRVILADANLDKVLSAYNKHRDKPIREQAENIIHLFTLTNLGAPAAFKYFDTTIDRKRYTSTKEVLDATLIHQSITGLYETRIDLSQLGGDGGEAAAKGGGGSSGGTLNIEDEYRLHETSKEPDVPLGSTWLSDFPQAWAETGGMGLAVRQAPLIIPLKATSTPVSIKQYPMSQEARLGIKPHIQRLLDQGILVPCQSPWNTPLLPVKKPGTNDYRPVQDLREVNKRVEDIHPTVPNPYNLLSGLPPSHQWYTVLDLKDAFFCLRLHPTSQPLFAFEWRDPEMGISGQLTWTRLPQGFKNSPTLFNEALHRDLADFRIQHPDLILLQYVDDLLLAATSEQDCQRGTRALLQTLGNLGYRASAKKAQICQKQVKYLGYLLKEGQRWLTEARKETVMGQPTPKTPRQLREFLGKAGFCRLFIPGFAEMAAPLYPLTKPGTLFNWGPDQQKAYQEIKQALLTAPALGLPDLTKPFELFVDEKQGYAKGVLTQKLGPWRRPVAYLSKKLDPVAAGWPPCLRMVAAIAVLTKDAGKLTMGQPLVILAPHAVEALVKQPPDRWLSNARMTHYQAMLLDTDRVQFGPVVALNPATLLPLPEKEAPHDCLEILAETHGTRPDLTDQPIPDADYTWYTDGSSFLQEGQRRAGAAVTTETEVIWARALPAGTSAQRAELIALTQALKMAEGKKLNVYTDSRYAFATAHVHGEIYRRRGWLTSEGREIKNKNEILALLKALFLPKRLSIIHCPGHQKGNSAEARGNRMADQAAREAAMKAVLETSTLLAGKRTADGSEFEKRTADGSEFESPKKKAKVE

SEQ ID NO: 1057 - protein, 2089 aa, synthetic construct
MPAAKRVKLDGGDKKYSIGLDIGTNSVGWAVITDEYKVPSKKFKVLGNTDRHSIKKNLIGALLFDSGETAEATRLKRTARRRYTRRKNRICYLQEIFSNEMAKVDDSFFHRLEESFLVEEDKKHERHPIFGNIVDEVAYHEKYPTIYHLRKKLVDSTDKADLRLIYLALAHMIKFRGHFLIEGDLNPDNSDVDKLFIQLVQTYNQLFEENPINASGVDAKAILSARLSKSRRLENLIAQLPGEKKNGLFGNLIALSLGLTPNFKSNFDLAEDAKLQLSKDTYDDDLDNLLAQIGDQYADLFLAAKNLSDAILLSDILRVNTEITKAPLSASMIKRYDEHHQDLTLLKALVRQQLPEKYKEIFFDQSKNGYAGYIDGGASQEEFYKFIKPILEKMDGTEELLVKLNREDLLRKQRTFDNGSIPHQIHLGELHAILRRQEDFYPFLKDNREKIEKILTFRIPYYVGPLARGNSRFAWMTRKSEETITPWNFEEVVDKGASAQSFIERMTNFDKNLPNEKVLPKHSLLYEYFTVYNELTKVKYVTEGMRKPAFLSGEQKKAIVDLLFKTNRKVTVKQLKEDYFKKIECFDSVEISGVEDRFNASLGTYHDLLKIIKDKDFLDNEENEDILEDIVLTLTLFEDREMIEERLKTYAHLFDDKVMKQLKRRRYTGWGRLSRKLINGIRDKQSGKTILDFLKSDGFANRNFMQLIHDDSLTFKEDIQKAQVSGQGDSLHEHIANLAGSPAIKKGILQTVKVVDELVKVMGRHKPENIVIEMARENQTTQKGQKNSRERMKRIEEGIKELGSQILKEHPVENTQLQNEKLYLYYLQNGRDMYVDQELDINRLSDYDVDHIVPQSFLKDDSIDNKVLTRSDKARGKSDNVPSEEVVKKMKNYWRQLLNAKLITQRKFDNLTKAERGGLSELDKAGFIKRQLVETRQITKHVAQILDSRMNTKYDENDKLIREVKVITLKSKLVSDFRKDFQFYKVREINNYHHAHDAYLNAVVGTALIKKYPKLESEFVYGDYKVYDVRKMIAKSEQEIGKATAKYFFYSNIMNFFKTEITLANGEIRKRPLIETNGETGEIVWDKGRDFATVRKVLSMPQVNIVKKTEVQTGGFSKESILPKRNSDKLIARKKDWDPKKYGGFDSPTVAYSVLVVAKVEKGKSKKLKSVKELLGITIMERSSFEKNPIDFLEAKGYKEVKKDLIIKLPKYSLFELENGRKRMLASAGELQKGNELALPSKYVNFLYLASHYEKLKGSPEDNEQKQLFVEQHKHYLDEIIEQISEFSKRVILADANLDKVLSAYNKHRDKPIREQAENIIHLFTLTNLGAPAAFKYFDTTIDRKRYTSTKEVLDATLIHQSITGLYETRIDLSQLGGDGGGGGGGGTLNIEDEYRLHETSKEPDVPLGSTWLSDFPQAWAETGGMGLAVRQAPLIIPLKATSTPVSIKQYPMSQEARLGIKPHIQRLLDQGILVPCQSPWNTPLLPVKKPGTNDYRPVQDLREVNKRVEDIHPTVPNPYNLLSGLPPSHQWYTVLDLKDAFFCLRLHPTSQPLFAFEWRDPEMGISGQLTWTRLPQGFKNSPTLFNEALHRDLADFRIQHPDLILLQYVDDLLLAATSEQDCQRGTRALLQTLGNLGYRASAKKAQICQKQVKYLGYLLKEGQRWLTEARKETVMGQPTPKTPRQLREFLGKAGFCRLFIPGFAEMAAPLYPLTKPGTLFNWGPDQQKAYQEIKQALLTAPALGLPDLTKPFELFVDEKQGYAKGVLTQKLGPWRRPVAYLSKKLDPVAAGWPPCLRMVAAIAVLTKDAGKLTMGQPLVILAPHAVEALVKQPPDRWLSNARMTHYQAMLLDTDRVQFGPVVALNPATLLPLPEKEAPHDCLEILAETHGTRPDLTDQPIPDADYTWYTDGSSFLQEGQRRAGAAVTTETEVIWARALPAGTSAQRAELIALTQALKMAEGKKLNVYTDSRYAFATAHVHGEIYRRRGWLTSEGREIKNKNEILALLKALFLPKRLSIIHCPGHQKGNSAEARGNRMADQAAREAAMKAVLETSTLLAGKRTADGSEFEKRTADGSEFESPKKKAKVE

SEQ ID NO: 1058 - protein, 2096 aa, synthetic construct
MPAAKRVKLDGGDKKYSIGLDIGTNSVGWAVITDEYKVPSKKFKVLGNTDRHSIKKNLIGALLFDSGETAEATRLKRTARRRYTRRKNRICYLQEIFSNEMAKVDDSFFHRLEESFLVEEDKKHERHPIFGNIVDEVAYHEKYPTIYHLRKKLVDSTDKADLRLIYLALAHMIKFRGHFLIEGDLNPDNSDVDKLFIQLVQTYNQLFEENPINASGVDAKAILSARLSKSRRLENLIAQLPGEKKNGLFGNLIALSLGLTPNFKSNFDLAEDAKLQLSKDTYDDDLDNLLAQIGDQYADLFLAAKNLSDAILLSDILRVNTEITKAPLSASMIKRYDEHHQDLTLLKALVRQQLPEKYKEIFFDQSKNGYAGYIDGGASQEEFYKFIKPILEKMDGTEELLVKLNREDLLRKQRTFDNGSIPHQIHLGELHAILRRQEDFYPFLKDNREKIEKILTFRIPYYVGPLARGNSRFAWMTRKSEETITPWNFEEVVDKGASAQSFIERMTNFDKNLPNEKVLPKHSLLYEYFTVYNELTKVKYVTEGMRKPAFLSGEQKKAIVDLLFKTNRKVTVKQLKEDYFKKIECFDSVEISGVEDRFNASLGTYHDLLKIIKDKDFLDNEENEDILEDIVLTLTLFEDREMIEERLKTYAHLFDDKVMKQLKRRRYTGWGRLSRKLINGIRDKQSGKTILDFLKSDGFANRNFMQLIHDDSLTFKEDIQKAQVSGQGDSLHEHIANLAGSPAIKKGILQTVKVVDELVKVMGRHKPENIVIEMARENQTTQKGQKNSRERMKRIEEGIKELGSQILKEHPVENTQLQNEKLYLYYLQNGRDMYVDQELDINRLSDYDVDHIVPQSFLKDDSIDNKVLTRSDKARGKSDNVPSEEVVKKMKNYWRQLLNAKLITQRKFDNLTKAERGGLSELDKAGFIKRQLVETRQITKHVAQILDSRMNTKYDENDKLIREVKVITLKSKLVSDFRKDFQFYKVREINNYHHAHDAYLNAVVGTALIKKYPKLESEFVYGDYKVYDVRKMIAKSEQEIGKATAKYFFYSNIMNFFKTEITLANGEIRKRPLIETNGETGEIVWDKGRDFATVRKVLSMPQVNIVKKTEVQTGGFSKESILPKRNSDKLIARKKDWDPKKYGGFDSPTVAYSVLVVAKVEKGKSKKLKSVKELLGITIMERSSFEKNPIDFLEAKGYKEVKKDLIIKLPKYSLFELENGRKRMLASAGELQKGNELALPSKYVNFLYLASHYEKLKGSPEDNEQKQLFVEQHKHYLDEIIEQISEFSKRVILADANLDKVLSAYNKHRDKPIREQAENIIHLFTLTNLGAPAAFKYFDTTIDRKRYTSTKEVLDATLIHQSITGLYETRIDLSQLGGDGGEAAAKGGGPAPGGTLNIEDEYRLHETSKEPDVPLGSTWLSDFPQAWAETGGMGLAVRQAPLIIPLKATSTPVSIKQYPMSQEARLGIKPHIQRLLDQGILVPCQSPWNTPLLPVKKPGTNDYRPVQDLREVNKRVEDIHPTVPNPYNLLSGLPPSHQWYTVLDLKDAFFCLRLHPTSQPLFAFEWRDPEMGISGQLTWTRLPQGFKNSPTLFNEALHRDLADFRIQHPDLILLQYVDDLLLAATSEQDCQRGTRALLQTLGNLGYRASAKKAQICQKQVKYLGYLLKEGQRWLTEARKETVMGQPTPKTPRQLREFLGKAGFCRLFIPGFAEMAAPLYPLTKPGTLFNWGPDQQKAYQEIKQALLTAPALGLPDLTKPFELFVDEKQGYAKGVLTQKLGPWRRPVAYLSKKLDPVAAGWPPCLRMVAAIAVLTKDAGKLTMGQPLVILAPHAVEALVKQPPDRWLSNARMTHYQAMLLDTDRVQFGPVVALNPATLLPLPEKEAPHDCLEILAETHGTRPDLTDQPIPDADYTWYTDGSSFLQEGQRRAGAAVTTETEVIWARALPAGTSAQRAELIALTQALKMAEGKKLNVYTDSRYAFATAHVHGEIYRRRGWLTSEGREIKNKNEILALLKALFLPKRLSIIHCPGHQKGNSAEARGNRMADQAAREAAMKAVLETSTLLAGKRTADGSEFEKRTADGSEFESPKKKAKVE

SEQ ID NO: 1059 - protein, 2096 aa, synthetic construct
MPAAKRVKLDGGDKKYSIGLDIGTNSVGWAVITDEYKVPSKKFKVLGNTDRHSIKKNLIGALLFDSGETAEATRLKRTARRRYTRRKNRICYLQEIFSNEMAKVDDSFFHRLEESFLVEEDKKHERHPIFGNIVDEVAYHEKYPTIYHLRKKLVDSTDKADLRLIYLALAHMIKFRGHFLIEGDLNPDNSDVDKLFIQLVQTYNQLFEENPINASGVDAKAILSARLSKSRRLENLIAQLPGEKKNGLFGNLIALSLGLTPNFKSNFDLAEDAKLQLSKDTYDDDLDNLLAQIGDQYADLFLAAKNLSDAILLSDILRVNTEITKAPLSASMIKRYDEHHQDLTLLKALVRQQLPEKYKEIFFDQSKNGYAGYIDGGASQEEFYKFIKPILEKMDGTEELLVKLNREDLLRKQRTFDNGSIPHQIHLGELHAILRRQEDFYPFLKDNREKIEKILTFRIPYYVGPLARGNSRFAWMTRKSEETITPWNFEEVVDKGASAQSFIERMTNFDKNLPNEKVLPKHSLLYEYFTVYNELTKVKYVTEGMRKPAFLSGEQKKAIVDLLFKTNRKVTVKQLKEDYFKKIECFDSVEISGVEDRFNASLGTYHDLLKIIKDKDFLDNEENEDILEDIVLTLTLFEDREMIEERLKTYAHLFDDKVMKQLKRRRYTGWGRLSRKLINGIRDKQSGKTILDFLKSDGFANRNFMQLIHDDSLTFKEDIQKAQVSGQGDSLHEHIANLAGSPAIKKGILQTVKVVDELVKVMGRHKPENIVIEMARENQTTQKGQKNSRERMKRIEEGIKELGSQILKEHPVENTQLQNEKLYLYYLQNGRDMYVDQELDINRLSDYDVDHIVPQSFLKDDSIDNKVLTRSDKARGKSDNVPSEEVVKKMKNYWRQLLNAKLITQRKFDNLTKAERGGLSELDKAGFIKRQLVETRQITKHVAQILDSRMNTKYDENDKLIREVKVITLKSKLVSDFRKDFQFYKVREINNYHHAHDAYLNAVVGTALIKKYPKLESEFVYGDYKVYDVRKMIAKSEQEIGKATAKYFFYSNIMNFFKTEITLANGEIRKRPLIETNGETGEIVWDKGRDFATVRKVLSMPQVNIVKKTEVQTGGFSKESILPKRNSDKLIARKKDWDPKKYGGFDSPTVAYSVLVVAKVEKGKSKKLKSVKELLGITIMERSSFEKNPIDFLEAKGYKEVKKDLIIKLPKYSLFELENGRKRMLASAGELQKGNELALPSKYVNFLYLASHYEKLKGSPEDNEQKQLFVEQHKHYLDEIIEQISEFSKRVILADANLDKVLSAYNKHRDKPIREQAENIIHLFTLTNLGAPAAFKYFDTTIDRKRYTSTKEVLDATLIHQSITGLYETRIDLSQLGGDGGGGSGSSEAAAKGGTLNIEDEYRLHETSKEPDVPLGSTWLSDFPQAWAETGGMGLAVRQAPLIIPLKATSTPVSIKQYPMSQEARLGIKPHIQRLLDQGILVPCQSPWNTPLLPVKKPGTNDYRPVQDLREVNKRVEDIHPTVPNPYNLLSGLPPSHQWYTVLDLKDAFFCLRLHPTSQPLFAFEWRDPEMGISGQLTWTRLPQGFKNSPTLFNEALHRDLADFRIQHPDLILLQYVDDLLLAATSEQDCQRGTRALLQTLGNLGYRASAKKAQICQKQVKYLGYLLKEGQRWLTEARKETVMGQPTPKTPRQLREFLGKAGFCRLFIPGFAEMAAPLYPLTKPGTLFNWGPDQQKAYQEIKQALLTAPALGLPDLTKPFELFVDEKQGYAKGVLTQKLGPWRRPVAYLSKKLDPVAAGWPPCLRMVAAIAVLTKDAGKLTMGQPLVILAPHAVEALVKQPPDRWLSNARMTHYQAMLLDTDRVQFGPVVALNPATLLPLPEKEAPHDCLEILAETHGTRPDLTDQPIPDADYTWYTDGSSFLQEGQRRAGAAVTTETEVIWARALPAGTSAQRAELIALTQALKMAEGKKLNVYTDSRYAFATAHVHGEIYRRRGWLTSEGREIKNKNEILALLKALFLPKRLSIIHCPGHQKGNSAEARGNRMADQAAREAAMKAVLETSTLLAGKRTADGSEFEKRTADGSEFESPKKKAKVE

SEQ ID NO: 1060 - protein, 2096 aa, synthetic construct
MPAAKRVKLDGGDKKYSIGLDIGTNSVGWAVITDEYKVPSKKFKVLGNTDRHSIKKNLIGALLFDSGETAEATRLKRTARRRYTRRKNRICYLQEIFSNEMAKVDDSFFHRLEESFLVEEDKKHERHPIFGNIVDEVAYHEKYPTIYHLRKKLVDSTDKADLRLIYLALAHMIKFRGHFLIEGDLNPDNSDVDKLFIQLVQTYNQLFEENPINASGVDAKAILSARLSKSRRLENLIAQLPGEKKNGLFGNLIALSLGLTPNFKSNFDLAEDAKLQLSKDTYDDDLDNLLAQIGDQYADLFLAAKNLSDAILLSDILRVNTEITKAPLSASMIKRYDEHHQDLTLLKALVRQQLPEKYKEIFFDQSKNGYAGYIDGGASQEEFYKFIKPILEKMDGTEELLVKLNREDLLRKQRTFDNGSIPHQIHLGELHAILRRQEDFYPFLKDNREKIEKILTFRIPYYVGPLARGNSRFAWMTRKSEETITPWNFEEVVDKGASAQSFIERMTNFDKNLPNEKVLPKHSLLYEYFTVYNELTKVKYVTEGMRKPAFLSGEQKKAIVDLLFKTNRKVTVKQLKEDYFKKIECFDSVEISGVEDRFNASLGTYHDLLKIIKDKDFLDNEENEDILEDIVLTLTLFEDREMIEERLKTYAHLFDDKVMKQLKRRRYTGWGRLSRKLINGIRDKQSGKTILDFLKSDGFANRNFMQLIHDDSLTFKEDIQKAQVSGQGDSLHEHIANLAGSPAIKKGILQTVKVVDELVKVMGRHKPENIVIEMARENQTTQKGQKNSRERMKRIEEGIKELGSQILKEHPVENTQLQNEKLYLYYLQNGRDMYVDQELDINRLSDYDVDHIVPQSFLKDDSIDNKVLTRSDKARGKSDNVPSEEVVKKMKNYWRQLLNAKLITQRKFDNLTKAERGGLSELDKAGFIKRQLVETRQITKHVAQILDSRMNTKYDENDKLIREVKVITLKSKLVSDFRKDFQFYKVREINNYHHAHDAYLNAVVGTALIKKYPKLESEFVYGDYKVYDVRKMIAKSEQEIGKATAKYFFYSNIMNFFKTEITLANGEIRKRPLIETNGETGEIVWDKGRDFATVRKVLSMPQVNIVKKTEVQTGGFSKESILPKRNSDKLIARKKDWDPKKYGGFDSPTVAYSVLVVAKVEKGKSKKLKSVKELLGITIMERSSFEKNPIDFLEAKGYKEVKKDLIIKLPKYSLFELENGRKRMLASAGELQKGNELALPSKYVNFLYLASHYEKLKGSPEDNEQKQLFVEQHKHYLDEIIEQISEFSKRVILADANLDKVLSAYNKHRDKPIREQAENIIHLFTLTNLGAPAAFKYFDTTIDRKRYTSTKEVLDATLIHQSITGLYETRIDLSQLGGDGGGSSGGSEAAAKGGTLNIEDEYRLHETSKEPDVPLGSTWLSDFPQAWAETGGMGLAVRQAPLIIPLKATSTPVSIKQYPMSQEARLGIKPHIQRLLDQGILVPCQSPWNTPLLPVKKPGTNDYRPVQDLREVNKRVEDIHPTVPNPYNLLSGLPPSHQWYTVLDLKDAFFCLRLHPTSQPLFAFEWRDPEMGISGQLTWTRLPQGFKNSPTLFNEALHRDLADFRIQHPDLILLQYVDDLLLAATSEQDCQRGTRALLQTLGNLGYRASAKKAQICQKQVKYLGYLLKEGQRWLTEARKETVMGQPTPKTPRQLREFLGKAGFCRLFIPGFAEMAAPLYPLTKPGTLFNWGPDQQKAYQEIKQALLTAPALGLPDLTKPFELFVDEKQGYAKGVLTQKLGPWRRPVAYLSKKLDPVAAGWPPCLRMVAAIAVLTKDAGKLTMGQPLVILAPHAVEALVKQPPDRWLSNARMTHYQAMLLDTDRVQFGPVVALNPATLLPLPEKEAPHDCLEILAETHGTRPDLTDQPIPDADYTWYTDGSSFLQEGQRRAGAAVTTETEVIWARALPAGTSAQRAELIALTQALKMAEGKKLNVYTDSRYAFATAHVHGEIYRRRGWLTSEGREIKNKNEILALLKALFLPKRLSIIHCPGHQKGNSAEARGNRMADQAAREAAMKAVLETSTLLAGKRTADGSEFEKRTADGSEFESPKKKAKVE

SEQ ID NO: 1061 - protein, 2094 aa, synthetic construct
MPAAKRVKLDGGDKKYSIGLDIGTNSVGWAVITDEYKVPSKKFKVLGNTDRHSIKKNLIGALLFDSGETAEATRLKRTARRRYTRRKNRICYLQEIFSNEMAKVDDSFFHRLEESFLVEEDKKHERHPIFGNIVDEVAYHEKYPTIYHLRKKLVDSTDKADLRLIYLALAHMIKFRGHFLIEGDLNPDNSDVDKLFIQLVQTYNQLFEENPINASGVDAKAILSARLSKSRRLENLIAQLPGEKKNGLFGNLIALSLGLTPNFKSNFDLAEDAKLQLSKDTYDDDLDNLLAQIGDQYADLFLAAKNLSDAILLSDILRVNTEITKAPLSASMIKRYDEHHQDLTLLKALVRQQLPEKYKEIFFDQSKNGYAGYIDGGASQEEFYKFIKPILEKMDGTEELLVKLNREDLLRKQRTFDNGSIPHQIHLGELHAILRRQEDFYPFLKDNREKIEKILTFRIPYYVGPLARGNSRFAWMTRKSEETITPWNFEEVVDKGASAQSFIERMTNFDKNLPNEKVLPKHSLLYEYFTVYNELTKVKYVTEGMRKPAFLSGEQKKAIVDLLFKTNRKVTVKQLKEDYFKKIECFDSVEISGVEDRFNASLGTYHDLLKIIKDKDFLDNEENEDILEDIVLTLTLFEDREMIEERLKTYAHLFDDKVMKQLKRRRYTGWGRLSRKLINGIRDKQSGKTILDFLKSDGFANRNFMQLIHDDSLTFKEDIQKAQVSGQGDSLHEHIANLAGSPAIKKGILQTVKVVDELVKVMGRHKPENIVIEMARENQTTQKGQKNSRERMKRIEEGIKELGSQILKEHPVENTQLQNEKLYLYYLQNGRDMYVDQELDINRLSDYDVDHIVPQSFLKDDSIDNKVLTRSDKARGKSDNVPSEEVVKKMKNYWRQLLNAKLITQRKFDNLTKAERGGLSELDKAGFIKRQLVETRQITKHVAQILDSRMNTKYDENDKLIREVKVITLKSKLVSDFRKDFQFYKVREINNYHHAHDAYLNAVVGTALIKKYPKLESEFVYGDYKVYDVRKMIAKSEQEIGKATAKYFFYSNIMNFFKTEITLANGEIRKRPLIETNGETGEIVWDKGRDFATVRKVLSMPQVNIVKKTEVQTGGFSKESILPKRNSDKLIARKKDWDPKKYGGFDSPTVAYSVLVVAKVEKGKSKKLKSVKELLGITIMERSSFEKNPIDFLEAKGYKEVKKDLIIKLPKYSLFELENGRKRMLASAGELQKGNELALPSKYVNFLYLASHYEKLKGSPEDNEQKQLFVEQHKHYLDEIIEQISEFSKRVILADANLDKVLSAYNKHRDKPIREQAENIIHLFTLTNLGAPAAFKYFDTTIDRKRYTSTKEVLDATLIHQSITGLYETRIDLSQLGGDGGGSSGGSPAPGGTLNIEDEYRLHETSKEPDVPLGSTWLSDFPQAWAETGGMGLAVRQAPLIIPLKATSTPVSIKQYPMSQEARLGIKPHIQRLLDQGILVPCQSPWNTPLLPVKKPGTNDYRPVQDLREVNKRVEDIHPTVPNPYNLLSGLPPSHQWYTVLDLKDAFFCLRLHPTSQPLFAFEWRDPEMGISGQLTWTRLPQGFKNSPTLFNEALHRDLADFRIQHPDLILLQYVDDLLLAATSEQDCQRGTRALLQTLGNLGYRASAKKAQICQKQVKYLGYLLKEGQRWLTEARKETVMGQPTPKTPRQLREFLGKAGFCRLFIPGFAEMAAPLYPLTKPGTLFNWGPDQQKAYQEIKQALLTAPALGLPDLTKPFELFVDEKQGYAKGVLTQKLGPWRRPVAYLSKKLDPVAAGWPPCLRMVAAIAVLTKDAGKLTMGQPLVILAPHAVEALVKQPPDRWLSNARMTHYQAMLLDTDRVQFGPVVALNPATLLPLPEKEAPHDCLEILAETHGTRPDLTDQPIPDADYTWYTDGSSFLQEGQRRAGAAVTTETEVIWARALPAGTSAQRAELIALTQALKMAEGKKLNVYTDSRYAFATAHVHGEIYRRRGWLTSEGREIKNKNEILALLKALFLPKRLSIIHCPGHQKGNSAEARGNRMADQAAREAAMKAVLETSTLLAGKRTADGSEFEKRTADGSEFESPKKKAKVE

SEQ ID NO: 1062 - protein, 2091 aa, synthetic construct
MPAAKRVKLDGGDKKYSIGLDIGTNSVGWAVITDEYKVPSKKFKVLGNTDRHSIKKNLIGALLFDSGETAEATRLKRTARRRYTRRKNRICYLQEIFSNEMAKVDDSFFHRLEESFLVEEDKKHERHPIFGNIVDEVAYHEKYPTIYHLRKKLVDSTDKADLRLIYLALAHMIKFRGHFLIEGDLNPDNSDVDKLFIQLVQTYNQLFEENPINASGVDAKAILSARLSKSRRLENLIAQLPGEKKNGLFGNLIALSLGLTPNFKSNFDLAEDAKLQLSKDTYDDDLDNLLAQIGDQYADLFLAAKNLSDAILLSDILRVNTEITKAPLSASMIKRYDEHHQDLTLLKALVRQQLPEKYKEIFFDQSKNGYAGYIDGGASQEEFYKFIKPILEKMDGTEELLVKLNREDLLRKQRTFDNGSIPHQIHLGELHAILRRQEDFYPFLKDNREKIEKILTFRIPYYVGPLARGNSRFAWMTRKSEETITPWNFEEVVDKGASAQSFIERMTNFDKNLPNEKVLPKHSLLYEYFTVYNELTKVKYVTEGMRKPAFLSGEQKKAIVDLLFKTNRKVTVKQLKEDYFKKIECFDSVEISGVEDRFNASLGTYHDLLKIIKDKDFLDNEENEDILEDIVLTLTLFEDREMIEERLKTYAHLFDDKVMKQLKRRRYTGWGRLSRKLINGIRDKQSGKTILDFLKSDGFANRNFMQLIHDDSLTFKEDIQKAQVSGQGDSLHEHIANLAGSPAIKKGILQTVKVVDELVKVMGRHKPENIVIEMARENQTTQKGQKNSRERMKRIEEGIKELGSQILKEHPVENTQLQNEKLYLYYLQNGRDMYVDQELDINRLSDYDVDHIVPQSFLKDDSIDNKVLTRSDKARGKSDNVPSEEVVKKMKNYWRQLLNAKLITQRKFDNLTKAERGGLSELDKAGFIKRQLVETRQITKHVAQILDSRMNTKYDENDKLIREVKVITLKSKLVSDFRKDFQFYKVREINNYHHAHDAYLNAVVGTALIKKYPKLESEFVYGDYKVYDVRKMIAKSEQEIGKATAKYFFYSNIMNFFKTEITLANGEIRKRPLIETNGETGEIVWDKGRDFATVRKVLSMPQVNIVKKTEVQTGGFSKESILPKRNSDKLIARKKDWDPKKYGGFDSPTVAYSVLVVAKVEKGKSKKLKSVKELLGITIMERSSFEKNPIDFLEAKGYKEVKKDLIIKLPKYSLFELENGRKRMLASAGELQKGNELALPSKYVNFLYLASHYEKLKGSPEDNEQKQLFVEQHKHYLDEIIEQISEFSKRVILADANLDKVLSAYNKHRDKPIREQAENIIHLFTLTNLGAPAAFKYFDTTIDRKRYTSTKEVLDATLIHQSITGLYETRIDLSQLGGDGGGSSGGSGGTLNIEDEYRLHETSKEPDVPLGSTWLSDFPQAWAETGGMGLAVRQAPLIIPLKATSTPVSIKQYPMSQEARLGIKPHIQRLLDQGILVPCQSPWNTPLLPVKKPGTNDYRPVQDLREVNKRVEDIHPTVPNPYNLLSGLPPSHQWYTVLDLKDAFFCLRLHPTSQPLFAFEWRDPEMGISGQLTWTRLPQGFKNSPTLFNEALHRDLADFRIQHPDLILLQYVDDLLLAATSEQDCQRGTRALLQTLGNLGYRASAKKAQICQKQVKYLGYLLKEGQRWLTEARKETVMGQPTPKTPRQLREFLGKAGFCRLFIPGFAEMAAPLYPLTKPGTLFNWGPDQQKAYQEIKQALLTAPALGLPDLTKPFELFVDEKQGYAKGVLTQKLGPWRRPVAYLSKKLDPVAAGWPPCLRMVAAIAVLTKDAGKLTMGQPLVILAPHAVEALVKQPPDRWLSNARMTHYQAMLLDTDRVQFGPVVALNPATLLPLPEKEAPHDCLEILAETHGTRPDLTDQPIPDADYTWYTDGSSFLQEGQRRAGAAVTTETEVIWARALPAGTSAQRAELIALTQALKMAEGKKLNVYTDSRYAFATAHVHGEIYRRRGWLTSEGREIKNKNEILALLKALFLPKRLSIIHCPGHQKGNSAEARGNRMADQAAREAAMKAVLETSTLLAGKRTADGSEFEKRTADGSEFESPKKKAKVE

SEQ ID NO: 1063 - protein, 2094 aa, synthetic construct
MPAAKRVKLDGGDKKYSIGLDIGTNSVGWAVITDEYKVPSKKFKVLGNTDRHSIKKNLIGALLFDSGETAEATRLKRTARRRYTRRKNRICYLQEIFSNEMAKVDDSFFHRLEESFLVEEDKKHERHPIFGNIVDEVAYHEKYPTIYHLRKKLVDSTDKADLRLIYLALAHMIKFRGHFLIEGDLNPDNSDVDKLFIQLVQTYNQLFEENPINASGVDAKAILSARLSKSRRLENLIAQLPGEKKNGLFGNLIALSLGLTPNFKSNFDLAEDAKLQLSKDTYDDDLDNLLAQIGDQYADLFLAAKNLSDAILLSDILRVNTEITKAPLSASMIKRYDEHHQDLTLLKALVRQQLPEKYKEIFFDQSKNGYAGYIDGGASQEEFYKFIKPILEKMDGTEELLVKLNREDLLRKQRTFDNGSIPHQIHLGELHAILRRQEDFYPFLKDNREKIEKILTFRIPYYVGPLARGNSRFAWMTRKSEETITPWNFEEVVDKGASAQSFIERMTNFDKNLPNEKVLPKHSLLYEYFTVYNELTKVKYVTEGMRKPAFLSGEQKKAIVDLLFKTNRKVTVKQLKEDYFKKIECFDSVEISGVEDRFNASLGTYHDLLKIIKDKDFLDNEENEDILEDIVLTLTLFEDREMIEERLKTYAHLFDDKVMKQLKRRRYTGWGRLSRKLINGIRDKQSGKTILDFLKSDGFANRNFMQLIHDDSLTFKEDIQKAQVSGQGDSLHEHIANLAGSPAIKKGILQTVKVVDELVKVMGRHKPENIVIEMARENQTTQKGQKNSRERMKRIEEGIKELGSQILKEHPVENTQLQNEKLYLYYLQNGRDMYVDQELDINRLSDYDVDHIVPQSFLKDDSIDNKVLTRSDKARGKSDNVPSEEVVKKMKNYWRQLLNAKLITQRKFDNLTKAERGGLSELDKAGFIKRQLVETRQITKHVAQILDSRMNTKYDENDKLIREVKVITLKSKLVSDFRKDFQFYKVREINNYHHAHDAYLNAVVGTALIKKYPKLESEFVYGDYKVYDVRKMIAKSEQEIGKATAKYFFYSNIMNFFKTEITLANGEIRKRPLIETNGETGEIVWDKGRDFATVRKVLSMPQVNIVKKTEVQTGGFSKESILPKRNSDKLIARKKDWDPKKYGGFDSPTVAYSVLVVAKVEKGKSKKLKSVKELLGITIMERSSFEKNPIDFLEAKGYKEVKKDLIIKLPKYSLFELENGRKRMLASAGELQKGNELALPSKYVNFLYLASHYEKLKGSPEDNEQKQLFVEQHKHYLDEIIEQISEFSKRVILADANLDKVLSAYNKHRDKPIREQAENIIHLFTLTNLGAPAAFKYFDTTIDRKRYTSTKEVLDATLIHQSITGLYETRIDLSQLGGDGGGGSGSSPAPGGTLNIEDEYRLHETSKEPDVPLGSTWLSDFPQAWAETGGMGLAVRQAPLIIPLKATSTPVSIKQYPMSQEARLGIKPHIQRLLDQGILVPCQSPWNTPLLPVKKPGTNDYRPVQDLREVNKRVEDIHPTVPNPYNLLSGLPPSHQWYTVLDLKDAFFCLRLHPTSQPLFAFEWRDPEMGISGQLTWTRLPQGFKNSPTLFNEALHRDLADFRIQHPDLILLQYVDDLLLAATSEQDCQRGTRALLQTLGNLGYRASAKKAQICQKQVKYLGYLLKEGQRWLTEARKETVMGQPTPKTPRQLREFLGKAGFCRLFIPGFAEMAAPLYPLTKPGTLFNWGPDQQKAYQEIKQALLTAPALGLPDLTKPFELFVDEKQGYAKGVLTQKLGPWRRPVAYLSKKLDPVAAGWPPCLRMVAAIAVLTKDAGKLTMGQPLVILAPHAVEALVKQPPDRWLSNARMTHYQAMLLDTDRVQFGPVVALNPATLLPLPEKEAPHDCLEILAETHGTRPDLTDQPIPDADYTWYTDGSSFLQEGQRRAGAAVTTETEVIWARALPAGTSAQRAELIALTQALKMAEGKKLNVYTDSRYAFATAHVHGEIYRRRGWLTSEGREIKNKNEILALLKALFLPKRLSIIHCPGHQKGNSAEARGNRMADQAAREAAMKAVLETSTLLAGKRTADGSEFEKRTADGSEFESPKKKAKVE

SEQ ID NO: 1064 - protein, 2096 aa, synthetic construct
MPAAKRVKLDGGDKKYSIGLDIGTNSVGWAVITDEYKVPSKKFKVLGNTDRHSIKKNLIGALLFDSGETAEATRLKRTARRRYTRRKNRICYLQEIFSNEMAKVDDSFFHRLEESFLVEEDKKHERHPIFGNIVDEVAYHEKYPTIYHLRKKLVDSTDKADLRLIYLALAHMIKFRGHFLIEGDLNPDNSDVDKLFIQLVQTYNQLFEENPINASGVDAKAILSARLSKSRRLENLIAQLPGEKKNGLFGNLIALSLGLTPNFKSNFDLAEDAKLQLSKDTYDDDLDNLLAQIGDQYADLFLAAKNLSDAILLSDILRVNTEITKAPLSASMIKRYDEHHQDLTLLKALVRQQLPEKYKEIFFDQSKNGYAGYIDGGASQEEFYKFIKPILEKMDGTEELLVKLNREDLLRKQRTFDNGSIPHQIHLGELHAILRRQEDFYPFLKDNREKIEKILTFRIPYYVGPLARGNSRFAWMTRKSEETITPWNFEEVVDKGASAQSFIERMTNFDKNLPNEKVLPKHSLLYEYFTVYNELTKVKYVTEGMRKPAFLSGEQKKAIVDLLFKTNRKVTVKQLKEDYFKKIECFDSVEISGVEDRFNASLGTYHDLLKIIKDKDFLDNEENEDILEDIVLTLTLFEDREMIEERLKTYAHLFDDKVMKQLKRRRYTGWGRLSRKLINGIRDKQSGKTILDFLKSDGFANRNFMQLIHDDSLTFKEDIQKAQVSGQGDSLHEHIANLAGSPAIKKGILQTVKVVDELVKVMGRHKPENIVIEMARENQTTQKGQKNSRERMKRIEEGIKELGSQILKEHPVENTQLQNEKLYLYYLQNGRDMYVDQELDINRLSDYDVDHIVPQSFLKDDSIDNKVLTRSDKARGKSDNVPSEEVVKKMKNYWRQLLNAKLITQRKFDNLTKAERGGLSELDKAGFIKRQLVETRQITKHVAQILDSRMNTKYDENDKLIREVKVITLKSKLVSDFRKDFQFYKVREINNYHHAHDAYLNAVVGTALIKKYPKLESEFVYGDYKVYDVRKMIAKSEQEIGKATAKYFFYSNIMNFFKTEITLANGEIRKRPLIETNGETGEIVWDKGRDFATVRKVLSMPQVNIVKKTEVQTGGFSKESILPKRNSDKLIARKKDWDPKKYGGFDSPTVAYSVLVVAKVEKGKSKKLKSVKELLGITIMERSSFEKNPIDFLEAKGYKEVKKDLIIKLPKYSLFELENGRKRMLASAGELQKGNELALPSKYVNFLYLASHYEKLKGSPEDNEQKQLFVEQHKHYLDEIIEQISEFSKRVILADANLDKVLSAYNKHRDKPIREQAENIIHLFTLTNLGAPAAFKYFDTTIDRKRYTSTKEVLDATLIHQSITGLYETRIDLSQLGGDGGEAAAKPAPGSSGGTLNIEDEYRLHETSKEPDVPLGSTWLSDFPQAWAETGGMGLAVRQAPLIIPLKATSTPVSIKQYPMSQEARLGIKPHIQRLLDQGILVPCQSPWNTPLLPVKKPGTNDYRPVQDLREVNKRVEDIHPTVPNPYNLLSGLPPSHQWYTVLDLKDAFFCLRLHPTSQPLFAFEWRDPEMGISGQLTWTRLPQGFKNSPTLFNEALHRDLADFRIQHPDLILLQYVDDLLLAATSEQDCQRGTRALLQTLGNLGYRASAKKAQICQKQVKYLGYLLKEGQRWLTEARKETVMGQPTPKTPRQLREFLGKAGFCRLFIPGFAEMAAPLYPLTKPGTLFNWGPDQQKAYQEIKQALLTAPALGLPDLTKPFELFVDEKQGYAKGVLTQKLGPWRRPVAYLSKKLDPVAAGWPPCLRMVAAIAVLTKDAGKLTMGQPLVILAPHAVEALVKQPPDRWLSNARMTHYQAMLLDTDRVQFGPVVALNPATLLPLPEKEAPHDCLEILAETHGTRPDLTDQPIPDADYTWYTDGSSFLQEGQRRAGAAVTTETEVIWARALPAGTSAQRAELIALTQALKMAEGKKLNVYTDSRYAFATAHVHGEIYRRRGWLTSEGREIKNKNEILALLKALFLPKRLSIIHCPGHQKGNSAEARGNRMADQAAREAAMKAVLETSTLLAGKRTADGSEFEKRTADGSEFESPKKKAKVE

SEQ ID NO: 1065 - protein, 2094 aa, synthetic construct
MPAAKRVKLDGGDKKYSIGLDIGTNSVGWAVITDEYKVPSKKFKVLGNTDRHSIKKNLIGALLFDSGETAEATRLKRTARRRYTRRKNRICYLQEIFSNEMAKVDDSFFHRLEESFLVEEDKKHERHPIFGNIVDEVAYHEKYPTIYHLRKKLVDSTDKADLRLIYLALAHMIKFRGHFLIEGDLNPDNSDVDKLFIQLVQTYNQLFEENPINASGVDAKAILSARLSKSRRLENLIAQLPGEKKNGLFGNLIALSLGLTPNFKSNFDLAEDAKLQLSKDTYDDDLDNLLAQIGDQYADLFLAAKNLSDAILLSDILRVNTEITKAPLSASMIKRYDEHHQDLTLLKALVRQQLPEKYKEIFFDQSKNGYAGYIDGGASQEEFYKFIKPILEKMDGTEELLVKLNREDLLRKQRTFDNGSIPHQIHLGELHAILRRQEDFYPFLKDNREKIEKILTFRIPYYVGPLARGNSRFAWMTRKSEETITPWNFEEVVDKGASAQSFIERMTNFDKNLPNEKVLPKHSLLYEYFTVYNELTKVKYVTEGMRKPAFLSGEQKKAIVDLLFKTNRKVTVKQLKEDYFKKIECFDSVEISGVEDRFNASLGTYHDLLKIIKDKDFLDNEENEDILEDIVLTLTLFEDREMIEERLKTYAHLFDDKVMKQLKRRRYTGWGRLSRKLINGIRDKQSGKTILDFLKSDGFANRNFMQLIHDDSLTFKEDIQKAQVSGQGDSLHEHIANLAGSPAIKKGILQTVKVVDELVKVMGRHKPENIVIEMARENQTTQKGQKNSRERMKRIEEGIKELGSQILKEHPVENTQLQNEKLYLYYLQNGRDMYVDQELDINRLSDYDVDHIVPQSFLKDDSIDNKVLTRSDKARGKSDNVPSEEVVKKMKNYWRQLLNAKLITQRKFDNLTKAERGGLSELDKAGFIKRQLVETRQITKHVAQILDSRMNTKYDENDKLIREVKVITLKSKLVSDFRKDFQFYKVREINNYHHAHDAYLNAVVGTALIKKYPKLESEFVYGDYKVYDVRKMIAKSEQEIGKATAKYFFYSNIMNFFKTEITLANGEIRKRPLIETNGETGEIVWDKGRDFATVRKVLSMPQVNIVKKTEVQTGGFSKESILPKRNSDKLIARKKDWDPKKYGGFDSPTVAYSVLVVAKVEKGKSKKLKSVKELLGITIMERSSFEKNPIDFLEAKGYKEVKKDLIIKLPKYSLFELENGRKRMLASAGELQKGNELALPSKYVNFLYLASHYEKLKGSPEDNEQKQLFVEQHKHYLDEIIEQISEFSKRVILADANLDKVLSAYNKHRDKPIREQAENIIHLFTLTNLGAPAAFKYFDTTIDRKRYTSTKEVLDATLIHQSITGLYETRIDLSQLGGDGGGGSGGSGGSGGTLNIEDEYRLHETSKEPDVPLGSTWLSDFPQAWAETGGMGLAVRQAPLIIPLKATSTPVSIKQYPMSQEARLGIKPHIQRLLDQGILVPCQSPWNTPLLPVKKPGTNDYRPVQDLREVNKRVEDIHPTVPNPYNLLSGLPPSHQWYTVLDLKDAFFCLRLHPTSQPLFAFEWRDPEMGISGQLTWTRLPQGFKNSPTLFNEALHRDLADFRIQHPDLILLQYVDDLLLAATSEQDCQRGTRALLQTLGNLGYRASAKKAQICQKQVKYLGYLLKEGQRWLTEARKETVMGQPTPKTPRQLREFLGKAGFCRLFIPGFAEMAAPLYPLTKPGTLFNWGPDQQKAYQEIKQALLTAPALGLPDLTKPFELFVDEKQGYAKGVLTQKLGPWRRPVAYLSKKLDPVAAGWPPCLRMVAAIAVLTKDAGKLTMGQPLVILAPHAVEALVKQPPDRWLSNARMTHYQAMLLDTDRVQFGPVVALNPATLLPLPEKEAPHDCLEILAETHGTRPDLTDQPIPDADYTWYTDGSSFLQEGQRRAGAAVTTETEVIWARALPAGTSAQRAELIALTQALKMAEGKKLNVYTDSRYAFATAHVHGEIYRRRGWLTSEGREIKNKNEILALLKALFLPKRLSIIHCPGHQKGNSAEARGNRMADQAAREAAMKAVLETSTLLAGKRTADGSEFEKRTADGSEFESPKKKAKVE

SEQ ID NO: 1066 - protein, 2096 aa, synthetic construct
MPAAKRVKLDGGDKKYSIGLDIGTNSVGWAVITDEYKVPSKKFKVLGNTDRHSIKKNLIGALLFDSGETAEATRLKRTARRRYTRRKNRICYLQEIFSNEMAKVDDSFFHRLEESFLVEEDKKHERHPIFGNIVDEVAYHEKYPTIYHLRKKLVDSTDKADLRLIYLALAHMIKFRGHFLIEGDLNPDNSDVDKLFIQLVQTYNQLFEENPINASGVDAKAILSARLSKSRRLENLIAQLPGEKKNGLFGNLIALSLGLTPNFKSNFDLAEDAKLQLSKDTYDDDLDNLLAQIGDQYADLFLAAKNLSDAILLSDILRVNTEITKAPLSASMIKRYDEHHQDLTLLKALVRQQLPEKYKEIFFDQSKNGYAGYIDGGASQEEFYKFIKPILEKMDGTEELLVKLNREDLLRKQRTFDNGSIPHQIHLGELHAILRRQEDFYPFLKDNREKIEKILTFRIPYYVGPLARGNSRFAWMTRKSEETITPWNFEEVVDKGASAQSFIERMTNFDKNLPNEKVLPKHSLLYEYFTVYNELTKVKYVTEGMRKPAFLSGEQKKAIVDLLFKTNRKVTVKQLKEDYFKKIECFDSVEISGVEDRFNASLGTYHDLLKIIKDKDFLDNEENEDILEDIVLTLTLFEDREMIEERLKTYAHLFDDKVMKQLKRRRYTGWGRLSRKLINGIRDKQSGKTILDFLKSDGFANRNFMQLIHDDSLTFKEDIQKAQVSGQGDSLHEHIANLAGSPAIKKGILQTVKVVDELVKVMGRHKPENIVIEMARENQTTQKGQKNSRERMKRIEEGIKELGSQILKEHPVENTQLQNEKLYLYYLQNGRDMYVDQELDINRLSDYDVDHIVPQSFLKDDSIDNKVLTRSDKARGKSDNVPSEEVVKKMKNYWRQLLNAKLITQRKFDNLTKAERGGLSELDKAGFIKRQLVETRQITKHVAQILDSRMNTKYDENDKLIREVKVITLKSKLVSDFRKDFQFYKVREINNYHHAHDAYLNAVVGTALIKKYPKLESEFVYGDYKVYDVRKMIAKSEQEIGKATAKYFFYSNIMNFFKTEITLANGEIRKRPLIETNGETGEIVWDKGRDFATVRKVLSMPQVNIVKKTEVQTGGFSKESILPKRNSDKLIARKKDWDPKKYGGFDSPTVAYSVLVVAKVEKGKSKKLKSVKELLGITIMERSSFEKNPIDFLEAKGYKEVKKDLIIKLPKYSLFELENGRKRMLASAGELQKGNELALPSKYVNFLYLASHYEKLKGSPEDNEQKQLFVEQHKHYLDEIIEQISEFSKRVILADANLDKVLSAYNKHRDKPIREQAENIIHLFTLTNLGAPAAFKYFDTTIDRKRYTSTKEVLDATLIHQSITGLYETRIDLSQLGGDGGPAPEAAAKGGSGGTLNIEDEYRLHETSKEPDVPLGSTWLSDFPQAWAETGGMGLAVRQAPLIIPLKATSTPVSIKQYPMSQEARLGIKPHIQRLLDQGILVPCQSPWNTPLLPVKKPGTNDYRPVQDLREVNKRVEDIHPTVPNPYNLLSGLPPSHQWYTVLDLKDAFFCLRLHPTSQPLFAFEWRDPEMGISGQLTWTRLPQGFKNSPTLFNEALHRDLADFRIQHPDLILLQYVDDLLLAATSEQDCQRGTRALLQTLGNLGYRASAKKAQICQKQVKYLGYLLKEGQRWLTEARKETVMGQPTPKTPRQLREFLGKAGFCRLFIPGFAEMAAPLYPLTKPGTLFNWGPDQQKAYQEIKQALLTAPALGLPDLTKPFELFVDEKQGYAKGVLTQKLGPWRRPVAYLSKKLDPVAAGWPPCLRMVAAIAVLTKDAGKLTMGQPLVILAPHAVEALVKQPPDRWLSNARMTHYQAMLLDTDRVQFGPVVALNPATLLPLPEKEAPHDCLEILAETHGTRPDLTDQPIPDADYTWYTDGSSFLQEGQRRAGAAVTTETEVIWARALPAGTSAQRAELIALTQALKMAEGKKLNVYTDSRYAFATAHVHGEIYRRRGWLTSEGREIKNKNEILALLKALFLPKRLSIIHCPGHQKGNSAEARGNRMADQAAREAAMKAVLETSTLLAGKRTADGSEFEKRTADGSEFESPKKKAKVE

SEQ ID NO: 1067 - protein, 2103 aa, synthetic construct
MPAAKRVKLDGGDKKYSIGLDIGTNSVGWAVITDEYKVPSKKFKVLGNTDRHSIKKNLIGALLFDSGETAEATRLKRTARRRYTRRKNRICYLQEIFSNEMAKVDDSFFHRLEESFLVEEDKKHERHPIFGNIVDEVAYHEKYPTIYHLRKKLVDSTDKADLRLIYLALAHMIKFRGHFLIEGDLNPDNSDVDKLFIQLVQTYNQLFEENPINASGVDAKAILSARLSKSRRLENLIAQLPGEKKNGLFGNLIALSLGLTPNFKSNFDLAEDAKLQLSKDTYDDDLDNLLAQIGDQYADLFLAAKNLSDAILLSDILRVNTEITKAPLSASMIKRYDEHHQDLTLLKALVRQQLPEKYKEIFFDQSKNGYAGYIDGGASQEEFYKFIKPILEKMDGTEELLVKLNREDLLRKQRTFDNGSIPHQIHLGELHAILRRQEDFYPFLKDNREKIEKILTFRIPYYVGPLARGNSRFAWMTRKSEETITPWNFEEVVDKGASAQSFIERMTNFDKNLPNEKVLPKHSLLYEYFTVYNELTKVKYVTEGMRKPAFLSGEQKKAIVDLLFKTNRKVTVKQLKEDYFKKIECFDSVEISGVEDRFNASLGTYHDLLKIIKDKDFLDNEENEDILEDIVLTLTLFEDREMIEERLKTYAHLFDDKVMKQLKRRRYTGWGRLSRKLINGIRDKQSGKTILDFLKSDGFANRNFMQLIHDDSLTFKEDIQKAQVSGQGDSLHEHIANLAGSPAIKKGILQTVKVVDELVKVMGRHKPENIVIEMARENQTTQKGQKNSRERMKRIEEGIKELGSQILKEHPVENTQLQNEKLYLYYLQNGRDMYVDQELDINRLSDYDVDHIVPQSFLKDDSIDNKVLTRSDKARGKSDNVPSEEVVKKMKNYWRQLLNAKLITQRKFDNLTKAERGGLSELDKAGFIKRQLVETRQITKHVAQILDSRMNTKYDENDKLIREVKVITLKSKLVSDFRKDFQFYKVREINNYHHAHDAYLNAVVGTALIKKYPKLESEFVYGDYKVYDVRKMIAKSEQEIGKATAKYFFYSNIMNFFKTEITLANGEIRKRPLIETNGETGEIVWDKGRDFATVRKVLSMPQVNIVKKTEVQTGGFSKESILPKRNSDKLIARKKDWDPKKYGGFDSPTVAYSVLVVAKVEKGKSKKLKSVKELLGITIMERSSFEKNPIDFLEAKGYKEVKKDLIIKLPKYSLFELENGRKRMLASAGELQKGNELALPSKYVNFLYLASHYEKLKGSPEDNEQKQLFVEQHKHYLDEIIEQISEFSKRVILADANLDKVLSAYNKHRDKPIREQAENIIHLFTLTNLGAPAAFKYFDTTIDRKRYTSTKEVLDATLIHQSITGLYETRIDLSQLGGDGGGSSGSSGSSGSSGSSGSSGGTLNIEDEYRLHETSKEPDVPLGSTWLSDFPQAWAETGGMGLAVRQAPLIIPLKATSTPVSIKQYPMSQEARLGIKPHIQRLLDQGILVPCQSPWNTPLLPVKKPGTNDYRPVQDLREVNKRVEDIHPTVPNPYNLLSGLPPSHQWYTVLDLKDAFFCLRLHPTSQPLFAFEWRDPEMGISGQLTWTRLPQGFKNSPTLFNEALHRDLADFRIQHPDLILLQYVDDLLLAATSEQDCQRGTRALLQTLGNLGYRASAKKAQICQKQVKYLGYLLKEGQRWLTEARKETVMGQPTPKTPRQLREFLGKAGFCRLFIPGFAEMAAPLYPLTKPGTLFNWGPDQQKAYQEIKQALLTAPALGLPDLTKPFELFVDEKQGYAKGVLTQKLGPWRRPVAYLSKKLDPVAAGWPPCLRMVAAIAVLTKDAGKLTMGQPLVILAPHAVEALVKQPPDRWLSNARMTHYQAMLLDTDRVQFGPVVALNPATLLPLPEKEAPHDCLEILAETHGTRPDLTDQPIPDADYTWYTDGSSFLQEGQRRAGAAVTTETEVIWARALPAGTSAQRAELIALTQALKMAEGKKLNVYTDSRYAFATAHVHGEIYRRRGWLTSEGREIKNKNEILALLKALFLPKRLSIIHCPGHQKGNSAEARGNRMADQAAREAAMKAVLETSTLLAGKRTADGSEFEKRTADGSEFESPKKKAKVE

SEQ ID NO: 1068 - protein, 2096 aa, synthetic construct
MPAAKRVKLDGGDKKYSIGLDIGTNSVGWAVITDEYKVPSKKFKVLGNTDRHSIKKNLIGALLFDSGETAEATRLKRTARRRYTRRKNRICYLQEIFSNEMAKVDDSFFHRLEESFLVEEDKKHERHPIFGNIVDEVAYHEKYPTIYHLRKKLVDSTDKADLRLIYLALAHMIKFRGHFLIEGDLNPDNSDVDKLFIQLVQTYNQLFEENPINASGVDAKAILSARLSKSRRLENLIAQLPGEKKNGLFGNLIALSLGLTPNFKSNFDLAEDAKLQLSKDTYDDDLDNLLAQIGDQYADLFLAAKNLSDAILLSDILRVNTEITKAPLSASMIKRYDEHHQDLTLLKALVRQQLPEKYKEIFFDQSKNGYAGYIDGGASQEEFYKFIKPILEKMDGTEELLVKLNREDLLRKQRTFDNGSIPHQIHLGELHAILRRQEDFYPFLKDNREKIEKILTFRIPYYVGPLARGNSRFAWMTRKSEETITPWNFEEVVDKGASAQSFIERMTNFDKNLPNEKVLPKHSLLYEYFTVYNELTKVKYVTEGMRKPAFLSGEQKKAIVDLLFKTNRKVTVKQLKEDYFKKIECFDSVEISGVEDRFNASLGTYHDLLKIIKDKDFLDNEENEDILEDIVLTLTLFEDREMIEERLKTYAHLFDDKVMKQLKRRRYTGWGRLSRKLINGIRDKQSGKTILDFLKSDGFANRNFMQLIHDDSLTFKEDIQKAQVSGQGDSLHEHIANLAGSPAIKKGILQTVKVVDELVKVMGRHKPENIVIEMARENQTTQKGQKNSRERMKRIEEGIKELGSQILKEHPVENTQLQNEKLYLYYLQNGRDMYVDQELDINRLSDYDVDHIVPQSFLKDDSIDNKVLTRSDKARGKSDNVPSEEVVKKMKNYWRQLLNAKLITQRKFDNLTKAERGGLSELDKAGFIKRQLVETRQITKHVAQILDSRMNTKYDENDKLIREVKVITLKSKLVSDFRKDFQFYKVREINNYHHAHDAYLNAVVGTALIKKYPKLESEFVYGDYKVYDVRKMIAKSEQEIGKATAKYFFYSNIMNFFKTEITLANGEIRKRPLIETNGETGEIVWDKGRDFATVRKVLSMPQVNIVKKTEVQTGGFSKESILPKRNSDKLIARKKDWDPKKYGGFDSPTVAYSVLVVAKVEKGKSKKLKSVKELLGITIMERSSFEKNPIDFLEAKGYKEVKKDLIIKLPKYSLFELENGRKRMLASAGELQKGNELALPSKYVNFLYLASHYEKLKGSPEDNEQKQLFVEQHKHYLDEIIEQISEFSKRVILADANLDKVLSAYNKHRDKPIREQAENIIHLFTLTNLGAPAAFKYFDTTIDRKRYTSTKEVLDATLIHQSITGLYETRIDLSQLGGDGGEAAAKGSSGGSGGTLNIEDEYRLHETSKEPDVPLGSTWLSDFPQAWAETGGMGLAVRQAPLIIPLKATSTPVSIKQYPMSQEARLGIKPHIQRLLDQGILVPCQSPWNTPLLPVKKPGTNDYRPVQDLREVNKRVEDIHPTVPNPYNLLSGLPPSHQWYTVLDLKDAFFCLRLHPTSQPLFAFEWRDPEMGISGQLTWTRLPQGFKNSPTLFNEALHRDLADFRIQHPDLILLQYVDDLLLAATSEQDCQRGTRALLQTLGNLGYRASAKKAQICQKQVKYLGYLLKEGQRWLTEARKETVMGQPTPKTPRQLREFLGKAGFCRLFIPGFAEMAAPLYPLTKPGTLFNWGPDQQKAYQEIKQALLTAPALGLPDLTKPFELFVDEKQGYAKGVLTQKLGPWRRPVAYLSKKLDPVAAGWPPCLRMVAAIAVLTKDAGKLTMGQPLVILAPHAVEALVKQPPDRWLSNARMTHYQAMLLDTDRVQFGPVVALNPATLLPLPEKEAPHDCLEILAETHGTRPDLTDQPIPDADYTWYTDGSSFLQEGQRRAGAAVTTETEVIWARALPAGTSAQRAELIALTQALKMAEGKKLNVYTDSRYAFATAHVHGEIYRRRGWLTSEGREIKNKNEILALLKALFLPKRLSIIHCPGHQKGNSAEARGNRMADQAAREAAMKAVLETSTLLAGKRTADGSEFEKRTADGSEFESPKKKAKVE

SEQ ID NO: 1069 - protein, 2096 aa, synthetic construct
MPAAKRVKLDGGDKKYSIGLDIGTNSVGWAVITDEYKVPSKKFKVLGNTDRHSIKKNLIGALLFDSGETAEATRLKRTARRRYTRRKNRICYLQEIFSNEMAKVDDSFFHRLEESFLVEEDKKHERHPIFGNIVDEVAYHEKYPTIYHLRKKLVDSTDKADLRLIYLALAHMIKFRGHFLIEGDLNPDNSDVDKLFIQLVQTYNQLFEENPINASGVDAKAILSARLSKSRRLENLIAQLPGEKKNGLFGNLIALSLGLTPNFKSNFDLAEDAKLQLSKDTYDDDLDNLLAQIGDQYADLFLAAKNLSDAILLSDILRVNTEITKAPLSASMIKRYDEHHQDLTLLKALVRQQLPEKYKEIFFDQSKNGYAGYIDGGASQEEFYKFIKPILEKMDGTEELLVKLNREDLLRKQRTFDNGSIPHQIHLGELHAILRRQEDFYPFLKDNREKIEKILTFRIPYYVGPLARGNSRFAWMTRKSEETITPWNFEEVVDKGASAQSFIERMTNFDKNLPNEKVLPKHSLLYEYFTVYNELTKVKYVTEGMRKPAFLSGEQKKAIVDLLFKTNRKVTVKQLKEDYFKKIECFDSVEISGVEDRFNASLGTYHDLLKIIKDKDFLDNEENEDILEDIVLTLTLFEDREMIEERLKTYAHLFDDKVMKQLKRRRYTGWGRLSRKLINGIRDKQSGKTILDFLKSDGFANRNFMQLIHDDSLTFKEDIQKAQVSGQGDSLHEHIANLAGSPAIKKGILQTVKVVDELVKVMGRHKPENIVIEMARENQTTQKGQKNSRERMKRIEEGIKELGSQILKEHPVENTQLQNEKLYLYYLQNGRDMYVDQELDINRLSDYDVDHIVPQSFLKDDSIDNKVLTRSDKARGKSDNVPSEEVVKKMKNYWRQLLNAKLITQRKFDNLTKAERGGLSELDKAGFIKRQLVETRQITKHVAQILDSRMNTKYDENDKLIREVKVITLKSKLVSDFRKDFQFYKVREINNYHHAHDAYLNAVVGTALIKKYPKLESEFVYGDYKVYDVRKMIAKSEQEIGKATAKYFFYSNIMNFFKTEITLANGEIRKRPLIETNGETGEIVWDKGRDFATVRKVLSMPQVNIVKKTEVQTGGFSKESILPKRNSDKLIARKKDWDPKKYGGFDSPTVAYSVLVVAKVEKGKSKKLKSVKELLGITIMERSSFEKNPIDFLEAKGYKEVKKDLIIKLPKYSLFELENGRKRMLASAGELQKGNELALPSKYVNFLYLASHYEKLKGSPEDNEQKQLFVEQHKHYLDEIIEQISEFSKRVILADANLDKVLSAYNKHRDKPIREQAENIIHLFTLTNLGAPAAFKYFDTTIDRKRYTSTKEVLDATLIHQSITGLYETRIDLSQLGGDGGPAPAPAPAPAPGGTLNIEDEYRLHETSKEPDVPLGSTWLSDFPQAWAETGGMGLAVRQAPLIIPLKATSTPVSIKQYPMSQEARLGIKPHIQRLLDQGILVPCQSPWNTPLLPVKKPGTNDYRPVQDLREVNKRVEDIHPTVPNPYNLLSGLPPSHQWYTVLDLKDAFFCLRLHPTSQPLFAFEWRDPEMGISGQLTWTRLPQGFKNSPTLFNEALHRDLADFRIQHPDLILLQYVDDLLLAATSEQDCQRGTRALLQTLGNLGYRASAKKAQICQKQVKYLGYLLKEGQRWLTEARKETVMGQPTPKTPRQLREFLGKAGFCRLFIPGFAEMAAPLYPLTKPGTLFNWGPDQQKAYQEIKQALLTAPALGLPDLTKPFELFVDEKQGYAKGVLTQKLGPWRRPVAYLSKKLDPVAAGWPPCLRMVAAIAVLTKDAGKLTMGQPLVILAPHAVEALVKQPPDRWLSNARMTHYQAMLLDTDRVQFGPVVALNPATLLPLPEKEAPHDCLEILAETHGTRPDLTDQPIPDADYTWYTDGSSFLQEGQRRAGAAVTTETEVIWARALPAGTSAQRAELIALTQALKMAEGKKLNVYTDSRYAFATAHVHGEIYRRRGWLTSEGREIKNKNEILALLKALFLPKRLSIIHCPGHQKGNSAEARGNRMADQAAREAAMKAVLETSTLLAGKRTADGSEFEKRTADGSEFESPKKKAKVE

SEQ ID NO: 1070 - protein, 2091 aa, synthetic construct
MPAAKRVKLDGGDKKYSIGLDIGTNSVGWAVITDEYKVPSKKFKVLGNTDRHSIKKNLIGALLFDSGETAEATRLKRTARRRYTRRKNRICYLQEIFSNEMAKVDDSFFHRLEESFLVEEDKKHERHPIFGNIVDEVAYHEKYPTIYHLRKKLVDSTDKADLRLIYLALAHMIKFRGHFLIEGDLNPDNSDVDKLFIQLVQTYNQLFEENPINASGVDAKAILSARLSKSRRLENLIAQLPGEKKNGLFGNLIALSLGLTPNFKSNFDLAEDAKLQLSKDTYDDDLDNLLAQIGDQYADLFLAAKNLSDAILLSDILRVNTEITKAPLSASMIKRYDEHHQDLTLLKALVRQQLPEKYKEIFFDQSKNGYAGYIDGGASQEEFYKFIKPILEKMDGTEELLVKLNREDLLRKQRTFDNGSIPHQIHLGELHAILRRQEDFYPFLKDNREKIEKILTFRIPYYVGPLARGNSRFAWMTRKSEETITPWNFEEVVDKGASAQSFIERMTNFDKNLPNEKVLPKHSLLYEYFTVYNELTKVKYVTEGMRKPAFLSGEQKKAIVDLLFKTNRKVTVKQLKEDYFKKIECFDSVEISGVEDRFNASLGTYHDLLKIIKDKDFLDNEENEDILEDIVLTLTLFEDREMIEERLKTYAHLFDDKVMKQLKRRRYTGWGRLSRKLINGIRDKQSGKTILDFLKSDGFANRNFMQLIHDDSLTFKEDIQKAQVSGQGDSLHEHIANLAGSPAIKKGILQTVKVVDELVKVMGRHKPENIVIEMARENQTTQKGQKNSRERMKRIEEGIKELGSQILKEHPVENTQLQNEKLYLYYLQNGRDMYVDQELDINRLSDYDVDHIVPQSFLKDDSIDNKVLTRSDKARGKSDNVPSEEVVKKMKNYWRQLLNAKLITQRKFDNLTKAERGGLSELDKAGFIKRQLVETRQITKHVAQILDSRMNTKYDENDKLIREVKVITLKSKLVSDFRKDFQFYKVREINNYHHAHDAYLNAVVGTALIKKYPKLESEFVYGDYKVYDVRKMIAKSEQEIGKATAKYFFYSNIMNFFKTEITLANGEIRKRPLIETNGETGEIVWDKGRDFATVRKVLSMPQVNIVKKTEVQTGGFSKESILPKRNSDKLIARKKDWDPKKYGGFDSPTVAYSVLVVAKVEKGKSKKLKSVKELLGITIMERSSFEKNPIDFLEAKGYKEVKKDLIIKLPKYSLFELENGRKRMLASAGELQKGNELALPSKYVNFLYLASHYEKLKGSPEDNEQKQLFVEQHKHYLDEIIEQISEFSKRVILADANLDKVLSAYNKHRDKPIREQAENIIHLFTLTNLGAPAAFKYFDTTIDRKRYTSTKEVLDATLIHQSITGLYETRIDLSQLGGDGGGSSGGGGGTLNIEDEYRLHETSKEPDVPLGSTWLSDFPQAWAETGGMGLAVRQAPLIIPLKATSTPVSIKQYPMSQEARLGIKPHIQRLLDQGILVPCQSPWNTPLLPVKKPGTNDYRPVQDLREVNKRVEDIHPTVPNPYNLLSGLPPSHQWYTVLDLKDAFFCLRLHPTSQPLFAFEWRDPEMGISGQLTWTRLPQGFKNSPTLFNEALHRDLADFRIQHPDLILLQYVDDLLLAATSEQDCQRGTRALLQTLGNLGYRASAKKAQICQKQVKYLGYLLKEGQRWLTEARKETVMGQPTPKTPRQLREFLGKAGFCRLFIPGFAEMAAPLYPLTKPGTLFNWGPDQQKAYQEIKQALLTAPALGLPDLTKPFELFVDEKQGYAKGVLTQKLGPWRRPVAYLSKKLDPVAAGWPPCLRMVAAIAVLTKDAGKLTMGQPLVILAPHAVEALVKQPPDRWLSNARMTHYQAMLLDTDRVQFGPVVALNPATLLPLPEKEAPHDCLEILAETHGTRPDLTDQPIPDADYTWYTDGSSFLQEGQRRAGAAVTTETEVIWARALPAGTSAQRAELIALTQALKMAEGKKLNVYTDSRYAFATAHVHGEIYRRRGWLTSEGREIKNKNEILALLKALFLPKRLSIIHCPGHQKGNSAEARGNRMADQAAREAAMKAVLETSTLLAGKRTADGSEFEKRTADGSEFESPKKKAKVE

SEQ ID NO: 1071 - protein, 2094 aa, synthetic construct
MPAAKRVKLDGGDKKYSIGLDIGTNSVGWAVITDEYKVPSKKFKVLGNTDRHSIKKNLIGALLFDSGETAEATRLKRTARRRYTRRKNRICYLQEIFSNEMAKVDDSFFHRLEESFLVEEDKKHERHPIFGNIVDEVAYHEKYPTIYHLRKKLVDSTDKADLRLIYLALAHMIKFRGHFLIEGDLNPDNSDVDKLFIQLVQTYNQLFEENPINASGVDAKAILSARLSKSRRLENLIAQLPGEKKNGLFGNLIALSLGLTPNFKSNFDLAEDAKLQLSKDTYDDDLDNLLAQIGDQYADLFLAAKNLSDAILLSDILRVNTEITKAPLSASMIKRYDEHHQDLTLLKALVRQQLPEKYKEIFFDQSKNGYAGYIDGGASQEEFYKFIKPILEKMDGTEELLVKLNREDLLRKQRTFDNGSIPHQIHLGELHAILRRQEDFYPFLKDNREKIEKILTFRIPYYVGPLARGNSRFAWMTRKSEETITPWNFEEVVDKGASAQSFIERMTNFDKNLPNEKVLPKHSLLYEYFTVYNELTKVKYVTEGMRKPAFLSGEQKKAIVDLLFKTNRKVTVKQLKEDYFKKIECFDSVEISGVEDRFNASLGTYHDLLKIIKDKDFLDNEENEDILEDIVLTLTLFEDREMIEERLKTYAHLFDDKVMKQLKRRRYTGWGRLSRKLINGIRDKQSGKTILDFLKSDGFANRNFMQLIHDDSLTFKEDIQKAQVSGQGDSLHEHIANLAGSPAIKKGILQTVKVVDELVKVMGRHKPENIVIEMARENQTTQKGQKNSRERMKRIEEGIKELGSQILKEHPVENTQLQNEKLYLYYLQNGRDMYVDQELDINRLSDYDVDHIVPQSFLKDDSIDNKVLTRSDKARGKSDNVPSEEVVKKMKNYWRQLLNAKLITQRKFDNLTKAERGGLSELDKAGFIKRQLVETRQITKHVAQILDSRMNTKYDENDKLIREVKVITLKSKLVSDFRKDFQFYKVREINNYHHAHDAYLNAVVGTALIKKYPKLESEFVYGDYKVYDVRKMIAKSEQEIGKATAKYFFYSNIMNFFKTEITLANGEIRKRPLIETNGETGEIVWDKGRDFATVRKVLSMPQVNIVKKTEVQTGGFSKESILPKRNSDKLIARKKDWDPKKYGGFDSPTVAYSVLVVAKVEKGKSKKLKSVKELLGITIMERSSFEKNPIDFLEAKGYKEVKKDLIIKLPKYSLFELENGRKRMLASAGELQKGNELALPSKYVNFLYLASHYEKLKGSPEDNEQKQLFVEQHKHYLDEIIEQISEFSKRVILADANLDKVLSAYNKHRDKPIREQAENIIHLFTLTNLGAPAAFKYFDTTIDRKRYTSTKEVLDATLIHQSITGLYETRIDLSQLGGDGGPAPGGSGGGGGTLNIEDEYRLHETSKEPDVPLGSTWLSDFPQAWAETGGMGLAVRQAPLIIPLKATSTPVSIKQYPMSQEARLGIKPHIQRLLDQGILVPCQSPWNTPLLPVKKPGTNDYRPVQDLREVNKRVEDIHPTVPNPYNLLSGLPPSHQWYTVLDLKDAFFCLRLHPTSQPLFAFEWRDPEMGISGQLTWTRLPQGFKNSPTLFNEALHRDLADFRIQHPDLILLQYVDDLLLAATSEQDCQRGTRALLQTLGNLGYRASAKKAQICQKQVKYLGYLLKEGQRWLTEARKETVMGQPTPKTPRQLREFLGKAGFCRLFIPGFAEMAAPLYPLTKPGTLFNWGPDQQKAYQEIKQALLTAPALGLPDLTKPFELFVDEKQGYAKGVLTQKLGPWRRPVAYLSKKLDPVAAGWPPCLRMVAAIAVLTKDAGKLTMGQPLVILAPHAVEALVKQPPDRWLSNARMTHYQAMLLDTDRVQFGPVVALNPATLLPLPEKEAPHDCLEILAETHGTRPDLTDQPIPDADYTWYTDGSSFLQEGQRRAGAAVTTETEVIWARALPAGTSAQRAELIALTQALKMAEGKKLNVYTDSRYAFATAHVHGEIYRRRGWLTSEGREIKNKNEILALLKALFLPKRLSIIHCPGHQKGNSAEARGNRMADQAAREAAMKAVLETSTLLAGKRTADGSEFEKRTADGSEFESPKKKAKVE

SEQ ID NO: 1072 - protein, 2097 aa, synthetic construct
MPAAKRVKLDGGDKKYSIGLDIGTNSVGWAVITDEYKVPSKKFKVLGNTDRHSIKKNLIGALLFDSGETAEATRLKRTARRRYTRRKNRICYLQEIFSNEMAKVDDSFFHRLEESFLVEEDKKHERHPIFGNIVDEVAYHEKYPTIYHLRKKLVDSTDKADLRLIYLALAHMIKFRGHFLIEGDLNPDNSDVDKLFIQLVQTYNQLFEENPINASGVDAKAILSARLSKSRRLENLIAQLPGEKKNGLFGNLIALSLGLTPNFKSNFDLAEDAKLQLSKDTYDDDLDNLLAQIGDQYADLFLAAKNLSDAILLSDILRVNTEITKAPLSASMIKRYDEHHQDLTLLKALVRQQLPEKYKEIFFDQSKNGYAGYIDGGASQEEFYKFIKPILEKMDGTEELLVKLNREDLLRKQRTFDNGSIPHQIHLGELHAILRRQEDFYPFLKDNREKIEKILTFRIPYYVGPLARGNSRFAWMTRKSEETITPWNFEEVVDKGASAQSFIERMTNFDKNLPNEKVLPKHSLLYEYFTVYNELTKVKYVTEGMRKPAFLSGEQKKAIVDLLFKTNRKVTVKQLKEDYFKKIECFDSVEISGVEDRFNASLGTYHDLLKIIKDKDFLDNEENEDILEDIVLTLTLFEDREMIEERLKTYAHLFDDKVMKQLKRRRYTGWGRLSRKLINGIRDKQSGKTILDFLKSDGFANRNFMQLIHDDSLTFKEDIQKAQVSGQGDSLHEHIANLAGSPAIKKGILQTVKVVDELVKVMGRHKPENIVIEMARENQTTQKGQKNSRERMKRIEEGIKELGSQILKEHPVENTQLQNEKLYLYYLQNGRDMYVDQELDINRLSDYDVDHIVPQSFLKDDSIDNKVLTRSDKARGKSDNVPSEEVVKKMKNYWRQLLNAKLITQRKFDNLTKAERGGLSELDKAGFIKRQLVETRQITKHVAQILDSRMNTKYDENDKLIREVKVITLKSKLVSDFRKDFQFYKVREINNYHHAHDAYLNAVVGTALIKKYPKLESEFVYGDYKVYDVRKMIAKSEQEIGKATAKYFFYSNIMNFFKTEITLANGEIRKRPLIETNGETGEIVWDKGRDFATVRKVLSMPQVNIVKKTEVQTGGFSKESILPKRNSDKLIARKKDWDPKKYGGFDSPTVAYSVLVVAKVEKGKSKKLKSVKELLGITIMERSSFEKNPIDFLEAKGYKEVKKDLIIKLPKYSLFELENGRKRMLASAGELQKGNELALPSKYVNFLYLASHYEKLKGSPEDNEQKQLFVEQHKHYLDEIIEQISEFSKRVILADANLDKVLSAYNKHRDKPIREQAENIIHLFTLTNLGAPAAFKYFDTTIDRKRYTSTKEVLDATLIHQSITGLYETRIDLSQLGGDGGGSAGSAAGSGEFGGTLNIEDEYRLHETSKEPDVPLGSTWLSDFPQAWAETGGMGLAVRQAPLIIPLKATSTPVSIKQYPMSQEARLGIKPHIQRLLDQGILVPCQSPWNTPLLPVKKPGTNDYRPVQDLREVNKRVEDIHPTVPNPYNLLSGLPPSHQWYTVLDLKDAFFCLRLHPTSQPLFAFEWRDPEMGISGQLTWTRLPQGFKNSPTLFNEALHRDLADFRIQHPDLILLQYVDDLLLAATSEQDCQRGTRALLQTLGNLGYRASAKKAQICQKQVKYLGYLLKEGQRWLTEARKETVMGQPTPKTPRQLREFLGKAGFCRLFIPGFAEMAAPLYPLTKPGTLFNWGPDQQKAYQEIKQALLTAPALGLPDLTKPFELFVDEKQGYAKGVLTQKLGPWRRPVAYLSKKLDPVAAGWPPCLRMVAAIAVLTKDAGKLTMGQPLVILAPHAVEALVKQPPDRWLSNARMTHYQAMLLDTDRVQFGPVVALNPATLLPLPEKEAPHDCLEILAETHGTRPDLTDQPIPDADYTWYTDGSSFLQEGQRRAGAAVTTETEVIWARALPAGTSAQRAELIALTQALKMAEGKKLNVYTDSRYAFATAHVHGEIYRRRGWLTSEGREIKNKNEILALLKALFLPKRLSIIHCPGHQKGNSAEARGNRMADQAAREAAMKAVLETSTLLAGKRTADGSEFEKRTADGSEFESPKKKAKVE

SEQ ID NO: 1073 - protein, 2094 aa, synthetic construct
MPAAKRVKLDGGDKKYSIGLDIGTNSVGWAVITDEYKVPSKKFKVLGNTDRHSIKKNLIGALLFDSGETAEATRLKRTARRRYTRRKNRICYLQEIFSNEMAKVDDSFFHRLEESFLVEEDKKHERHPIFGNIVDEVAYHEKYPTIYHLRKKLVDSTDKADLRLIYLALAHMIKFRGHFLIEGDLNPDNSDVDKLFIQLVQTYNQLFEENPINASGVDAKAILSARLSKSRRLENLIAQLPGEKKNGLFGNLIALSLGLTPNFKSNFDLAEDAKLQLSKDTYDDDLDNLLAQIGDQYADLFLAAKNLSDAILLSDILRVNTEITKAPLSASMIKRYDEHHQDLTLLKALVRQQLPEKYKEIFFDQSKNGYAGYIDGGASQEEFYKFIKPILEKMDGTEELLVKLNREDLLRKQRTFDNGSIPHQIHLGELHAILRRQEDFYPFLKDNREKIEKILTFRIPYYVGPLARGNSRFAWMTRKSEETITPWNFEEVVDKGASAQSFIERMTNFDKNLPNEKVLPKHSLLYEYFTVYNELTKVKYVTEGMRKPAFLSGEQKKAIVDLLFKTNRKVTVKQLKEDYFKKIECFDSVEISGVEDRFNASLGTYHDLLKIIKDKDFLDNEENEDILEDIVLTLTLFEDREMIEERLKTYAHLFDDKVMKQLKRRRYTGWGRLSRKLINGIRDKQSGKTILDFLKSDGFANRNFMQLIHDDSLTFKEDIQKAQVSGQGDSLHEHIANLAGSPAIKKGILQTVKVVDELVKVMGRHKPENIVIEMARENQTTQKGQKNSRERMKRIEEGIKELGSQILKEHPVENTQLQNEKLYLYYLQNGRDMYVDQELDINRLSDYDVDHIVPQSFLKDDSIDNKVLTRSDKARGKSDNVPSEEVVKKMKNYWRQLLNAKLITQRKFDNLTKAERGGLSELDKAGFIKRQLVETRQITKHVAQILDSRMNTKYDENDKLIREVKVITLKSKLVSDFRKDFQFYKVREINNYHHAHDAYLNAVVGTALIKKYPKLESEFVYGDYKVYDVRKMIAKSEQEIGKATAKYFFYSNIMNFFKTEITLANGEIRKRPLIETNGETGEIVWDKGRDFATVRKVLSMPQVNIVKKTEVQTGGFSKESILPKRNSDKLIARKKDWDPKKYGGFDSPTVAYSVLVVAKVEKGKSKKLKSVKELLGITIMERSSFEKNPIDFLEAKGYKEVKKDLIIKLPKYSLFELENGRKRMLASAGELQKGNELALPSKYVNFLYLASHYEKLKGSPEDNEQKQLFVEQHKHYLDEIIEQISEFSKRVILADANLDKVLSAYNKHRDKPIREQAENIIHLFTLTNLGAPAAFKYFDTTIDRKRYTSTKEVLDATLIHQSITGLYETRIDLSQLGGDGGGGGGSSPAPGGTLNIEDEYRLHETSKEPDVPLGSTWLSDFPQAWAETGGMGLAVRQAPLIIPLKATSTPVSIKQYPMSQEARLGIKPHIQRLLDQGILVPCQSPWNTPLLPVKKPGTNDYRPVQDLREVNKRVEDIHPTVPNPYNLLSGLPPSHQWYTVLDLKDAFFCLRLHPTSQPLFAFEWRDPEMGISGQLTWTRLPQGFKNSPTLFNEALHRDLADFRIQHPDLILLQYVDDLLLAATSEQDCQRGTRALLQTLGNLGYRASAKKAQICQKQVKYLGYLLKEGQRWLTEARKETVMGQPTPKTPRQLREFLGKAGFCRLFIPGFAEMAAPLYPLTKPGTLFNWGPDQQKAYQEIKQALLTAPALGLPDLTKPFELFVDEKQGYAKGVLTQKLGPWRRPVAYLSKKLDPVAAGWPPCLRMVAAIAVLTKDAGKLTMGQPLVILAPHAVEALVKQPPDRWLSNARMTHYQAMLLDTDRVQFGPVVALNPATLLPLPEKEAPHDCLEILAETHGTRPDLTDQPIPDADYTWYTDGSSFLQEGQRRAGAAVTTETEVIWARALPAGTSAQRAELIALTQALKMAEGKKLNVYTDSRYAFATAHVHGEIYRRRGWLTSEGREIKNKNEILALLKALFLPKRLSIIHCPGHQKGNSAEARGNRMADQAAREAAMKAVLETSTLLAGKRTADGSEFEKRTADGSEFESPKKKAKVE

SEQ ID NO: 1074 - protein, 2095 aa, synthetic construct
MPAAKRVKLDGGDKKYSIGLDIGTNSVGWAVITDEYKVPSKKFKVLGNTDRHSIKKNLIGALLFDSGETAEATRLKRTARRRYTRRKNRICYLQEIFSNEMAKVDDSFFHRLEESFLVEEDKKHERHPIFGNIVDEVAYHEKYPTIYHLRKKLVDSTDKADLRLIYLALAHMIKFRGHFLIEGDLNPDNSDVDKLFIQLVQTYNQLFEENPINASGVDAKAILSARLSKSRRLENLIAQLPGEKKNGLFGNLIALSLGLTPNFKSNFDLAEDAKLQLSKDTYDDDLDNLLAQIGDQYADLFLAAKNLSDAILLSDILRVNTEITKAPLSASMIKRYDEHHQDLTLLKALVRQQLPEKYKEIFFDQSKNGYAGYIDGGASQEEFYKFIKPILEKMDGTEELLVKLNREDLLRKQRTFDNGSIPHQIHLGELHAILRRQEDFYPFLKDNREKIEKILTFRIPYYVGPLARGNSRFAWMTRKSEETITPWNFEEVVDKGASAQSFIERMTNFDKNLPNEKVLPKHSLLYEYFTVYNELTKVKYVTEGMRKPAFLSGEQKKAIVDLLFKTNRKVTVKQLKEDYFKKIECFDSVEISGVEDRFNASLGTYHDLLKIIKDKDFLDNEENEDILEDIVLTLTLFEDREMIEERLKTYAHLFDDKVMKQLKRRRYTGWGRLSRKLINGIRDKQSGKTILDFLKSDGFANRNFMQLIHDDSLTFKEDIQKAQVSGQGDSLHEHIANLAGSPAIKKGILQTVKVVDELVKVMGRHKPENIVIEMARENQTTQKGQKNSRERMKRIEEGIKELGSQILKEHPVENTQLQNEKLYLYYLQNGRDMYVDQELDINRLSDYDVDHIVPQSFLKDDSIDNKVLTRSDKARGKSDNVPSEEVVKKMKNYWRQLLNAKLITQRKFDNLTKAERGGLSELDKAGFIKRQLVETRQITKHVAQILDSRMNTKYDENDKLIREVKVITLKSKLVSDFRKDFQFYKVREINNYHHAHDAYLNAVVGTALIKKYPKLESEFVYGDYKVYDVRKMIAKSEQEIGKATAKYFFYSNIMNFFKTEITLANGEIRKRPLIETNGETGEIVWDKGRDFATVRKVLSMPQVNIVKKTEVQTGGFSKESILPKRNSDKLIARKKDWDPKKYGGFDSPTVAYSVLVVAKVEKGKSKKLKSVKELLGITIMERSSFEKNPIDFLEAKGYKEVKKDLIIKLPKYSLFELENGRKRMLASAGELQKGNELALPSKYVNFLYLASHYEKLKGSPEDNEQKQLFVEQHKHYLDEIIEQISEFSKRVILADANLDKVLSAYNKHRDKPIREQAENIIHLFTLTNLGAPAAFKYFDTTIDRKRYTSTKEVLDATLIHQSITGLYETRIDLSQLGGDGGGGGGSGGGGSGGTLNIEDEYRLHETSKEPDVPLGSTWLSDFPQAWAETGGMGLAVRQAPLIIPLKATSTPVSIKQYPMSQEARLGIKPHIQRLLDQGILVPCQSPWNTPLLPVKKPGTNDYRPVQDLREVNKRVEDIHPTVPNPYNLLSGLPPSHQWYTVLDLKDAFFCLRLHPTSQPLFAFEWRDPEMGISGQLTWTRLPQGFKNSPTLFNEALHRDLADFRIQHPDLILLQYVDDLLLAATSEQDCQRGTRALLQTLGNLGYRASAKKAQICQKQVKYLGYLLKEGQRWLTEARKETVMGQPTPKTPRQLREFLGKAGFCRLFIPGFAEMAAPLYPLTKPGTLFNWGPDQQKAYQEIKQALLTAPALGLPDLTKPFELFVDEKQGYAKGVLTQKLGPWRRPVAYLSKKLDPVAAGWPPCLRMVAAIAVLTKDAGKLTMGQPLVILAPHAVEALVKQPPDRWLSNARMTHYQAMLLDTDRVQFGPVVALNPATLLPLPEKEAPHDCLEILAETHGTRPDLTDQPIPDADYTWYTDGSSFLQEGQRRAGAAVTTETEVIWARALPAGTSAQRAELIALTQALKMAEGKKLNVYTDSRYAFATAHVHGEIYRRRGWLTSEGREIKNKNEILALLKALFLPKRLSIIHCPGHQKGNSAEARGNRMADQAAREAAMKAVLETSTLLAGKRTADGSEFEKRTADGSEFESPKKKAKVE

SEQ ID NO: 1075 - protein, 2096 aa, synthetic construct
MPAAKRVKLDGGDKKYSIGLDIGTNSVGWAVITDEYKVPSKKFKVLGNTDRHSIKKNLIGALLFDSGETAEATRLKRTARRRYTRRKNRICYLQEIFSNEMAKVDDSFFHRLEESFLVEEDKKHERHPIFGNIVDEVAYHEKYPTIYHLRKKLVDSTDKADLRLIYLALAHMIKFRGHFLIEGDLNPDNSDVDKLFIQLVQTYNQLFEENPINASGVDAKAILSARLSKSRRLENLIAQLPGEKKNGLFGNLIALSLGLTPNFKSNFDLAEDAKLQLSKDTYDDDLDNLLAQIGDQYADLFLAAKNLSDAILLSDILRVNTEITKAPLSASMIKRYDEHHQDLTLLKALVRQQLPEKYKEIFFDQSKNGYAGYIDGGASQEEFYKFIKPILEKMDGTEELLVKLNREDLLRKQRTFDNGSIPHQIHLGELHAILRRQEDFYPFLKDNREKIEKILTFRIPYYVGPLARGNSRFAWMTRKSEETITPWNFEEVVDKGASAQSFIERMTNFDKNLPNEKVLPKHSLLYEYFTVYNELTKVKYVTEGMRKPAFLSGEQKKAIVDLLFKTNRKVTVKQLKEDYFKKIECFDSVEISGVEDRFNASLGTYHDLLKIIKDKDFLDNEENEDILEDIVLTLTLFEDREMIEERLKTYAHLFDDKVMKQLKRRRYTGWGRLSRKLINGIRDKQSGKTILDFLKSDGFANRNFMQLIHDDSLTFKEDIQKAQVSGQGDSLHEHIANLAGSPAIKKGILQTVKVVDELVKVMGRHKPENIVIEMARENQTTQKGQKNSRERMKRIEEGIKELGSQILKEHPVENTQLQNEKLYLYYLQNGRDMYVDQELDINRLSDYDVDHIVPQSFLKDDSIDNKVLTRSDKARGKSDNVPSEEVVKKMKNYWRQLLNAKLITQRKFDNLTKAERGGLSELDKAGFIKRQLVETRQITKHVAQILDSRMNTKYDENDKLIREVKVITLKSKLVSDFRKDFQFYKVREINNYHHAHDAYLNAVVGTALIKKYPKLESEFVYGDYKVYDVRKMIAKSEQEIGKATAKYFFYSNIMNFFKTEITLANGEIRKRPLIETNGETGEIVWDKGRDFATVRKVLSMPQVNIVKKTEVQTGGFSKESILPKRNSDKLIARKKDWDPKKYGGFDSPTVAYSVLVVAKVEKGKSKKLKSVKELLGITIMERSSFEKNPIDFLEAKGYKEVKKDLIIKLPKYSLFELENGRKRMLASAGELQKGNELALPSKYVNFLYLASHYEKLKGSPEDNEQKQLFVEQHKHYLDEIIEQISEFSKRVILADANLDKVLSAYNKHRDKPIREQAENIIHLFTLTNLGAPAAFKYFDTTIDRKRYTSTKEVLDATLIHQSITGLYETRIDLSQLGGDGGGSSEAAAKGGSGGTLNIEDEYRLHETSKEPDVPLGSTWLSDFPQAWAETGGMGLAVRQAPLIIPLKATSTPVSIKQYPMSQEARLGIKPHIQRLLDQGILVPCQSPWNTPLLPVKKPGTNDYRPVQDLREVNKRVEDIHPTVPNPYNLLSGLPPSHQWYTVLDLKDAFFCLRLHPTSQPLFAFEWRDPEMGISGQLTWTRLPQGFKNSPTLFNEALHRDLADFRIQHPDLILLQYVDDLLLAATSEQDCQRGTRALLQTLGNLGYRASAKKAQICQKQVKYLGYLLKEGQRWLTEARKETVMGQPTPKTPRQLREFLGKAGFCRLFIPGFAEMAAPLYPLTKPGTLFNWGPDQQKAYQEIKQALLTAPALGLPDLTKPFELFVDEKQGYAKGVLTQKLGPWRRPVAYLSKKLDPVAAGWPPCLRMVAAIAVLTKDAGKLTMGQPLVILAPHAVEALVKQPPDRWLSNARMTHYQAMLLDTDRVQFGPVVALNPATLLPLPEKEAPHDCLEILAETHGTRPDLTDQPIPDADYTWYTDGSSFLQEGQRRAGAAVTTETEVIWARALPAGTSAQRAELIALTQALKMAEGKKLNVYTDSRYAFATAHVHGEIYRRRGWLTSEGREIKNKNEILALLKALFLPKRLSIIHCPGHQKGNSAEARGNRMADQAAREAAMKAVLETSTLLAGKRTADGSEFEKRTADGSEFESPKKKAKVE

SEQ ID NO: 1076 - protein, 2096 aa, synthetic construct
MPAAKRVKLDGGDKKYSIGLDIGTNSVGWAVITDEYKVPSKKFKVLGNTDRHSIKKNLIGALLFDSGETAEATRLKRTARRRYTRRKNRICYLQEIFSNEMAKVDDSFFHRLEESFLVEEDKKHERHPIFGNIVDEVAYHEKYPTIYHLRKKLVDSTDKADLRLIYLALAHMIKFRGHFLIEGDLNPDNSDVDKLFIQLVQTYNQLFEENPINASGVDAKAILSARLSKSRRLENLIAQLPGEKKNGLFGNLIALSLGLTPNFKSNFDLAEDAKLQLSKDTYDDDLDNLLAQIGDQYADLFLAAKNLSDAILLSDILRVNTEITKAPLSASMIKRYDEHHQDLTLLKALVRQQLPEKYKEIFFDQSKNGYAGYIDGGASQEEFYKFIKPILEKMDGTEELLVKLNREDLLRKQRTFDNGSIPHQIHLGELHAILRRQEDFYPFLKDNREKIEKILTFRIPYYVGPLARGNSRFAWMTRKSEETITPWNFEEVVDKGASAQSFIERMTNFDKNLPNEKVLPKHSLLYEYFTVYNELTKVKYVTEGMRKPAFLSGEQKKAIVDLLFKTNRKVTVKQLKEDYFKKIECFDSVEISGVEDRFNASLGTYHDLLKIIKDKDFLDNEENEDILEDIVLTLTLFEDREMIEERLKTYAHLFDDKVMKQLKRRRYTGWGRLSRKLINGIRDKQSGKTILDFLKSDGFANRNFMQLIHDDSLTFKEDIQKAQVSGQGDSLHEHIANLAGSPAIKKGILQTVKVVDELVKVMGRHKPENIVIEMARENQTTQKGQKNSRERMKRIEEGIKELGSQILKEHPVENTQLQNEKLYLYYLQNGRDMYVDQELDINRLSDYDVDHIVPQSFLKDDSIDNKVLTRSDKARGKSDNVPSEEVVKKMKNYWRQLLNAKLITQRKFDNLTKAERGGLSELDKAGFIKRQLVETRQITKHVAQILDSRMNTKYDENDKLIREVKVITLKSKLVSDFRKDFQFYKVREINNYHHAHDAYLNAVVGTALIKKYPKLESEFVYGDYKVYDVRKMIAKSEQEIGKATAKYFFYSNIMNFFKTEITLANGEIRKRPLIETNGETGEIVWDKGRDFATVRKVLSMPQVNIVKKTEVQTGGFSKESILPKRNSDKLIARKKDWDPKKYGGFDSPTVAYSVLVVAKVEKGKSKKLKSVKELLGITIMERSSFEKNPIDFLEAKGYKEVKKDLIIKLPKYSLFELENGRKRMLASAGELQKGNELALPSKYVNFLYLASHYEKLKGSPEDNEQKQLFVEQHKHYLDEIIEQISEFSKRVILADANLDKVLSAYNKHRDKPIREQAENIIHLFTLTNLGAPAAFKYFDTTIDRKRYTSTKEVLDATLIHQSITGLYETRIDLSQLGGDGGGGGPAPEAAAKGGTLNIEDEYRLHETSKEPDVPLGSTWLSDFPQAWAETGGMGLAVRQAPLIIPLKATSTPVSIKQYPMSQEARLGIKPHIQRLLDQGILVPCQSPWNTPLLPVKKPGTNDYRPVQDLREVNKRVEDIHPTVPNPYNLLSGLPPSHQWYTVLDLKDAFFCLRLHPTSQPLFAFEWRDPEMGISGQLTWTRLPQGFKNSPTLFNEALHRDLADFRIQHPDLILLQYVDDLLLAATSEQDCQRGTRALLQTLGNLGYRASAKKAQICQKQVKYLGYLLKEGQRWLTEARKETVMGQPTPKTPRQLREFLGKAGFCRLFIPGFAEMAAPLYPLTKPGTLFNWGPDQQKAYQEIKQALLTAPALGLPDLTKPFELFVDEKQGYAKGVLTQKLGPWRRPVAYLSKKLDPVAAGWPPCLRMVAAIAVLTKDAGKLTMGQPLVILAPHAVEALVKQPPDRWLSNARMTHYQAMLLDTDRVQFGPVVALNPATLLPLPEKEAPHDCLEILAETHGTRPDLTDQPIPDADYTWYTDGSSFLQEGQRRAGAAVTTETEVIWARALPAGTSAQRAELIALTQALKMAEGKKLNVYTDSRYAFATAHVHGEIYRRRGWLTSEGREIKNKNEILALLKALFLPKRLSIIHCPGHQKGNSAEARGNRMADQAAREAAMKAVLETSTLLAGKRTADGSEFEKRTADGSEFESPKKKAKVE

SEQ ID NO: 1077 - protein, 2097 aa, synthetic construct
MPAAKRVKLDGGDKKYSIGLDIGTNSVGWAVITDEYKVPSKKFKVLGNTDRHSIKKNLIGALLFDSGETAEATRLKRTARRRYTRRKNRICYLQEIFSNEMAKVDDSFFHRLEESFLVEEDKKHERHPIFGNIVDEVAYHEKYPTIYHLRKKLVDSTDKADLRLIYLALAHMIKFRGHFLIEGDLNPDNSDVDKLFIQLVQTYNQLFEENPINASGVDAKAILSARLSKSRRLENLIAQLPGEKKNGLFGNLIALSLGLTPNFKSNFDLAEDAKLQLSKDTYDDDLDNLLAQIGDQYADLFLAAKNLSDAILLSDILRVNTEITKAPLSASMIKRYDEHHQDLTLLKALVRQQLPEKYKEIFFDQSKNGYAGYIDGGASQEEFYKFIKPILEKMDGTEELLVKLNREDLLRKQRTFDNGSIPHQIHLGELHAILRRQEDFYPFLKDNREKIEKILTFRIPYYVGPLARGNSRFAWMTRKSEETITPWNFEEVVDKGASAQSFIERMTNFDKNLPNEKVLPKHSLLYEYFTVYNELTKVKYVTEGMRKPAFLSGEQKKAIVDLLFKTNRKVTVKQLKEDYFKKIECFDSVEISGVEDRFNASLGTYHDLLKIIKDKDFLDNEENEDILEDIVLTLTLFEDREMIEERLKTYAHLFDDKVMKQLKRRRYTGWGRLSRKLINGIRDKQSGKTILDFLKSDGFANRNFMQLIHDDSLTFKEDIQKAQVSGQGDSLHEHIANLAGSPAIKKGILQTVKVVDELVKVMGRHKPENIVIEMARENQTTQKGQKNSRERMKRIEEGIKELGSQILKEHPVENTQLQNEKLYLYYLQNGRDMYVDQELDINRLSDYDVDHIVPQSFLKDDSIDNKVLTRSDKARGKSDNVPSEEVVKKMKNYWRQLLNAKLITQRKFDNLTKAERGGLSELDKAGFIKRQLVETRQITKHVAQILDSRMNTKYDENDKLIREVKVITLKSKLVSDFRKDFQFYKVREINNYHHAHDAYLNAVVGTALIKKYPKLESEFVYGDYKVYDVRKMIAKSEQEIGKATAKYFFYSNIMNFFKTEITLANGEIRKRPLIETNGETGEIVWDKGRDFATVRKVLSMPQVNIVKKTEVQTGGFSKESILPKRNSDKLIARKKDWDPKKYGGFDSPTVAYSVLVVAKVEKGKSKKLKSVKELLGITIMERSSFEKNPIDFLEAKGYKEVKKDLIIKLPKYSLFELENGRKRMLASAGELQKGNELALPSKYVNFLYLASHYEKLKGSPEDNEQKQLFVEQHKHYLDEIIEQISEFSKRVILADANLDKVLSAYNKHRDKPIREQAENIIHLFTLTNLGAPAAFKYFDTTIDRKRYTSTKEVLDATLIHQSITGLYETRIDLSQLGGDGGGSSGSSGSSGSSGGTLNIEDEYRLHETSKEPDVPLGSTWLSDFPQAWAETGGMGLAVRQAPLIIPLKATSTPVSIKQYPMSQEARLGIKPHIQRLLDQGILVPCQSPWNTPLLPVKKPGTNDYRPVQDLREVNKRVEDIHPTVPNPYNLLSGLPPSHQWYTVLDLKDAFFCLRLHPTSQPLFAFEWRDPEMGISGQLTWTRLPQGFKNSPTLFNEALHRDLADFRIQHPDLILLQYVDDLLLAATSEQDCQRGTRALLQTLGNLGYRASAKKAQICQKQVKYLGYLLKEGQRWLTEARKETVMGQPTPKTPRQLREFLGKAGFCRLFIPGFAEMAAPLYPLTKPGTLFNWGPDQQKAYQEIKQALLTAPALGLPDLTKPFELFVDEKQGYAKGVLTQKLGPWRRPVAYLSKKLDPVAAGWPPCLRMVAAIAVLTKDAGKLTMGQPLVILAPHAVEALVKQPPDRWLSNARMTHYQAMLLDTDRVQFGPVVALNPATLLPLPEKEAPHDCLEILAETHGTRPDLTDQPIPDADYTWYTDGSSFLQEGQRRAGAAVTTETEVIWARALPAGTSAQRAELIALTQALKMAEGKKLNVYTDSRYAFATAHVHGEIYRRRGWLTSEGREIKNKNEILALLKALFLPKRLSIIHCPGHQKGNSAEARGNRMADQAAREAAMKAVLETSTLLAGKRTADGSEFEKRTADGSEFESPKKKAKVE

SEQ ID NO: 1078 - protein, 2093 aa, synthetic construct
MPAAKRVKLDGGDKKYSIGLDIGTNSVGWAVITDEYKVPSKKFKVLGNTDRHSIKKNLIGALLFDSGETAEATRLKRTARRRYTRRKNRICYLQEIFSNEMAKVDDSFFHRLEESFLVEEDKKHERHPIFGNIVDEVAYHEKYPTIYHLRKKLVDSTDKADLRLIYLALAHMIKFRGHFLIEGDLNPDNSDVDKLFIQLVQTYNQLFEENPINASGVDAKAILSARLSKSRRLENLIAQLPGEKKNGLFGNLIALSLGLTPNFKSNFDLAEDAKLQLSKDTYDDDLDNLLAQIGDQYADLFLAAKNLSDAILLSDILRVNTEITKAPLSASMIKRYDEHHQDLTLLKALVRQQLPEKYKEIFFDQSKNGYAGYIDGGASQEEFYKFIKPILEKMDGTEELLVKLNREDLLRKQRTFDNGSIPHQIHLGELHAILRRQEDFYPFLKDNREKIEKILTFRIPYYVGPLARGNSRFAWMTRKSEETITPWNFEEVVDKGASAQSFIERMTNFDKNLPNEKVLPKHSLLYEYFTVYNELTKVKYVTEGMRKPAFLSGEQKKAIVDLLFKTNRKVTVKQLKEDYFKKIECFDSVEISGVEDRFNASLGTYHDLLKIIKDKDFLDNEENEDILEDIVLTLTLFEDREMIEERLKTYAHLFDDKVMKQLKRRRYTGWGRLSRKLINGIRDKQSGKTILDFLKSDGFANRNFMQLIHDDSLTFKEDIQKAQVSGQGDSLHEHIANLAGSPAIKKGILQTVKVVDELVKVMGRHKPENIVIEMARENQTTQKGQKNSRERMKRIEEGIKELGSQILKEHPVENTQLQNEKLYLYYLQNGRDMYVDQELDINRLSDYDVDHIVPQSFLKDDSIDNKVLTRSDKARGKSDNVPSEEVVKKMKNYWRQLLNAKLITQRKFDNLTKAERGGLSELDKAGFIKRQLVETRQITKHVAQILDSRMNTKYDENDKLIREVKVITLKSKLVSDFRKDFQFYKVREINNYHHAHDAYLNAVVGTALIKKYPKLESEFVYGDYKVYDVRKMIAKSEQEIGKATAKYFFYSNIMNFFKTEITLANGEIRKRPLIETNGETGEIVWDKGRDFATVRKVLSMPQVNIVKKTEVQTGGFSKESILPKRNSDKLIARKKDWDPKKYGGFDSPTVAYSVLVVAKVEKGKSKKLKSVKELLGITIMERSSFEKNPIDFLEAKGYKEVKKDLIIKLPKYSLFELENGRKRMLASAGELQKGNELALPSKYVNFLYLASHYEKLKGSPEDNEQKQLFVEQHKHYLDEIIEQISEFSKRVILADANLDKVLSAYNKHRDKPIREQAENIIHLFTLTNLGAPAAFKYFDTTIDRKRYTSTKEVLDATLIHQSITGLYETRIDLSQLGGDGGEAAAKGSSGGTLNIEDEYRLHETSKEPDVPLGSTWLSDFPQAWAETGGMGLAVRQAPLIIPLKATSTPVSIKQYPMSQEARLGIKPHIQRLLDQGILVPCQSPWNTPLLPVKKPGTNDYRPVQDLREVNKRVEDIHPTVPNPYNLLSGLPPSHQWYTVLDLKDAFFCLRLHPTSQPLFAFEWRDPEMGISGQLTWTRLPQGFKNSPTLFNEALHRDLADFRIQHPDLILLQYVDDLLLAATSEQDCQRGTRALLQTLGNLGYRASAKKAQICQKQVKYLGYLLKEGQRWLTEARKETVMGQPTPKTPRQLREFLGKAGFCRLFIPGFAEMAAPLYPLTKPGTLFNWGPDQQKAYQEIKQALLTAPALGLPDLTKPFELFVDEKQGYAKGVLTQKLGPWRRPVAYLSKKLDPVAAGWPPCLRMVAAIAVLTKDAGKLTMGQPLVILAPHAVEALVKQPPDRWLSNARMTHYQAMLLDTDRVQFGPVVALNPATLLPLPEKEAPHDCLEILAETHGTRPDLTDQPIPDADYTWYTDGSSFLQEGQRRAGAAVTTETEVIWARALPAGTSAQRAELIALTQALKMAEGKKLNVYTDSRYAFATAHVHGEIYRRRGWLTSEGREIKNKNEILALLKALFLPKRLSIIHCPGHQKGNSAEARGNRMADQAAREAAMKAVLETSTLLAGKRTADGSEFEKRTADGSEFESPKKKAKVE

SEQ ID NO: 1079 - protein, 2100 aa, synthetic construct
MPAAKRVKLDGGDKKYSIGLDIGTNSVGWAVITDEYKVPSKKFKVLGNTDRHSIKKNLIGALLFDSGETAEATRLKRTARRRYTRRKNRICYLQEIFSNEMAKVDDSFFHRLEESFLVEEDKKHERHPIFGNIVDEVAYHEKYPTIYHLRKKLVDSTDKADLRLIYLALAHMIKFRGHFLIEGDLNPDNSDVDKLFIQLVQTYNQLFEENPINASGVDAKAILSARLSKSRRLENLIAQLPGEKKNGLFGNLIALSLGLTPNFKSNFDLAEDAKLQLSKDTYDDDLDNLLAQIGDQYADLFLAAKNLSDAILLSDILRVNTEITKAPLSASMIKRYDEHHQDLTLLKALVRQQLPEKYKEIFFDQSKNGYAGYIDGGASQEEFYKFIKPILEKMDGTEELLVKLNREDLLRKQRTFDNGSIPHQIHLGELHAILRRQEDFYPFLKDNREKIEKILTFRIPYYVGPLARGNSRFAWMTRKSEETITPWNFEEVVDKGASAQSFIERMTNFDKNLPNEKVLPKHSLLYEYFTVYNELTKVKYVTEGMRKPAFLSGEQKKAIVDLLFKTNRKVTVKQLKEDYFKKIECFDSVEISGVEDRFNASLGTYHDLLKIIKDKDFLDNEENEDILEDIVLTLTLFEDREMIEERLKTYAHLFDDKVMKQLKRRRYTGWGRLSRKLINGIRDKQSGKTILDFLKSDGFANRNFMQLIHDDSLTFKEDIQKAQVSGQGDSLHEHIANLAGSPAIKKGILQTVKVVDELVKVMGRHKPENIVIEMARENQTTQKGQKNSRERMKRIEEGIKELGSQILKEHPVENTQLQNEKLYLYYLQNGRDMYVDQELDINRLSDYDVDHIVPQSFLKDDSIDNKVLTRSDKARGKSDNVPSEEVVKKMKNYWRQLLNAKLITQRKFDNLTKAERGGLSELDKAGFIKRQLVETRQITKHVAQILDSRMNTKYDENDKLIREVKVITLKSKLVSDFRKDFQFYKVREINNYHHAHDAYLNAVVGTALIKKYPKLESEFVYGDYKVYDVRKMIAKSEQEIGKATAKYFFYSNIMNFFKTEITLANGEIRKRPLIETNGETGEIVWDKGRDFATVRKVLSMPQVNIVKKTEVQTGGFSKESILPKRNSDKLIARKKDWDPKKYGGFDSPTVAYSVLVVAKVEKGKSKKLKSVKELLGITIMERSSFEKNPIDFLEAKGYKEVKKDLIIKLPKYSLFELENGRKRMLASAGELQKGNELALPSKYVNFLYLASHYEKLKGSPEDNEQKQLFVEQHKHYLDEIIEQISEFSKRVILADANLDKVLSAYNKHRDKPIREQAENIIHLFTLTNLGAPAAFKYFDTTIDRKRYTSTKEVLDATLIHQSITGLYETRIDLSQLGGDGGGGGGSEAAAKGGGGSGGTLNIEDEYRLHETSKEPDVPLGSTWLSDFPQAWAETGGMGLAVRQAPLIIPLKATSTPVSIKQYPMSQEARLGIKPHIQRLLDQGILVPCQSPWNTPLLPVKKPGTNDYRPVQDLREVNKRVEDIHPTVPNPYNLLSGLPPSHQWYTVLDLKDAFFCLRLHPTSQPLFAFEWRDPEMGISGQLTWTRLPQGFKNSPTLFNEALHRDLADFRIQHPDLILLQYVDDLLLAATSEQDCQRGTRALLQTLGNLGYRASAKKAQICQKQVKYLGYLLKEGQRWLTEARKETVMGQPTPKTPRQLREFLGKAGFCRLFIPGFAEMAAPLYPLTKPGTLFNWGPDQQKAYQEIKQALLTAPALGLPDLTKPFELFVDEKQGYAKGVLTQKLGPWRRPVAYLSKKLDPVAAGWPPCLRMVAAIAVLTKDAGKLTMGQPLVILAPHAVEALVKQPPDRWLSNARMTHYQAMLLDTDRVQFGPVVALNPATLLPLPEKEAPHDCLEILAETHGTRPDLTDQPIPDADYTWYTDGSSFLQEGQRRAGAAVTTETEVIWARALPAGTSAQRAELIALTQALKMAEGKKLNVYTDSRYAFATAHVHGEIYRRRGWLTSEGREIKNKNEILALLKALFLPKRLSIIHCPGHQKGNSAEARGNRMADQAAREAAMKAVLETSTLLAGKRTADGSEFEKRTADGSEFESPKKKAKVE

SEQ ID NO: 1080 - protein, 2088 aa, synthetic construct
MPAAKRVKLDGGDKKYSIGLDIGTNSVGWAVITDEYKVPSKKFKVLGNTDRHSIKKNLIGALLFDSGETAEATRLKRTARRRYTRRKNRICYLQEIFSNEMAKVDDSFFHRLEESFLVEEDKKHERHPIFGNIVDEVAYHEKYPTIYHLRKKLVDSTDKADLRLIYLALAHMIKFRGHFLIEGDLNPDNSDVDKLFIQLVQTYNQLFEENPINASGVDAKAILSARLSKSRRLENLIAQLPGEKKNGLFGNLIALSLGLTPNFKSNFDLAEDAKLQLSKDTYDDDLDNLLAQIGDQYADLFLAAKNLSDAILLSDILRVNTEITKAPLSASMIKRYDEHHQDLTLLKALVRQQLPEKYKEIFFDQSKNGYAGYIDGGASQEEFYKFIKPILEKMDGTEELLVKLNREDLLRKQRTFDNGSIPHQIHLGELHAILRRQEDFYPFLKDNREKIEKILTFRIPYYVGPLARGNSRFAWMTRKSEETITPWNFEEVVDKGASAQSFIERMTNFDKNLPNEKVLPKHSLLYEYFTVYNELTKVKYVTEGMRKPAFLSGEQKKAIVDLLFKTNRKVTVKQLKEDYFKKIECFDSVEISGVEDRFNASLGTYHDLLKIIKDKDFLDNEENEDILEDIVLTLTLFEDREMIEERLKTYAHLFDDKVMKQLKRRRYTGWGRLSRKLINGIRDKQSGKTILDFLKSDGFANRNFMQLIHDDSLTFKEDIQKAQVSGQGDSLHEHIANLAGSPAIKKGILQTVKVVDELVKVMGRHKPENIVIEMARENQTTQKGQKNSRERMKRIEEGIKELGSQILKEHPVENTQLQNEKLYLYYLQNGRDMYVDQELDINRLSDYDVDHIVPQSFLKDDSIDNKVLTRSDKARGKSDNVPSEEVVKKMKNYWRQLLNAKLITQRKFDNLTKAERGGLSELDKAGFIKRQLVETRQITKHVAQILDSRMNTKYDENDKLIREVKVITLKSKLVSDFRKDFQFYKVREINNYHHAHDAYLNAVVGTALIKKYPKLESEFVYGDYKVYDVRKMIAKSEQEIGKATAKYFFYSNIMNFFKTEITLANGEIRKRPLIETNGETGEIVWDKGRDFATVRKVLSMPQVNIVKKTEVQTGGFSKESILPKRNSDKLIARKKDWDPKKYGGFDSPTVAYSVLVVAKVEKGKSKKLKSVKELLGITIMERSSFEKNPIDFLEAKGYKEVKKDLIIKLPKYSLFELENGRKRMLASAGELQKGNELALPSKYVNFLYLASHYEKLKGSPEDNEQKQLFVEQHKHYLDEIIEQISEFSKRVILADANLDKVLSAYNKHRDKPIREQAENIIHLFTLTNLGAPAAFKYFDTTIDRKRYTSTKEVLDATLIHQSITGLYETRIDLSQLGGDGGGGGGGTLNIEDEYRLHETSKEPDVPLGSTWLSDFPQAWAETGGMGLAVRQAPLIIPLKATSTPVSIKQYPMSQEARLGIKPHIQRLLDQGILVPCQSPWNTPLLPVKKPGTNDYRPVQDLREVNKRVEDIHPTVPNPYNLLSGLPPSHQWYTVLDLKDAFFCLRLHPTSQPLFAFEWRDPEMGISGQLTWTRLPQGFKNSPTLFNEALHRDLADFRIQHPDLILLQYVDDLLLAATSEQDCQRGTRALLQTLGNLGYRASAKKAQICQKQVKYLGYLLKEGQRWLTEARKETVMGQPTPKTPRQLREFLGKAGFCRLFIPGFAEMAAPLYPLTKPGTLFNWGPDQQKAYQEIKQALLTAPALGLPDLTKPFELFVDEKQGYAKGVLTQKLGPWRRPVAYLSKKLDPVAAGWPPCLRMVAAIAVLTKDAGKLTMGQPLVILAPHAVEALVKQPPDRWLSNARMTHYQAMLLDTDRVQFGPVVALNPATLLPLPEKEAPHDCLEILAETHGTRPDLTDQPIPDADYTWYTDGSSFLQEGQRRAGAAVTTETEVIWARALPAGTSAQRAELIALTQALKMAEGKKLNVYTDSRYAFATAHVHGEIYRRRGWLTSEGREIKNKNEILALLKALFLPKRLSIIHCPGHQKGNSAEARGNRMADQAAREAAMKAVLETSTLLAGKRTADGSEFEKRTADGSEFESPKKKAKVE

SEQ ID NO: 1081 - protein, 2096 aa, synthetic construct
MPAAKRVKLDGGDKKYSIGLDIGTNSVGWAVITDEYKVPSKKFKVLGNTDRHSIKKNLIGALLFDSGETAEATRLKRTARRRYTRRKNRICYLQEIFSNEMAKVDDSFFHRLEESFLVEEDKKHERHPIFGNIVDEVAYHEKYPTIYHLRKKLVDSTDKADLRLIYLALAHMIKFRGHFLIEGDLNPDNSDVDKLFIQLVQTYNQLFEENPINASGVDAKAILSARLSKSRRLENLIAQLPGEKKNGLFGNLIALSLGLTPNFKSNFDLAEDAKLQLSKDTYDDDLDNLLAQIGDQYADLFLAAKNLSDAILLSDILRVNTEITKAPLSASMIKRYDEHHQDLTLLKALVRQQLPEKYKEIFFDQSKNGYAGYIDGGASQEEFYKFIKPILEKMDGTEELLVKLNREDLLRKQRTFDNGSIPHQIHLGELHAILRRQEDFYPFLKDNREKIEKILTFRIPYYVGPLARGNSRFAWMTRKSEETITPWNFEEVVDKGASAQSFIERMTNFDKNLPNEKVLPKHSLLYEYFTVYNELTKVKYVTEGMRKPAFLSGEQKKAIVDLLFKTNRKVTVKQLKEDYFKKIECFDSVEISGVEDRFNASLGTYHDLLKIIKDKDFLDNEENEDILEDIVLTLTLFEDREMIEERLKTYAHLFDDKVMKQLKRRRYTGWGRLSRKLINGIRDKQSGKTILDFLKSDGFANRNFMQLIHDDSLTFKEDIQKAQVSGQGDSLHEHIANLAGSPAIKKGILQTVKVVDELVKVMGRHKPENIVIEMARENQTTQKGQKNSRERMKRIEEGIKELGSQILKEHPVENTQLQNEKLYLYYLQNGRDMYVDQELDINRLSDYDVDHIVPQSFLKDDSIDNKVLTRSDKARGKSDNVPSEEVVKKMKNYWRQLLNAKLITQRKFDNLTKAERGGLSELDKAGFIKRQLVETRQITKHVAQILDSRMNTKYDENDKLIREVKVITLKSKLVSDFRKDFQFYKVREINNYHHAHDAYLNAVVGTALIKKYPKLESEFVYGDYKVYDVRKMIAKSEQEIGKATAKYFFYSNIMNFFKTEITLANGEIRKRPLIETNGETGEIVWDKGRDFATVRKVLSMPQVNIVKKTEVQTGGFSKESILPKRNSDKLIARKKDWDPKKYGGFDSPTVAYSVLVVAKVEKGKSKKLKSVKELLGITIMERSSFEKNPIDFLEAKGYKEVKKDLIIKLPKYSLFELENGRKRMLASAGELQKGNELALPSKYVNFLYLASHYEKLKGSPEDNEQKQLFVEQHKHYLDEIIEQISEFSKRVILADANLDKVLSAYNKHRDKPIREQAENIIHLFTLTNLGAPAAFKYFDTTIDRKRYTSTKEVLDATLIHQSITGLYETRIDLSQLGGDGGGGSEAAAKGGGGGTLNIEDEYRLHETSKEPDVPLGSTWLSDFPQAWAETGGMGLAVRQAPLIIPLKATSTPVSIKQYPMSQEARLGIKPHIQRLLDQGILVPCQSPWNTPLLPVKKPGTNDYRPVQDLREVNKRVEDIHPTVPNPYNLLSGLPPSHQWYTVLDLKDAFFCLRLHPTSQPLFAFEWRDPEMGISGQLTWTRLPQGFKNSPTLFNEALHRDLADFRIQHPDLILLQYVDDLLLAATSEQDCQRGTRALLQTLGNLGYRASAKKAQICQKQVKYLGYLLKEGQRWLTEARKETVMGQPTPKTPRQLREFLGKAGFCRLFIPGFAEMAAPLYPLTKPGTLFNWGPDQQKAYQEIKQALLTAPALGLPDLTKPFELFVDEKQGYAKGVLTQKLGPWRRPVAYLSKKLDPVAAGWPPCLRMVAAIAVLTKDAGKLTMGQPLVILAPHAVEALVKQPPDRWLSNARMTHYQAMLLDTDRVQFGPVVALNPATLLPLPEKEAPHDCLEILAETHGTRPDLTDQPIPDADYTWYTDGSSFLQEGQRRAGAAVTTETEVIWARALPAGTSAQRAELIALTQALKMAEGKKLNVYTDSRYAFATAHVHGEIYRRRGWLTSEGREIKNKNEILALLKALFLPKRLSIIHCPGHQKGNSAEARGNRMADQAAREAAMKAVLETSTLLAGKRTADGSEFEKRTADGSEFESPKKKAKVE

(The sequence listing continues in the following parts.)